(19) United States
(12) Patent Application Publication
(10) Pub. No.: US 2025/0129348 A1
(43) Pub. Date: Apr. 24, 2025

(54) CIRCULAR PERMUTANTS, COMPOSITIONS COMPRISING THE SAME, AND METHODS OF USE THEREOF

(71) Applicant: Pairwise Plants Services, Inc., Durham, NC (US)

(72) Inventors: David Gerhard Schwark, Apex, NC (US); Sharon Leigh Guffy, Durham, NC (US)

(21) Appl. No.: 18/909,178

(22) Filed: Oct. 8, 2024

Related U.S. Application Data
(60) Provisional application No. 63/588,833, filed on Oct. 9, 2023.

(51) Int. Cl. C12N 9/22; C12N 9/12; C12N 9/78; C12N 15/62

(52) U.S. Cl. CPC C12N 9/22; C12N 9/1276; C12N 9/78; C12N 15/62; C12Y 207/07049; C12Y 301/21001; C12Y 305/04001; C12Y 305/04002; C12N 2310/20

(57) ABSTRACT

Described herein are circular permutants along with compositions and systems comprising the circular permutants. Fusion proteins including a circular permutant are also described such as fusion proteins that include a circular permutant fused to a polypeptide of interest (e.g., a deaminase or reverse transcriptase). Also described herein are methods of using and/or producing a circular permutant such as methods of using a circular permutant for modifying or editing a target nucleic acid.

### STATEMENT REGARDING ELECTRONIC FILING OF A SEQUENCE LISTING

[0001] A Sequence Listing in XML format, entitled 1499-132WO_ST26.xml, 3,956,249 bytes in size, generated on Oct. 3, 2024, and filed herewith, is hereby incorporated by reference in its entirety for its disclosures.

### FIELD

[0002] This invention relates to circular permutants along with compositions and systems comprising the same, and methods of use thereof such as methods of using a circular permutant for modifying or editing a target nucleic acid.

### BACKGROUND

[0003] Cas12a and base editors including a Cas12a domain have a limited editing window. New enzymes may be advantageous.

### SUMMARY OF THE INVENTION

[0004] A first aspect of the present invention is directed to a polypeptide comprising a circular permutant of a Cas12a, wherein the circular permutant binds to a nucleic acid. In some embodiments, the nucleic acid comprises a target nucleic acid. In some embodiments, the circular permutant has nuclease activity. In some embodiments, the polypeptide comprises a polypeptide of interest, optionally wherein the polypeptide of interest is fused to the N- or C-terminus of the circular permutant. In some embodiments, the polypeptide of interest is a deaminase and/or reverse transcriptase that is optionally fused to the N- or C-terminus of the circular permutant.

[0005] A further aspect of the present invention is directed to a polypeptide comprising a circular permutant of an engineered protein that comprises a Cas12a polypeptide, wherein the circular permutant binds to a nucleic acid. In some embodiments, the nucleic acid comprises a target nucleic acid. In some embodiments, the circular permutant has nuclease activity. In some embodiments, the polypeptide comprises a polypeptide of interest, optionally wherein the polypeptide of interest is fused to the N- or C-terminus of the circular permutant. In some embodiments, the polypeptide of interest is a deaminase and/or reverse transcriptase that is optionally fused to the N- or C-terminus of the circular permutant.

[0006] Another aspect of the present invention is directed to a polypeptide comprising an amino acid sequence having at least 70%, 75%, 80%, 85%, 90%, 95%, 96%, 97%, 98%, 99%, or 100% sequence identity to one or more of SEQ ID NOs: 234-245, 299-310, 390-399, 537-560, 702-704, 735-740, and 757-760. In some embodiments, the polypeptide binds to a nucleic acid and/or has nuclease activity. In some embodiments, the polypeptide comprises a polypeptide of interest, optionally wherein the polypeptide of interest is fused to the N- or C-terminus of the polypeptide having at least 70%, 75%, 80%, 85%, 90%, 95%, 96%, 97%, 98%, 99%, or 100% sequence identity to one or more of SEQ ID NOs: 234-245, 299-310, 390-399, 537-560, 702-704, 735-740, and 757-760. In some embodiments, the polypeptide of interest is a deaminase and/or reverse transcriptase that is optionally fused to the N- or C-terminus of the polypeptide having at least 70%, 75%, 80%, 85%, 90%, 95%, 96%, 97%, 98%, 99%, or 100% sequence identity to one or more of SEQ ID NOs: 234-245, 299-310, 390-399, 537-560, 702-704, 735-740, and 757-760. In some embodiments, a fusion protein of the present invention comprises a deaminase and/or reverse transcriptase that is optionally fused to the N- or C-terminus of a circular permutant of an engineered protein that comprises a Cas12a polypeptide. In some embodiments, a fusion protein of the present invention comprises a sequence having at least 70%, 75%, 80%, 85%, 90%, 95%, 96%, 97%, 98%, 99%, or 100% sequence identity to one or more of SEQ ID NOs: 351-362, 450-461, 486-497, and 609-639.

[0007] A further aspect of the present invention is directed to a polypeptide comprising a first amino acid sequence having at least 70%, 75%, 80%, 85%, 90%, 95%, 96%, 97%, 98%, 99%, or 100% sequence identity to a portion of one of SEQ ID NOs: 39-65, 69-132, 159-182, 281-284, 298, 400-401, 741, 761, and 850-861, wherein the portion of the one of SEQ ID NOs: 39-65, 69-132, 159-182, 281-284, 298, 400-401, 741, 761, and 850-861 includes the N-terminus of the one of SEQ ID NOs: 39-65, 69-132, 159-182, 281-284, 298, 400-401, 741, 761, and 850-861 and is less than the entire amino acid sequence of SEQ ID NOs: 39-65, 69-132, 159-182, 281-284, 298, 400-401, 741, 761, and 850-861. In some embodiments, the N-terminus of the one of SEQ ID NOs: 39-65, 69-132, 159-182, 281-284, 298, 400-401, 741, 761, and 850-861 is at or after amino acid residue 70 of the polypeptide. In some embodiments, the polypeptide binds to a nucleic acid and/or has nuclease activity. In some embodiments, the polypeptide comprising the first amino acid sequence further comprises a polypeptide of interest, optionally wherein the polypeptide of interest is fused to the N- or C-terminus of the polypeptide comprising the first amino acid sequence. In some embodiments, the polypeptide of interest is a deaminase and/or reverse transcriptase that is optionally fused to the N- or C-terminus of the polypeptide comprising the first amino acid sequence.

[0008] An additional aspect of the present invention is directed to a complex comprising a circular permutant of the present invention and a guide nucleic acid. In some embodiments, the complex comprises a deaminase and/or a reverse transcriptase. In some embodiments, the circular permutant is fused to a polypeptide of interest, optionally wherein the polypeptide of interest is fused to the N- or C-terminus of the circular permutant. In some embodiments, the polypeptide of interest is a deaminase and/or reverse transcriptase that is optionally fused to the N- or C-terminus of the circular permutant.

[0009] Another aspect of the present invention is directed to a method of modifying a target nucleic acid, the method comprising contacting the target nucleic acid with a circular permutant of the present invention and a guide nucleic acid, thereby modifying the target nucleic acid. In some embodiments, the method further comprises contacting the target nucleic acid with a deaminase and/or a reverse transcriptase. In some embodiments, the circular permutant is fused to a polypeptide of interest, optionally wherein the polypeptide of interest is fused to the N- or C-terminus of the circular permutant. In some embodiments, the polypeptide of interest is a deaminase and/or reverse transcriptase that is optionally fused to the N- or C-terminus of the circular permutant.

[0010] An additional aspect of the present invention is directed to a nucleic acid molecule encoding a circular permutant of the present invention. In some embodiments, the nucleic acid molecule has at least about 70%, 75%, 80%, 85%, 90%, 95%, 96%, 97%, 98%, 99%, or more sequence identity to one or more of SEQ ID NOs: 247-258, 286-297, 327-338, 364-375, 402-411, 462-473, 503-514, 561-584, 640-670, 706-708, 742-747, 763-766, 784, and 787. In some embodiments, the nucleic acid molecule encodes a polypeptide that has at least about 70%, 75%, 80%, 85%, 90%, 95%, 96%, 97%, 98%, 99%, or more sequence identity to one or more of SEQ ID NOs: 234-245, 299-310, 351-362, 390-399, 450-461, 486-497, 537-560, 609-639, 702-704, 735-740, and 757-760.

[0011] Another aspect of the present invention is directed to an expression cassette codon optimized for expression in an organism, the expression cassette comprising a polynucleotide encoding a promoter sequence, and a polynucleotide encoding a circular permutant of the present invention, which may be codon-optimized for expression in the organism. In some embodiments, the polynucleotide encoding the circular permutant has at least about 70%, 75%, 80%, 85%, 90%, 95%, 96%, 97%, 98%, 99%, or more sequence identity to one or more of SEQ ID NOs: 247-258, 286-297, 327-338, 364-375, 402-411, 462-473, 503-514, 561-584, 640-670, 706-708, 742-747, 763-766, 784, and 787. In some embodiments, the circular permutant has at least about 70%, 75%, 80%, 85%, 90%, 95%, 96%, 97%, 98%, 99%, or more sequence identity to one or more of SEQ ID NOs: 234-245, 299-310, 351-362, 390-399, 450-461, 486-497, 537-560, 609-639, 702-704, 735-740, and 757-760, which may be codon-optimized for expression in the organism.

[0012] A further aspect of the present invention is directed to a method of modifying a target nucleic acid in a cell, the method comprising introducing an expression cassette and/or vector of the present invention into the cell, thereby modifying the target nucleic acid in the cell.

[0013] An additional aspect of the present invention is directed to a method for producing a polypeptide of the present invention, the method comprising culturing a cell or group of cells that have been transformed with a nucleic acid encoding the polypeptide; and isolating the polypeptide, thereby producing the polypeptide.

[0014] It is noted that aspects of the invention described with respect to one embodiment, may be incorporated in a different embodiment although not specifically described relative thereto. That is, all embodiments and/or features of any embodiment can be combined in any way and/or combination. Applicant reserves the right to change any originally filed claim and/or file any new claim accordingly, including the right to be able to amend any originally filed claim to depend from and/or incorporate any feature of any other claim or claims although not originally claimed in that manner. These and other objects and/or aspects of the present invention are explained in detail in the specification set forth below. Further features, advantages and details of the present invention will be appreciated by those of ordinary skill in the art from a reading of the figures and the detailed description of the preferred embodiments that follow, such description being merely illustrative of the present invention.

### BRIEF DESCRIPTION OF THE DRAWINGS

[0015] FIG. 1A is a schematic illustration of the domains of a Cas12a in the N- to C-terminus direction.

[0016] FIG. 1B is a schematic illustration of the domains of exemplary circular permutants of some embodiments of the present invention in the N- to C-terminus direction.

[0017] FIG. 2 is a graph of INDEL percentages for circular permutants of the present invention at three different target nucleic acids and for the control (LbCas12a; pWISE 121) at the three different target nucleic acids. The error bars represent standard deviation across two biological replicates and two technical replicates.

[0018] FIG. 3 shows graphs of the percentage of supporting next generation sequencing (NGS) reads vs. deletion lengths for the LbCas12a control (pWISE121) and each of the circular permutants (pWISE8345-pWISE8356) for three different target sites (PWsp143, PWsp449, and PWsp453) in HEK293T cells. The number of supporting reads for each deletion length (1-68 nt) were counted for each sample at each target site; SNPs and insertions were excluded from the data.

[0019] FIG. 4 shows graphs of the kernel density estimation vs. position in target loci for the control (pWISE121) and each of the circular permutants (pWISE8345-pWISE8356) at three different target sites (PWsp143, PWsp449, and PWsp453) in HEK293T cells. Kernel density estimation is used to fit a smooth curve to the observed distribution of deletion start sites. The black bar represents the spacer sequence, and the vertical dotted line represents where the control or circular permutant is expected to cut the non-target strand. While the density is not a direct measure of editing efficiency, the two are related. The area under the curve for each figure sums to 1.

[0020] FIG. 5 is a graph of indel percentages for the control LbCas12a (pWISE121) and control a REDRAW editor (RE2; pWISE6099) at three different target nucleic acids (PWsp143, PWsp449, and PWsp453). The error bars represent standard deviation across three biological replicates and two technical replicates.

[0021] FIG. 6A is a graph showing the precise editing percentages for fusion proteins (pWISE9459-9471) according to some embodiments of the present invention at the RNF2 target nucleic acid and for the control LbCas12a (pWISE121) and control REDRAW editor (RE2; pWISE6099) at the RNF2 target nucleic acid. The error bars represent standard deviation across three biological replicates and two technical replicates.

[0022] FIG. 6B is a graph showing the indel percentages for fusion proteins (pWISE9459-9471) according to some embodiments of the present invention at the RNF2 target nucleic acid and for the control LbCas12a (pWISE121) and control REDRAW editor (RE2; pWISE6099) at the RNF2 target nucleic acid. The error bars represent standard deviation across three biological replicates and two technical replicates.

[0023] FIG. 7A is a graph showing the precise editing percentages for fusion proteins (pWISE9459-9471) according to some embodiments of the present invention at the FANCF target nucleic acid and for the control LbCas12a (pWISE121) and control REDRAW editor (RE2; pWISE6099) at the FANCF target nucleic acid. The error bars represent standard deviation across three biological replicates and two technical replicates.

[0024] FIG. 7B is a graph showing the indel percentages for fusion proteins (pWISE9459-9471) according to some embodiments of the present invention at the FANCF target nucleic acid and for the control LbCas12a (pWISE121) and control REDRAW editor (RE2; pWISE6099) at the FANCF target nucleic acid. The error bars represent standard deviation across three biological replicates and two technical replicates.

[0025] FIG. 8A is a graph showing the precise editing percentages for fusion proteins (pWISE9459-9471) according to some embodiments of the present invention at the DNMT1 target nucleic acid and for the control LbCas12a (pWISE121) and control REDRAW editor (RE2; pWISE6099) at the DNMT1 target nucleic acid. The error bars represent standard deviation across three biological replicates and two technical replicates.

[0026] FIG. 8B is a graph showing the indel percentages for fusion proteins (pWISE9459-9471) according to some embodiments of the present invention at the DNMT1 target nucleic acid and for the control LbCas12a (pWISE121) and control REDRAW editor (RE2;
[0027] pWISE6099) at the DNMT1 target nucleic acid. The error bars represent standard deviation across three biological replicates and two technical replicates.

[0028] FIG. 9A is a 3D cartoon image showing a predicted protein structure of a circular permutant (CP02) according to some embodiments of the present invention; the spheres represent the new N- and C-termini of the circular permutant protein.

[0029] FIG. 9B is a 3D cartoon image showing a predicted protein structure of a circular permutant (CP12) according to some embodiments of the present invention; the spheres represent the new N- and C-termini of the circular permutant protein.

[0030] FIGS. 10A-10C shows graphs of the precise editing percentages and indel percentages ratio for fusion proteins (pWISE9459-9471) according to some embodiments of the present invention at three different target nucleic acids (RNF2, FIG. 10A; FANCF-002, FIG. 10B; and DNMT1-001, FIG. 10C) and for the control LbCas12a (pWISE121) and control REDRAW editor (RE2; pWISE6099) at the same three different target nucleic acids. The error bars represent standard deviation across three biological replicates and two technical replicates.

[0031] FIG. 11 is a graph showing the INDEL percentages for LbCas 12a (pWISE121) at each of the target genes FANCF (PWsp132 and PWsp449), RUNX1 (PWsp135), and AAVS1 (PWsp389) in HEK293T cells. The error bars represent standard deviation across a single biological replicate and two technical replicates.

[0032] FIG. 12 is a graph showing the INDEL percentages for EnAsCas12a circular permutants (pWISE9723-9734) of the present invention at the RNF2 (PWsp1956 and PWsp1959) and FANCF (PWsp1960) target nucleic acids and for the control EnAsCas12a (pWISE4494) at the RNF2 (PWsp1956 and PWsp1959) and FANCF (PWsp1960) target nucleic acids in HEK293T cells. The error bars represent standard deviation across three biological replicates and two technical replicates.

[0033] FIG. 13 is a graph showing the indel percentages for circular permutants (pWISE9517, pWISE9519, pWISE9521, pWISE9523, pWISE9525, and pWISE9527) according to some embodiments of the present invention at AHK4 target nucleic acid and for the control LbCas12a (pWISE3380) at the AHK4 target nucleic acid in soy. These circular permutants and control LbCas12a were optimized for expression in soy. Each dot represents the sum of the INDEL percentage for an individual soy plant, the thicker line is the average INDEL percentage across all plants for each tested circular permutant.

[0034] FIGS. 14-19 are graphs showing the INDEL percentages for LbCas12a (pWISE121) and circular permutants according to some embodiments of the present invention at each of the target genes FANCF (PWsp449), DNMT1 (PWsp143), and RNF2 (PWsp453) in HEK293T cells. The data is the average of two technical replicates.

[0035] FIG. 20 is a graph showing the sum of INDEL percentages for circular permutants including an arginine mutation (pWISE9516, pWISE9518, pWISE9520, pWISE9522, pWISE9524, and pWISE9526) according to some embodiments of the present invention at AHK4 target nucleic acid and for the control LbCas12a D156R (pWISE9528) at the AHK4 target nucleic acid in soy. Each dot represents the sum of the INDEL percentage for an individual soy plant, the thicker line is the average INDEL percentage across all plants for each tested protein.

[0036] FIG. 21 is a graph showing the sum of INDEL percentages for circular permutants including an arginine mutation (pWISE9516, pWISE9518, pWISE9520, pWISE9522, pWISE9524, and pWISE9526) compared to circular permutants without the arginine mutation (pWISE9517 (CP02), pWISE9519 (CP04), pWISE9521 (CP06), pWISE9523 (CP08), pWISE9525 (CP10), and pWISE9527 (CP12)) according to some embodiments of the present invention at AHK4 target nucleic acid and for the control LbCas 12a (pWISE3380) and control LbCas12a D156R (pWISE9528) at the AHK4 target nucleic acid in soy. Each dot represents the sum of the INDEL percentage for an individual soy plant, the thicker line is the average INDEL percentage across all plants for each tested protein.

[0037] FIG. 22 is a graph showing the sum of INDEL percentages for circular permutants (pWISE10428, pWISE10429, pWISE10430, pWISE10431, and pWISE10432) according to some embodiments of the present invention at AHK4 target nucleic acid and for a control LbCas12a (pWISE3380) and a control engineered enzyme (pWISE6345) at the AHK4 target nucleic acid in soy. Each dot represents the sum of the INDEL percentage for an individual soy plant, the thicker line is the average INDEL percentage across all plants for each tested protein.

[0038] FIG. 23 is a graph showing the INDEL percentages for enzymatically dead circular permutants fused to a cytosine deaminase or circular permutants comprising a catalytic nickase mutation fused to a cytosine deaminase at the target gene FANCF (PWsp132) in HEK293T cells. The error bars represent standard deviation across two technical replicates.

[0039] FIG. 24 is a graph showing the INDEL percentages for circular permutants including two arginine mutations (pWISE10850, pWISE10851, and pWISE10852) compared to a control LbCas12a (pWISE121) and a control Cas12a with two arginine mutations (pWISE3559) according to some embodiments of the present invention at the indicated PAM sites in the target genes AAVS1, DNMT1, EXM1, FANCF, HEK2, HEK3, and RNF2 in HEK293T cells. The data is the average of three biological replicates.

[0040] FIG. 25 is a graph showing the fold increase of the INDEL percentages over a control LbCas12a (pWISE121) for circular permutants including two arginine mutations (pWISE10850, pWISE10851, and pWISE10852) and a control Cas12a with two arginine mutations (pWISE3559) according to some embodiments of the present invention at the indicated PAM sites in the target genes AAVS1, DNMT1, EXM1, FANCF, HEK2, HEK3, and RNF2 in HEK293T cells. The data is the average of three biological replicates.

### DETAILED DESCRIPTION

[0041] The present invention now will be described hereinafter with reference to the accompanying drawings and examples, in which embodiments of the invention are shown. This description is not intended to be a detailed catalog of all the different ways in which the invention may be implemented, or all the features that may be added to the instant invention. For example, features illustrated with respect to one embodiment may be incorporated into other embodiments, and features illustrated with respect to a particular embodiment may be deleted from that embodiment. Thus, the invention contemplates that in some embodiments of the invention, any feature or combination of features set forth herein can be excluded or omitted. In addition, numerous variations and additions to the various embodiments suggested herein will be apparent to those skilled in the art in light of the instant disclosure, which do not depart from the instant invention. Hence, the following descriptions are intended to illustrate some particular embodiments of the invention, and not to exhaustively specify all permutations, combinations and variations thereof.

[0042] Unless otherwise defined, all technical and scientific terms used herein have the same meaning as commonly understood by one of ordinary skill in the art to which this invention belongs. The terminology used in the description of the invention herein is for the purpose of describing particular embodiments only and is not intended to be limiting of the invention.

[0043] All publications, patent applications, patents and other references cited herein are incorporated by reference in their entireties for the teachings relevant to the sentence and/or paragraph in which the reference is presented.

[0044] Unless the context indicates otherwise, it is specifically intended that the various features of the invention described herein can be used in any combination. Moreover, the present invention also contemplates that in some embodiments of the invention, any feature or combination of features set forth herein can be excluded or omitted. To illustrate, if the specification states that a composition comprises components A, B and C, it is specifically intended that any of A, B or C, or a combination thereof, can be omitted and disclaimed singularly or in any combination.

[0045] As used in the description of the invention and the appended claims, the singular forms “a,” “an” and “the” are intended to include the plural forms as well, unless the context clearly indicates otherwise.

[0046] Also as used herein, “and/or” refers to and encompasses any and all possible combinations of one or more of the associated listed items, as well as the lack of combinations when interpreted in the alternative (“or”).

[0047] The term “about,” as used herein when referring to a measurable value such as an amount or concentration and the like, is meant to encompass variations of ±10%, ±5%, ±1%, ±0.5%, or even ±0.1% of the specified value as well as the specified value. For example, “about X” where X is the measurable value, is meant to include X as well as variations of #10%, ±5%, ±1%, ±0.5%, or even ±0.1% of X. A range provided herein for a measurable value may include any other range and/or individual value therein.

[0048] As used herein, phrases such as “between X and Y” and “between about X and Y” should be interpreted to include X and Y. As used herein, phrases such as “between about X and Y” mean “between about X and about Y” and phrases such as “from about X to Y” mean “from about X to about Y.”

[0049] Recitation of ranges of values herein are merely intended to serve as a shorthand method of referring individually to each separate value falling within the range, unless otherwise indicated herein, and each separate value is incorporated into the specification as if it were individually recited herein. For example, if the range 10 to 15 is disclosed, then 11, 12, 13, and 14 are also disclosed.

[0050] The term “comprise,” “comprises” and “comprising” as used herein, specify the presence of the stated features, integers, steps, operations, elements, and/or components, but do not preclude the presence or addition of one or more other features, integers, steps, operations, elements, components, and/or groups thereof.

[0051] As used herein, the transitional phrase “consisting essentially of” means that the scope of a claim is to be interpreted to encompass the specified materials or steps recited in the claim and those that do not materially affect the basic and novel characteristic(s) of the claimed invention. Thus, the term “consisting essentially of” when used in a claim of this invention is not intended to be interpreted to be equivalent to “comprising.”

[0052] As used herein, the terms “increase,” “increasing,” “enhance,” “enhancing,” “improve” and “improving” (and grammatical variations thereof) describe an elevation of at least about 5%, 10%, 15%, 20%, 25%, 30%, 35%, 40%, 45%, 50%, 55%, 60%, 65%, 70%, 75%, 80%, 85%, 90%, 95%, 100%, 150%, 200%, 300%, 400%, 500% or more such as compared to another measurable property or quantity (e.g., a control value).

[0053] As used herein, the terms “reduce,” “reduced,” “reducing,” “reduction,” “diminish,” and “decrease” (and grammatical variations thereof), describe, for example, a decrease of at least about 5%, 10%, 15%, 20%, 25%, 30%, 35%, 40%, 45%, 50%, 55%, 60%, 65%, 70%, 75%, 80%, 85%, 90%, 95%, 97%, 98%, 99%, or 100% such as compared to another measurable property or quantity (e.g., a control value). In some embodiments, the reduction can result in no or essentially no (i.e., an insignificant amount, e.g., less than about 10% or even 5%) detectable activity or amount.

[0054] A “heterologous nucleotide sequence” or a “recombinant nucleotide sequence” is a nucleotide sequence not naturally associated with a host cell into which it is introduced, including non-naturally occurring multiple copies of a naturally occurring nucleotide sequence.

[0055] A “native” or “wild-type” nucleic acid, nucleotide sequence, polypeptide or amino acid sequence refers to a naturally occurring or endogenous nucleic acid, nucleotide sequence, polypeptide or amino acid sequence. Thus, for example, a “native nucleic acid” is a nucleic acid that is naturally occurring in or endogenous to a reference organism. A “homologous” nucleic acid sequence is a nucleotide sequence naturally associated with a host cell into which it is introduced.

[0056] As used herein, the terms “nucleic acid,” “nucleic acid molecule,” “nucleotide sequence” and “polynucleotide” refer to RNA or DNA that is linear or branched, single or double stranded, or a hybrid thereof. The term also encompasses RNA/DNA hybrids. When dsRNA is produced synthetically, less common bases, such as inosine, 5-methylcytosine, 6-methyladenine, hypoxanthine and others can also be used for antisense, dsRNA, and ribozyme pairing. For example, polynucleotides that contain C-5 propyne analogues of uridine and cytidine have been shown to bind RNA with high affinity and to be potent antisense inhibitors of gene expression. Other modifications, such as modification to the phosphodiester backbone, or the 2′-hydroxy in the ribose sugar group of the RNA can also be made.

[0057] As used herein, the term “nucleotide sequence” refers to a heteropolymer of nucleotides or the sequence of these nucleotides from the 5′ to 3′ end of a nucleic acid molecule and includes DNA or RNA molecules, including cDNA, a DNA fragment or portion, genomic DNA, synthetic (e.g., chemically synthesized) DNA, plasmid DNA, mRNA, and anti-sense RNA, any of which can be single stranded or double stranded. The terms “nucleotide sequence” “nucleic acid,” “nucleic acid molecule,” “nucleic acid construct,” “recombinant nucleic acid,” “oligonucleotide” and “polynucleotide” are also used interchangeably herein to refer to a heteropolymer of nucleotides. Nucleic acid molecules and/or nucleotide sequences provided herein are presented herein in the 5′ to 3′ direction, from left to right and are represented using the standard code for representing the nucleotide characters as set forth in the U.S. sequence rules, 37 CFR §§ 1.821-1.825 and the World Intellectual Property Organization (WIPO) Standard ST.25. A “5′ region” as used herein can mean the region of a polynucleotide that is nearest the 5′ end of the polynucleotide. Thus, for example, an element in the 5′ region of a polynucleotide can be located anywhere from the first nucleotide located at the 5′ end of the polynucleotide to the nucleotide located halfway through the polynucleotide. A “3′ region” as used herein can mean the region of a polynucleotide that is nearest the 3′ end of the polynucleotide. Thus, for example, an element in the 3′ region of a polynucleotide can be located anywhere from the first nucleotide located at the 3′ end of the polynucleotide to the nucleotide located halfway through the polynucleotide.

[0058] As used herein, the term “gene” refers to a nucleic acid molecule capable of being used to produce mRNA, antisense RNA, miRNA, anti-microRNA antisense oligodeoxyribonucleotide (AMO) and the like. Genes may or may not be capable of being used to produce a functional protein or gene product. Genes can include both coding and non-coding regions (e.g., introns, regulatory elements, promoters, enhancers, termination sequences and/or 5′ and 3′ untranslated regions).

[0059] A polynucleotide, gene, or polypeptide may be “isolated” by which is meant a nucleic acid or polypeptide that is substantially or essentially free from components normally found in association with the nucleic acid or polypeptide, respectively, in its natural state. In some embodiments, such components include other cellular material, culture medium from recombinant production, and/or various chemicals used in chemically synthesizing the nucleic acid or polypeptide.

[0060] The term “mutation” refers to point mutations (e.g., missense, or nonsense, or insertions or deletions of single base pairs that result in frame shifts), insertions, deletions, and/or truncations. When the mutation is a substitution of a residue within an amino acid sequence with another residue, or a deletion or insertion of one or more residues within a sequence, the mutations are typically described by identifying the original residue followed by the position of the residue within the sequence and by the identity of the newly substituted residue.

[0061] As used herein, a “non-natural mutation” refers to a mutation that is generated through human intervention and differs from mutations found in the same gene or polypeptide that have occurred in nature (e.g., occurred naturally and not as a result of a modification made by a human).

[0062] The terms “complementary” or “complementarity,” as used herein, refer to the natural binding of polynucleotides under permissive salt and temperature conditions by base-pairing. For example, the sequence “A-G-T” (5′ to 3′) binds to the complementary sequence “T-C-A” (3′ to 5′). Complementarity between two single-stranded molecules may be “partial,” in which only some of the nucleotides bind, or it may be complete when total complementarity exists between the single stranded molecules. The degree of complementarity between nucleic acid strands has significant effects on the efficiency and strength of hybridization between nucleic acid strands.

[0063] “Complement” as used herein can mean 100% complementarity with the comparator nucleotide sequence or it can mean less than 100% complementarity (e.g., “substantially complementary,” such as about 70%, 71%, 72%, 73%, 74%, 75%, 76%, 77%, 78%, 79%, 80%, 81%, 82%, 83%, 84%, 85%, 86%, 87%, 88%, 89%, 90%, 91%, 92%, 93%, 94%, 95%, 96%, 97%, 98%, 99%, and the like, complementarity).

[0064] A “portion” or “fragment” of a nucleotide sequence or polypeptide (including a domain) will be understood to mean a nucleotide sequence or polypeptide of reduced length (e.g., reduced by 1, 2, 3, 4, 5, 6, 7, 8, 9, 10, 11, 12, 13, 14, 15, 16, 17, 18, 19, 20 or more residue(s) (e.g., nucleotide(s) or peptide(s)) relative to a reference nucleotide sequence or polypeptide, respectively, and comprising, consisting essentially of and/or consisting of a nucleotide sequence or polypeptide of contiguous residues, respectively, identical or almost identical (e.g., 70%, 71%, 72%, 73%, 74%, 75%, 76%, 77%, 78%, 79%, 80%, 81%, 82%, 83%, 84%, 85%, 86%, 87%, 88%, 89%, 90%, 91%, 92%, 93%, 94%, 95%, 96%, 97%, 98%, 99% identical) to the reference nucleotide sequence or polypeptide. In some embodiments, a portion of a reference nucleotide sequence or polypeptide is about 5%, 10%, 15%, 20%, 25%, 30%, 35%, 40%, 45%, 50%, 55%, 60%, 65%, 70%, 75%, 80%, 85%, 90%, 95%, 97%, 98%, 99%, or more of the full-length reference nucleotide sequence or polypeptide. Such a nucleic acid fragment or portion according to the invention may be, where appropriate, included in a larger polynucleotide of which it is a constituent. As an example, a repeat sequence of guide nucleic acid of this invention may comprise a portion of a wild-type CRISPR-Cas repeat sequence (e.g., a wild-type Type V CRISPR Cas repeat, e.g., a repeat from the CRISPR Cas system that includes, but is not limited to, Cas12a (Cpf1), Cas12b, Cas12c (C2c3), Cas12d (CasY), Cas12e (CasX), Cas12g, Cas12h, Cas12i, C2c1, C2c4, C2c5, C2c8, C2c9, C2c10, Cas14a, Cas14b, and/or Cas14c, and the like). Similarly, a portion of a polypeptide may be included in a larger polypeptide of which it is a constituent.

[0065] Different nucleic acids or proteins having homology are referred to herein as “homologues.” The term homologue includes homologous sequences from the same and other species and orthologous sequences from the same and other species. “Homology” refers to the level of similarity between two or more nucleic acid and/or amino acid sequences in terms of percent of positional identity (i.e., sequence similarity or identity). Homology also refers to the concept of similar functional properties among different nucleic acids or proteins. Thus, the compositions and methods of the invention further comprise homologues to the nucleotide sequences and polypeptides of this invention. “Orthologous” and “orthologs” as used herein, refers to homologous nucleotide sequences and/or amino acid sequences in different species that arose from a common ancestral gene during speciation. A homologue or ortholog of a nucleotide sequence of this invention has a substantial sequence identity (e.g., at least about 70%, 71%, 72%, 73%, 74%, 75%, 76%, 77%, 78%, 79%, 80%, 81%, 82%, 83%, 84%, 85%, 86%, 87%, 88%, 89%, 90%, 91%, 92%, 93%, 94%, 95%, 96%, 97%, 98%, 99%, 99.5% or 100%) to said nucleotide sequence of the invention.

[0066] As used herein “sequence identity” refers to the extent to which two optimally aligned polynucleotide or polypeptide sequences are invariant throughout a window of alignment of components, e.g., nucleotides or amino acids. “Identity” can be readily calculated by known methods including, but not limited to, those described in: Computational Molecular Biology (Lesk, A. M., ed.) Oxford University Press, New York (1988); Biocomputing: Informatics and Genome Projects (Smith, D. W., ed.) Academic Press, New York (1993); Computer Analysis of Sequence Data, Part I (Griffin, A. M., and Griffin, H. G., eds.) Humana Press, New Jersey (1994); Sequence Analysis in Molecular Biology (von Heinje, G., ed.) Academic Press (1987); and Sequence Analysis Primer (Gribskov, M. and Devereux, J., eds.) Stockton Press, New York (1991).

[0067] As used herein, the term “percent sequence identity” or “percent identity” refers to the percentage of identical nucleotides in a linear polynucleotide sequence of a reference (“query”) polynucleotide molecule (or its complementary strand) as compared to a test (“subject”) polynucleotide molecule (or its complementary strand) when the two sequences are optimally aligned. In some embodiments, “percent identity” can refer to the percentage of identical amino acids in an amino acid sequence as compared to a reference polypeptide.

[0068] As used herein, the phrase “substantially identical,” or “substantial identity” in the context of two nucleic acid molecules, nucleotide sequences or protein sequences, refers to two or more sequences or subsequences that have at least about 70%, 71%, 72%, 73%, 74%, 75%, 76%, 77%, 78%, 79%, 80%, 81%, 82%, 83%, 84%, 85%, 86%, 87%, 88%, 89%, 90%, 91%, 92%, 93%, 94%, 95%, 96%, 97%, 98%, 99%, 99.5% or 100% nucleotide or amino acid residue identity, when compared and aligned for maximum correspondence, as measured using one of the following sequence comparison algorithms or by visual inspection. In some embodiments of the invention, the substantial identity exists over a region of consecutive nucleotides of a nucleotide sequence of the invention that is about 10 nucleotides to about 20 nucleotides, about 10 nucleotides to about 25 nucleotides, about 10 nucleotides to about 30 nucleotides, about 15 nucleotides to about 25 nucleotides, about 30 nucleotides to about 40 nucleotides, about 50 nucleotides to about 60 nucleotides, about 70 nucleotides to about 80 nucleotides, about 90 nucleotides to about 100 nucleotides, or more nucleotides in length, and any range therein, up to the full length of the sequence. In some embodiments, the nucleotide sequences can be substantially identical over at least about 20 nucleotides (e.g., about 20, 21, 22, 23, 24, 25, 26, 27, 28, 29, 30, 31, 32, 33, 34, 35, 36, 37, 38, 39, 40 nucleotides). In some embodiments, a substantially identical nucleotide or protein sequence performs substantially the same function as the nucleotide (or encoded protein sequence) to which it is substantially identical.

[0069] For sequence comparison, typically one sequence acts as a reference sequence to which test sequences are compared. When using a sequence comparison algorithm, test and reference sequences are entered into a computer, subsequence coordinates are designated if necessary, and sequence algorithm program parameters are designated. The sequence comparison algorithm then calculates the percent sequence identity for the test sequence(s) relative to the reference sequence, based on the designated program parameters.

[0070] Optimal alignment of sequences for aligning a comparison window are well known to those skilled in the art and may be conducted by tools such as the local homology algorithm of Smith and Waterman, the homology alignment algorithm of Needleman and Wunsch, the search for similarity method of Pearson and Lipman, and optionally by computerized implementations of these algorithms such as GAP, BESTFIT, FASTA, and TFASTA available as part of the GCGR Wisconsin Package® (Accelrys Inc., San Diego, CA) as well as web-based alignment programs such as Clustal Omega, EMBOSS Needle, EMBOSS Stretcher, EMBOSS Water, LALIGN, GGSEARCH2SEQ, EMBOS Cons, Kalign, MAFFT, MUSCLE, and T-Coffee. In some embodiments, an “optimal alignment” of two sequences (e.g., two polypeptide sequences) is the highest scoring alignment, optionally from an alignment conducted by a tool such as the local homology algorithm of Smith and Waterman, the homology alignment algorithm of Needleman and Wunsch, the search for similarity method of Pearson and Lipman, GAP, BESTFIT, FASTA, and TFASTA available as part of the GCGR Wisconsin Package® (Accelrys Inc., San Diego, CA), Clustal Omega, EMBOSS Needle, EMBOSS Stretcher, EMBOSS Water, LALIGN, GGSEARCH2SEQ, EMBOS Cons, Kalign, MAFFT, MUSCLE, and/or T-Coffee. In some embodiments, an “optimal alignment” of two sequences (e.g., two polypeptide sequences) is the alignment that provides the highest percent sequence identity, optionally allowing for one or more gap(s) to be introduced into one or both sequences. An “identity fraction” for aligned segments of a test sequence and a reference sequence is the number of identical components which are shared by the two aligned sequences divided by the total number of components in the reference sequence segment, e.g., the entire reference sequence or a smaller defined part of the reference sequence. Percent sequence identity is represented as the identity fraction multiplied by 100. The comparison of one or more polynucleotide sequences may be to a full-length polynucleotide sequence or a portion thereof, or to a longer polynucleotide sequence. For purposes of this invention “percent identity” and/or optimal alignment may be determined using Basic Local Alignment Search Tool (BLAST) provided by the National Center for Biotechnology Information such as BLASTX, for translated nucleotide sequences, BLASTN for polynucleotide sequences, and BLASTP for polypeptide sequences.

[0071] Two nucleotide sequences may also be considered substantially complementary when the two sequences hybridize to each other under stringent conditions. In some representative embodiments, two nucleotide sequences considered to be substantially complementary hybridize to each other under highly stringent conditions.

[0072] “Stringent hybridization conditions” and “stringent hybridization wash conditions” in the context of nucleic acid hybridization experiments such as Southern and Northern hybridizations are sequence dependent, and are different under different environmental parameters. An extensive guide to the hybridization of nucleic acids is found in Tijssen Laboratory Techniques in Biochemistry and Molecular Biology-Hybridization with Nucleic Acid Probes part I chapter 2 “Overview of principles of hybridization and the strategy of nucleic acid probe assays” Elsevier, New York (1993). Generally, highly stringent hybridization and wash conditions are selected to be about 5° C. lower than the thermal melting point (Tₘ) for the specific sequence at a defined ionic strength and pH.

[0073] The Tₘ is the temperature (under defined ionic strength and pH) at which 50% of the target sequence hybridizes to a perfectly matched probe. Very stringent conditions are selected to be equal to the Tₘ for a particular probe. An example of stringent hybridization conditions for hybridization of complementary nucleotide sequences which have more than 100 complementary residues on a filter in a Southern or northern blot is 50% formamide with 1 mg of heparin at 42° C., with the hybridization being carried out overnight. An example of highly stringent wash conditions is 0.1 5M NaCl at 72° C. for about 15 minutes. An example of stringent wash conditions is a 0.2×SSC wash at 65° C. for 15 minutes (see, Sambrook, infra, for a description of SSC buffer). Often, a high stringency wash is preceded by a low stringency wash to remove background probe signal. An example of a medium stringency wash for a duplex of, e.g., more than 100 nucleotides, is 1×SSC at 45° C. for 15 minutes. An example of a low stringency wash for a duplex of, e.g., more than 100 nucleotides, is 4-6×SSC at 40° C. for 15 minutes. For short probes (e.g., about 10 to 50 nucleotides), stringent conditions typically involve salt concentrations of less than about 1.0 M Na ion, typically about 0.01 to 1.0 M Na ion concentration (or other salts) at pH 7.0 to 8.3, and the temperature is typically at least about 30° C. Stringent conditions can also be achieved with the addition of destabilizing agents such as formamide. In general, a signal to noise ratio of 2× (or higher) than that observed for an unrelated probe in the particular hybridization assay indicates detection of a specific hybridization. Nucleotide sequences that do not hybridize to each other under stringent conditions are still substantially identical if the proteins that they encode are substantially identical. This can occur, for example, when a copy of a nucleotide sequence is created using the maximum codon degeneracy permitted by the genetic code.

[0074] A polynucleotide and/or recombinant nucleic acid construct of this invention can be codon optimized for expression. In some embodiments, a polynucleotide, nucleic acid construct, expression cassette, and/or vector of the present invention (e.g., that comprises/encodes a polypeptide of the present invention (e.g., a circular permutant), a nucleic acid binding polypeptide (e.g., a DNA binding polypeptide such as a sequence-specific DNA binding domain from a polynucleotide-guided endonuclease, a zinc finger nuclease, a transcription activator-like effector nuclease (TALEN), an Argonaute protein, and/or a CRISPR-Cas effector protein), a guide nucleic acid, a deaminase, and/or a reverse transcriptase) may be codon optimized for expression in an organism (e.g., an animal such as a human, a plant, a fungus, an archaeon, or a bacterium). In some embodiments, the codon optimized nucleic acid constructs, polynucleotides, expression cassettes, and/or vectors of the invention have about 70% to about 99.9% (e.g., 70%, 71%, 72%, 73%, 74%, 75%, 76%, 77%, 78%, 79%, 80%, 81%, 82%, 83%, 84%, 85%, 86%, 87%, 88%, 89%, 90%, 91%, 92%, 93%, 94%, 95%, 96%, 97%, 98%, 99%, 99.5%. 99.9% or 100%) identity or more to the reference nucleic acid constructs, polynucleotides, expression cassettes, and/or vectors but which have not been codon optimized.

[0075] In any of the embodiments described herein, a polynucleotide or nucleic acid construct of the invention may be operatively associated with a variety of promoters and/or other regulatory elements for expression in an organism or cell thereof (e.g., a mammal and/or a mammalian cell, a plant and/or a cell of a plant, etc.). Thus, in some embodiments, a polynucleotide or nucleic acid construct of this invention may further comprise one or more promoters, introns, enhancers, and/or terminators operably linked to one or more nucleotide sequences. In some embodiments, a promoter may be operably associated with an intron (e.g., Ubil promoter and intron). In some embodiments, a promoter associated with an intron may be referred to as a “promoter region” (e.g., Ubil promoter and intron).

[0076] By “operably linked” or “operably associated” as used herein in reference to polynucleotides, it is meant that the indicated elements are functionally related to each other, and are also generally physically related. Thus, the term “operably linked” or “operably associated” as used herein, refers to nucleotide sequences on a single nucleic acid molecule that are functionally associated. Thus, a first nucleotide sequence that is operably linked to a second nucleotide sequence means a situation when the first nucleotide sequence is placed in a functional relationship with the second nucleotide sequence. For instance, a promoter is operably associated with a nucleotide sequence if the promoter effects the transcription or expression of said nucleotide sequence. Those skilled in the art will appreciate that the control sequences (e.g., promoter) need not be contiguous with the nucleotide sequence to which it is operably associated, as long as the control sequences function to direct the expression thereof. Thus, for example, intervening untranslated, yet transcribed, nucleic acid sequences can be present between a promoter and the nucleotide sequence, and the promoter can still be considered “operably linked” to the nucleotide sequence.

[0077] As used herein, the term “linked,” or “fused” in reference to polypeptides, refers to the covalent attachment of one polypeptide to another. A polypeptide may be linked or fused to another polypeptide (e.g., at the N-terminus or the C-terminus) directly (e.g., via a peptide bond) or through a linker (e.g., a peptide linker). Two polypeptides being directly fused (e.g., a direct linkage) refers to the covalent attachment of one amino acid residue of a first polypeptide of the two polypeptides to an amino acid residue of a second polypeptide of the two polypeptides without an intervening element between the two amino acid residues. For example, first and second polypeptides may be directly linked via a peptide bond between the first and second polypeptides without an intervening element (e.g., a linker) between the first and second polypeptides. Two polypeptides being directly fused (e.g., an indirect linkage) refers to an intervening element (e.g., a linker such as a peptide linker) that is present between the two polypeptides and is covalently attached to each, optionally the intervening element may attach one end of a first polypeptide of the two polypeptides to an end of the second polypeptide of the two polypeptides.

[0078] A “fusion protein” as used herein refers to two or more polypeptides that are covalently attached (e.g., directly or indirectly) so that they are transcribed and translated as a single unit and thereby produce a single polypeptide comprising the two or more polypeptides. In some embodiments, the two or more polypeptides may naturally be encoded by separate genes, but, in the form of a fusion protein, are encoded by a single gene.

[0079] The term “linker” is art-recognized and refers to a chemical group, or a molecule linking two molecules or moieties, e.g., linking two polypeptides or domains of a fusion protein, such as, for example, a CRISPR-Cas effector protein and a peptide tag and/or a polypeptide of interest. A linker may be comprised of a single linking molecule (e.g., a single amino acid) or may comprise more than one linking molecule. In some embodiments, the linker can be an organic molecule, group, polymer, or chemical moiety such as a bivalent organic moiety. In some embodiments, the linker may be an amino acid or it may be a peptide. In some embodiments, the linker is a peptide (e.g., a peptide linker).

[0080] In some embodiments, a peptide linker useful with this invention may be about 2 to about 100 or more amino acids in length, for example, about 2, 3, 4, 5, 6, 7, 8, 9, 10, 11, 12, 13, 14, 15, 16, 17, 18, 19, 20, 21, 22, 23, 24, 25, 26, 27, 28, 29, 30, 31, 32, 33, 34, 35, 36, 37, 38, 39, 40, 41, 42, 43, 44, 45, 46, 47, 48, 49, 50, 51, 52, 53, 54, 55, 56, 57, 58, 59, 60, 61, 62, 63, 64, 65, 66, 67, 68, 69, 70, 71, 72, 73, 74, 75, 76, 77, 78, 79, 80, 81, 82, 83, 84, 85, 86, 87, 88, 89, 90, 91, 92, 93, 94, 95, 96, 97, 98, 99, 100 or more amino acids in length (e.g., about 2 to about 40, about 2 to about 50, about 2 to about 60, about 4 to about 40, about 4 to about 50, about 4 to about 60, about 5 to about 40, about 5 to about 50, about 5 to about 60, about 9 to about 40, about 9 to about 50, about 9 to about 60, about 10 to about 40, about 10 to about 50, about 10 to about 60, or about 2, 3, 4, 5, 6, 7, 8, 9, 10, 11, 12, 13, 14, 15, 16, 17, 18, 19, 20, 21, 22, 23, 24, 25 amino acids to about 26, 27, 28, 29, 30, 31, 32, 33, 34, 35, 36, 37, 38, 39, 40, 41, 42, 43, 44, 45, 46, 47, 48, 49, 50, 51, 52, 53, 54, 55, 56, 57, 58, 59, 60, 61, 62, 63, 64, 65, 66, 67, 68, 69, 70, 71, 72, 73, 74, 75, 76, 77, 78, 79, 80, 81, 82, 83, 84, 85, 86, 87, 88, 89, 90, 91, 92, 93, 94, 95, 96, 97, 98, 99, 100 or more amino acids in length (e.g., about 105, 110, 115, 120, 130, 140 150 or more amino acids in length)). In some embodiments, a peptide linker may be a GS linker. In some embodiments, the peptide linker is a GS linker having 2, 3, or 4 amino acid residues, optionally 2 or 4 amino acid residues. In some embodiments, the peptide linker has one of the amino acid sequences of SEQ ID NOs: 1-36, 313-314, 869-870, 883, and/or 885. In some embodiments, the peptide linker is encoded by a sequence of SEQ ID NO: 311 or 312. In some embodiments, the peptide linker may comprise an amino acid sequence of CA, CF, (GGS)ₙ, GS, SG, GSSG (SEQ ID NO:31), GSSGSS (SEQ ID NO:32), GSSGSSGS (SEQ ID NO:33), (GSS)ₙ (SEQ ID NO:34), (GSS)ₙGS (SEQ ID NO:35), S(GGS)ₙ (SEQ ID NO:25), SGGS (SEQ ID NO:26), (GSS)ₙG (SEQ ID NO:36), (GGGGS)ₙ (SEQ ID NO:27), (SGS)ₙ (SEQ ID NO:869), (SGGS)ₙ (SEQ ID NO:870), or GSPKKKRKVSGGS (SEQ ID NO:885), wherein n is an integer of 1-20 (e.g., 1, 2, 3, 4, 5, 6, 7, 8, 9, 10, 11, 12, 13, 14, 15, 16, 17, 18, 19, or 20). In some embodiments, the peptide linker may comprise the amino acid sequence: SGGSGGSGGS (SEQ ID NO:28). In some embodiments, the peptide linker may comprise the amino acid sequence: SGSETPGTSESATPES (SEQ ID NO:29), also referred to as the XTEN linker. In some embodiments, the peptide linker may comprise the amino acid sequence: SGGSSGGSSGSETPGTSESATPESSGGSSGGS (SEQ ID NO:30), also referred to as the GS-XTEN-GS linker or a BE4 linker. In some embodiments, the linker has a sequence of (GSS)ₙG (SEQ ID NO:36), wherein n is 3. In some embodiments, the linker has a sequence of (GSS)ₙG (SEQ ID NO:36), wherein n is 5. In some embodiments, the peptide linker may comprise the amino acid sequence STSQSDGSSVPADIDQSSDSDQSSSQGQPG (SEQ ID NO: 5), also referred to as the 5R linker. In some embodiments, the peptide linker may comprise the amino acid sequence: SGGSSGSETPGTSESATPESSGGS (SEQ ID NO:883), also referred to as the SGGS-XTEN-SGGS linker.

[0081] As used herein, the term “linked,” or “fused” in reference to polynucleotides, refers to the covalent attachment of one polynucleotide to another polynucleotide. In some embodiments, two or more polynucleotide molecules may be linked by a linker that can be an organic molecule, group, polymer, or chemical moiety such as a bivalent organic moiety. A polynucleotide may be linked or fused to another polynucleotide (at the 5′ end or the 3′ end) via a direct covalent linkage or through one or more linking nucleotides. In some embodiments, a polynucleotide motif of a certain structure may be inserted within another polynucleotide sequence (e.g., extension of the hairpin structure in guide RNA). In some embodiments, the linking nucleotides may be naturally occurring nucleotides. In some embodiments, the linking nucleotides may be non-naturally occurring nucleotides. Two polynucleotides being indirectly fused (e.g., a direct linkage) refers to the covalent attachment of one nucleotide of a first polynucleotide of the two polynucleotides to a nucleotide of a second polynucleotide of the two polynucleotides without an intervening element between the two polynucleotides. For example, first and second polynucleotides may be directly linked via a phosphodiester bond between the first and second polynucleotides without an intervening element (e.g., a linker) between the first and second polynucleotides. Two polynucleotides being directly fused (e.g., an indirect linkage) refers to an intervening element (e.g., a linker such as a polynucleotide linker) that is present between the two polynucleotides and is covalently attached to each, optionally the intervening element attaches one end of a first polynucleotide of the two polynucleotides to an end of the second polynucleotide of the two polynucleotides.

[0082] A “promoter” is a nucleotide sequence that controls or regulates the transcription of a nucleotide sequence (e.g., a coding sequence) that is operably associated with the promoter. The coding sequence controlled or regulated by a promoter may encode a polypeptide and/or a functional RNA. Typically, a “promoter” refers to a nucleotide sequence that contains a binding site for RNA polymerase II and directs the initiation of transcription. In general, promoters are found 5′, or upstream, relative to the start of the coding region of the corresponding coding sequence. A promoter may comprise other elements that act as regulators of gene expression; e.g., a promoter region. These include a TATA box consensus sequence, and often a CAAT box consensus sequence (Breathnach and Chambon, (1981) Annu. Rev. Biochem. 50:349). In plants, the CAAT box may be substituted by the AGGA box (Messing et al., (1983) in Genetic Engineering of Plants, T. Kosuge, C. Meredith and A. Hollaender (eds.), Plenum Press, pp. 211-227). In some embodiments, a promoter region may comprise at least one intron (e.g., SEQ ID NO:37 or SEQ ID NO:38).

[0083] Promoters useful with this invention can include, for example, constitutive, inducible, temporally regulated, developmentally regulated, chemically regulated, tissue-preferred and/or tissue-specific promoters for use in the preparation of recombinant nucleic acid molecules, e.g., “synthetic nucleic acid constructs” or “protein-RNA complex.” These various types of promoters are known in the art.

[0084] The choice of promoter may vary depending on the temporal and spatial requirements for expression, and also may vary based on the host cell to be transformed. Promoters for many different organisms are well known in the art. Based on the extensive knowledge present in the art, the appropriate promoter can be selected for the particular host organism of interest. Thus, for example, much is known about promoters upstream of highly constitutively expressed genes in model organisms and such knowledge can be readily accessed and implemented in other systems as appropriate.

[0085] In some embodiments, a promoter functional in a plant may be used with the constructs of this invention. Non-limiting examples of a promoter useful for driving expression in a plant include the promoter of the RubisCo small subunit gene 1 (PrbcS1), the promoter of the actin gene (Pactin), the promoter of the nitrate reductase gene (Pnr) and the promoter of duplicated carbonic anhydrase gene 1 (Pdcal) (See, Walker et al. Plant Cell Rep. 23:727-735 (2005); Li et al. Gene 403:132-142 (2007); Li et al. Mol Biol. Rep. 37:1143-1154 (2010)). PrbcS1 and Pactin are constitutive promoters and Pnr and Pdcal are inducible promoters. Pnr is induced by nitrate and repressed by ammonium (Li et al. Gene 403:132-142 (2007)) and Pdcal is induced by salt (Li et al. Mol Biol. Rep. 37:1143-1154 (2010)). In some embodiments, a promoter useful with this invention is RNA polymerase II (Pol II) promoter. In some embodiments, a U6 promoter or a 7SL promoter from Zea mays may be useful with constructs of this invention. In some embodiments, the U6c promoter and/or 7SL promoter from Zea mays may be useful for driving expression of a guide nucleic acid. In some embodiments, a U6c promoter, U6i promoter and/or 7SL promoter from Glycine max may be useful with constructs of this invention. In some embodiments, the U6c promoter, U6i promoter and/or 7SL promoter from Glycine max may be useful for driving expression of a guide nucleic acid.

[0086] Examples of constitutive promoters useful for plants include, but are not limited to, cestrum virus promoter (cmp) (U.S. Pat. No. 7,166,770), the rice actin 1 promoter (Wang et al. (1992) Mol. Cell. Biol. 12:3399-3406; as well as U.S. Pat. No. 5,641,876), CaMV 35S promoter (Odell et al. (1985) Nature 313:810-812), CaMV 19S promoter (Lawton et al. (1987) Plant Mol. Biol. 9:315-324), nos promoter (Ebert et al. (1987) Proc. Natl. Acad. Sci USA 84:5745-5749), Adh promoter (Walker et al. (1987) Proc. Natl. Acad. Sci. USA 84:6624-6629), sucrose synthase promoter (Yang & Russell (1990) Proc. Natl. Acad. Sci. USA 87:4144-4148), and the ubiquitin promoter. The constitutive promoter derived from ubiquitin accumulates in many cell types. Ubiquitin promoters have been cloned from several plant species for use in transgenic plants, for example, sunflower (Binet et al., 1991. Plant Science 79:87-94), maize (Christensen et al., 1989. Plant Molec. Biol. 12:619-632), and arabidopsis (Norris et al. 1993. Plant Molec. Biol. 21:895-906). The maize ubiquitin promoter (UbiP) has been developed in transgenic monocot systems and its sequence and vectors constructed for monocot transformation are disclosed in the European patent publication EP0342926. The ubiquitin promoter is suitable for the expression of the nucleotide sequences of the invention in transgenic plants, especially monocotyledons. Further, the promoter expression cassettes described by McElroy et al. (Mol. Gen. Genet. 231:150-160 (1991)) can be easily modified for the expression of the nucleotide sequences of the invention and are particularly suitable for use in monocotyledonous hosts.

[0087] In some embodiments, tissue specific/tissue preferred promoters can be used for expression of a heterologous polynucleotide in a plant cell. Tissue specific or preferred expression patterns include, but are not limited to, green tissue specific or preferred, root specific or preferred, stem specific or preferred, flower specific or preferred or pollen specific or preferred. Promoters suitable for expression in green tissue include many that regulate genes involved in photosynthesis and many of these have been cloned from both monocotyledons and dicotyledons. In one embodiment, a promoter useful with the invention is the maize PEPC promoter from the phosphoenol carboxylase gene (Hudspeth & Grula, Plant Molec. Biol. 12:579-589 (1989)). Non-limiting examples of tissue-specific promoters include those associated with genes encoding the seed storage proteins (such as β-conglycinin, cruciferin, napin and phaseolin), zein or oil body proteins (such as oleosin), or proteins involved in fatty acid biosynthesis (including acyl carrier protein, stearoyl-ACP desaturase and fatty acid desaturases (fad 2-1)), and other nucleic acids expressed during embryo development (such as Bce4, see, e.g., Kridl et al. (1991) Seed Sci. Res. 1:209-219; as well as EP U.S. Pat. No. 255,378). Tissue-specific or tissue-preferential promoters useful for the expression of the nucleotide sequences of the invention in plants, particularly maize, include but are not limited to those that direct expression in root, pith, leaf or pollen. Such promoters are disclosed, for example, in WO 93/07278, incorporated by reference herein for its disclosure of promoters. Other non-limiting examples of tissue specific or tissue preferred promoters useful with the invention the cotton rubisco promoter disclosed in U.S. Pat. No. 6,040,504; the rice sucrose synthase promoter disclosed in U.S. Pat. No. 5,604,121; the root specific promoter described by de Framond (FEBS 290:103-106 (1991); European patent EP 0452269 to Ciba-Geigy); the stem specific promoter described in U.S. Pat. No. 5,625,136 (to Ciba-Geigy) and which drives expression of the maize trpA gene; the cestrum yellow leaf curling virus promoter disclosed in WO 01/73087; and pollen specific or preferred promoters including, but not limited to, ProOsLPS10 and ProOsLPS11 from rice (Nguyen et al. Plant Biotechnol. Reports 9 (5): 297-306 (2015)), ZmSTK2 USP from maize (Wang et al. Genome 60 (6): 485-495 (2017)), LAT52 and LAT59 from tomato (Twell et al. Development 109 (3): 705-713 (1990)), Zm13 (U.S. Pat. No. 10,421,972), PLA2-δ promoter from Arabidopsis (U.S. Pat. No. 7,141,424), and/or the ZmC5 promoter from maize (International PCT Publication No. WO 1999/042587).

[0088] Additional examples of plant tissue-specific/tissue preferred promoters include, but are not limited to, the root hair-specific cis-elements (RHEs) (KIM ET AL. The Plant Cell 18:2958-2970 (2006)), the root-specific promoters RCc3 (Jeong et al. Plant Physiol. 153:185-197 (2010)) and RB7 (U.S. Pat. No. 5,459,252), the lectin promoter (Lindstrom et al. (1990) Der. Genet. 11:160-167; and Vodkin (1983) Prog. Clin. Biol. Res. 138:87-98), corn alcohol dehydrogenase 1 promoter (Dennis et al. (1984) Nucleic Acids Res. 12:3983-4000), S-adenosyl-L-methionine synthetase (SAMS) (Vander Mijnsbrugge et al. (1996) Plant and Cell Physiology, 37 (8): 1108-1115), corn light harvesting complex promoter (Bansal et al. (1992) Proc. Natl. Acad. Sci. USA 89:3654-3658), corn heat shock protein promoter (O'Dell et al. (1985) EMBO J. 5:451-458; and Rochester et al. (1986) EMBO J. 5:451-458), pea small subunit RuBP carboxylase promoter (Cashmore, “Nuclear genes encoding the small subunit of ribulose-1,5-bisphosphate carboxylase” pp. 29-39 In: Genetic Engineering of Plants (Hollaender ed., Plenum Press 1983; and Poulsen et al. (1986) Mol. Gen. Genet. 205:193-200), Ti plasmid mannopine synthase promoter (Langridge et al. (1989) Proc. Natl. Acad. Sci. USA 86:3219-3223), Ti plasmid nopaline synthase promoter (Langridge et al. (1989), supra), petunia chalcone isomerase promoter (van Tunen et al. (1988) EMBO J. 7:1257-1263), bean glycine rich protein 1 promoter (Keller et al. (1989) Genes Dev. 3:1639-1646), truncated CaMV 35S promoter (O'Dell et al. (1985) Nature 313:810-812), potato patatin promoter (Wenzler et al. (1989) Plant Mol. Biol. 13:347-354), root cell promoter (Yamamoto et al. (1990) Nucleic Acids Res. 18:7449), maize zein promoter (Kriz et al. (1987) Mol. Gen. Genet. 207:90-98; Langridge et al. (1983) Cell 34:1015-1022; Reina et al. (1990) Nucleic Acids Res. 18:6425; Reina et al. (1990) Nucleic Acids Res. 18:7449; and Wandelt et al. (1989) Nucleic Acids Res. 17:2354), globulin-1 promoter (Belanger et al. (1991) Genetics 129:863-872), α-tubulin cab promoter (Sullivan et al. (1989) Mol. Gen. Genet. 215:431-440), PEPCase promoter (Hudspeth & Grula (1989) Plant Mol. Biol. 12:579-589), R gene complex-associated promoters (Chandler et al. (1989) Plant Cell 1:1175-1183), and chalcone synthase promoters (Franken et al. (1991) EMBO J. 10:2605-2612).

[0089] Useful for seed-specific expression is the pea vicilin promoter (Czako et al. (1992) Mol. Gen. Genet. 235:33-40; as well as the seed-specific promoters disclosed in U.S. Pat. No. 5,625,136. Useful promoters for expression in mature leaves are those that are switched at the onset of senescence, such as the SAG promoter from Arabidopsis (Gan et al. (1995) Science 270:1986-1988).

[0090] In addition, promoters functional in chloroplasts can be used. Non-limiting examples of such promoters include the bacteriophage T3 gene 9 5′ UTR and other promoters disclosed in U.S. Pat. No. 7,579,516. Other promoters useful with the invention include but are not limited to the S-E9 small subunit RuBP carboxylase promoter and the Kunitz trypsin inhibitor gene promoter (Kti3).

[0091] Additional regulatory elements useful with this invention include, but are not limited to, introns, enhancers, termination sequences and/or 5′ and 3′ untranslated regions.

[0092] An intron useful with this invention can be an intron identified in and isolated from a plant and then inserted into an expression cassette to be used in transformation of a plant. As would be understood by those of skill in the art, introns can comprise the sequences required for self-excision and are incorporated into nucleic acid constructs/expression cassettes in frame. An intron can be used either as a spacer to separate multiple protein-coding sequences in one nucleic acid construct, or an intron can be used inside one protein-coding sequence to, for example, stabilize the mRNA. If they are used within a protein-coding sequence, they are inserted “in-frame” with the excision sites included. Introns may also be associated with promoters to improve or modify expression. As an example, a promoter/intron combination useful with this invention includes but is not limited to that of the maize Ubil promoter and intron.

[0093] Non-limiting examples of introns useful with the present invention include introns from the ADHI gene (e.g., Adh1-S introns 1, 2 and 6), the ubiquitin gene (Ubil), the RuBisCO small subunit (rbcS) gene, the RuBisCO large subunit (rbcL) gene, the actin gene (e.g., actin-1 intron), the pyruvate dehydrogenase kinase gene (pdk), the nitrate reductase gene (nr), the duplicated carbonic anhydrase gene 1 (Tdcal), the psbA gene, the atpA gene, or any combination thereof.

[0094] An “editing system” as used herein refers to any site-specific (e.g., sequence-specific) nucleic acid editing system now known or later developed, which system can introduce a modification (e.g., a mutation) in a nucleic acid in target specific manner. For example, an editing system (e.g., a site- and/or sequence-specific editing system) can include, but is not limited to, a CRISPR-Cas editing system, a meganuclease editing system, a zinc finger nuclease (ZFN) editing system, a transcription activator-like effector nuclease (TALEN) editing system, a base editing system and/or a prime editing system, each of which may comprise one or more polypeptide(s) and/or one or more polynucleotide(s) that when present and/or expressed together (e.g., as a system) in a composition and/or cell can modify (e.g., mutate) a target nucleic acid in a sequence specific manner. In some embodiments, an editing system (e.g., a site- and/or sequence-specific editing system) can comprise one or more polynucleotide(s) and/or one or more polypeptide(s), including but not limited to a nucleic acid binding polypeptide (e.g., a DNA binding domain), a nuclease, another polypeptide, and/or a polynucleotide. In some embodiments, a CRISPR-Cas editing system is provided and/or is used that comprises a polypeptide of the present invention.

[0095] In some embodiments, an editing system comprises one or more sequence-specific nucleic acid binding polypeptide(s) (e.g., a DNA binding domain) that can be from, for example, a polynucleotide-guided endonuclease, a CRISPR-Cas endonuclease (e.g., CRISPR-Cas effector protein), a zinc finger nuclease, a transcription activator-like effector nuclease (TALEN) and/or an Argonaute protein. In some embodiments, an editing system comprises one or more cleavage polypeptide(s) (e.g., nucleases) including, but not limited to, an endonuclease (e.g., Fok1), a polynucleotide-guided endonuclease, a CRISPR-Cas endonuclease (e.g., CRISPR-Cas effector protein), a zinc finger nuclease, and/or a transcription activator-like effector nuclease (TALEN).

[0096] A “nucleic acid binding polypeptide” as used herein refers to a polypeptide or domain that binds and/or is capable of binding a nucleic acid (e.g., a target nucleic acid). A DNA binding domain is an exemplary nucleic acid binding polypeptide and may be a site- and/or sequence-specific nucleic acid binding domain. In some embodiments, a nucleic acid binding polypeptide may be a sequence-specific nucleic acid binding polypeptide such as, but not limited to, a sequence-specific binding domain from, for example, a polynucleotide-guided endonuclease, a CRISPR-Cas effector protein (e.g., a CRISPR-Cas endonuclease), a zinc finger nuclease, a transcription activator-like effector nuclease (TALEN) and/or an Argonaute protein. In some embodiments, a nucleic acid binding polypeptide comprises a cleavage domain (e.g., a nuclease domain) such as, but not limited to, an endonuclease (e.g., Fok1), a polynucleotide-guided endonuclease, a CRISPR-Cas endonuclease, a zinc finger nuclease, and/or a transcription activator-like effector nuclease (TALEN). In some embodiments, the nucleic acid binding polypeptide associates with and/or is capable of associating with (e.g., forms a complex with) with one or more nucleic acid molecule(s) (e.g., forms a complex with a guide nucleic acid as described herein), which may direct and/or guide the nucleic acid binding polypeptide to a specific target nucleotide sequence (e.g., a gene locus of a genome) that is complementary to the one or more nucleic acid molecule(s) (or a portion or region thereof), thereby causing the nucleic acid binding polypeptide to bind to the nucleotide sequence at the specific target site. In some embodiments, the nucleic acid binding polypeptide is a CRISPR-Cas effector protein as described herein.

[0097] In some embodiments, an editing system comprises or is a ribonucleoprotein such as an assembled ribonucleoprotein complex (e.g., a ribonucleoprotein that comprises a CRISPR-Cas effector protein, a guide nucleic acid, and optionally a deaminase and/or reverse transcriptase). In some embodiments, a ribonucleoprotein of an editing system may be assembled together (e.g., a pre-assembled ribonucleoprotein including a CRISPR-Cas effector protein, a guide nucleic acid, and optionally a deaminase and/or reverse transcriptase) such as when contacted to a target nucleic acid or when introduced into a cell (e.g., a mammalian cell or a plant cell) (e.g., at the time of contacting the components of the ribonucleoprotein to a target nucleic acid and/or at the time of introducing the components of the ribonucleoprotein into a cell). In some embodiments, a ribonucleoprotein of an editing system may assemble into a complex (e.g., a non-covalently bound complex) while a portion of the ribonucleoprotein is contacting a target nucleic acid and/or may assemble after and/or during introduction into a plant cell. In some embodiments, an editing system may be assembled (e.g., into a non-covalently bound complex) when introduced into a plant cell. In some embodiments, a ribonucleoprotein of an editing system may be contacted a target nucleic acid and/or may be introduced into a plant cell. In some embodiments, an editing system may be assembled (e.g., into a non-covalently bound complex) when introduced into a plant cell. In some embodiments, a ribonucleoprotein may comprise a polypeptide of the present invention (e.g., a polypeptide comprising a circular permutant), a guide nucleic acid, and optionally a deaminase and/or reverse transcriptase. In some embodiments, a circular permutant of the present invention is used in place of (e.g., substituted for) a CRISPR-Cas effector protein (e.g., in a composition, complex, kit, method, and/or system such as an editing system described herein) and/or functions as a CRISPR-Cas effector protein, optionally in a composition, complex, ribonucleoprotein, kit, method, system, and/or editing system of the present invention.

[0098] In some embodiments, an editing system of the present invention comprises a reverse transcriptase, an extended guide nucleic acid, and a CRISPR-Cas effector protein and/or a polypeptide of the present invention. In some embodiments, the CRISPR-Cas effector protein and/or a polypeptide of the present invention, the reverse transcriptase, and the extended guide nucleic acid may form a complex or may be comprised in a complex that is capable of interacting with a target nucleic acid.

[0099] In some embodiments, a guide nucleic acid further comprises a reverse transcriptase template and may be referred to as an extended guide nucleic acid. An “extended guide nucleic acid” as used herein is a guide nucleic acid as described herein that further comprises a reverse transcriptase template (RTT) and/or a primer binding site (PBS). In some embodiments, an extended guide nucleic acid is an engineered prime editing guide RNA (pegRNA). An extended guide nucleic acid may be a targeted allele guide RNA (tagRNA) or a stabilized targeted allele guide RNA (stagRNA). A “tagRNA” as used herein refers to an extended guide nucleic acid that comprises a PBS and a RTT and has target strand complementarity. A “stagRNA” as used herein refers to a tagRNA that comprises a stabilization motif. A stabilization motif may be present at the 3′ and/or 5′ end of a tagRNA. In some embodiments, a stabilization motif is present at the 3′ end of a tagRNA. Exemplary stabilization motifs include, but are not limited to, recruiting motifs, RNA hairpins, pseudoknot sequences, and/or PP7 motifs (e.g., a PP7 RNA hairpin sequence). In some embodiments, a stagRNA is a tagRNA that comprises a PP7 RNA hairpin sequence. In some embodiments, a CRISPR-Cas effector protein (e.g., a Type II or Type V CRISPR-Cas effector protein), a reverse transcriptase, and an extended guide nucleic acid can form a complex or are comprised in a complex.

[0100] In some embodiments, an extended guide nucleic acid comprises an extended portion that includes a primer binding site and a reverse transcriptase template, wherein the reverse transcriptase template comprises the modification (e.g., edit) to be incorporated into a target nucleic acid. In some embodiments, an extended guide nucleic acid comprises, at its 3′ end, a primer binding site and a modification (e.g., an edit) to be incorporated into the target nucleic acid (e.g., a reverse transcriptase template). In some embodiments, an extended guide nucleic acid comprises: (1) a sequence that interacts (e.g., recruits and/or binds) with a CRISPR-Cas effector protein (e.g., a CRISPR-Cas nuclease), (2) a spacer having substantial complementary to a first site on a target nucleic acid (e.g., a CRISPR RNA (crRNA) (a first crRNA) and/or tracrRNA+crRNA (sgRNA)), and (3) a nucleic acid encoded repair template (e.g., an RNA encoded repair template) comprising a primer binding site and an RNA template (e.g., that encodes the modification to be incorporated into the target nucleic acid). In some embodiments, an extended guide nucleic acid (e.g., an extended guide RNA) may comprise, 5′-3′, a spacer sequence, a repeat sequence, and an extended portion, the extended portion comprising, 5′ to 3′, a reverse transcriptase template and a primer binding site. In some embodiments, an extended guide nucleic acid may comprise, 5′-3′, a spacer sequence, a repeat sequence and an extended portion, the extended portion comprising, 5′ to 3′, a primer binding site and a reverse transcriptase template. In some embodiments, an extended guide nucleic acid may comprise, 5′-3′, an extended portion, a spacer sequence, and a repeat sequence, wherein the extended portion comprises, 5′ to 3′, a reverse transcriptase template and a primer binding site. In some embodiments, an extended guide nucleic acid may comprise, 5′-3′, an extended portion, a spacer sequence, and a repeat sequence, wherein the extended portion comprises, 5′ to 3′, a primer binding site and a reverse transcriptase template.

[0101] According to some embodiments, an extended guide nucleic acid (e.g., a pegRNA) may have a structure and/or be designed as described in Anzalone et al., Nature, 2019 December; 576 (7785): 149-157. In some embodiments, an extended guide nucleic acid comprises a primer binding site (PBS) optionally having a sequence of 1, 2, 3, 4, or 5 to 6, 7, 8, 9, 10, 11, 12, 13, 14, or 15 nucleotides and a reverse transcriptase template (RT template) sequence optionally having a sequence of 65 nucleotides or more. In some embodiments, a PBS of an extended guide nucleic acid has a sequence of less than 15 nucleotides and has a sequence of 1, 2, 3, 4, 5, 6, 7, 8, 9, 10, 11, 12, 13, or 14 nucleotides (e.g., a sequence of 5 or 6 nucleotides in length). The RT template sequence may be after the PBS sequence in the 5′ to 3′ direction. In some embodiments, the RT template sequence of the extended guide nucleic acid has a length of greater than 65 nucleotides and may comprise about 50 or more nucleotides of heterology relative to the target site (e.g., target nucleic acid), followed by about 15 or more nucleotides of homology relative to the target site. In some embodiments, the RT template sequence of the extended guide nucleic acid is after the PBS sequence and the RT template sequence has a length of greater than 65 nucleotides with the sequence including more than 50 nucleotides of heterology relative to the target site, followed by more than 15 nucleotides of homology relative to the target site. Accordingly, in some embodiments, when the extended guide nucleic acid is reverse transcribed, the resulting newly transcribed sequence may hybridize and/or is configured to hybridize with the unnicked strand of the target site, which may thereby create a heteroduplex DNA with a large insertion into the newly synthesized strand. Upon repair of this mismatched DNA, the resultant repaired DNA may contain a large insertion (e.g., greater than 50 nucleotides) of DNA sequence. In some embodiments, the method may provide a large deletion (e.g., greater than 50 nucleotides) of DNA sequence. In some embodiments, the PBS and the 15 or more nucleotides of homology to the target site may comprise homology arms, which may serve to insert the heterology into the target site optionally using homology directed repair. The inserted DNA may correspond to any functional sequence of DNA such as, but not limited to: a functional transgene; a fragment of DNA that is inserted into a gene in a way that, when the gene is transcribed, would produce a hairpin RNA that is sufficient to silence homologous genes through RNAi; and/or one or more functional site-specific recombination sites, e.g. lox, frt, which could then be used in subsequent Cre or Flp mediated site-specific recombination processes. In some embodiments, an extended guide nucleic acid may be too large to produce using a PolIII promoter in vivo. In some embodiments, an extended guide nucleic acid may be operatively associated with and/or produced using a PolII promoter. In some embodiments, a DNA binding polypeptide (e.g., a DNA binding domain) and/or DNA endonuclease may have a structure and/or be designed as described in Anzalone et al., Nature, 2019 December; 576 (7785): 149-157. In some embodiments, a DNA binding domain and/or DNA endonuclease is a CRISPR Cas polypeptide such as a Cas9 nickase, a nicking variant of another CRISPR Cas polypeptide, or Cas12a.

[0102] In some embodiments, two extended guide nucleic acids (e.g., pegRNAs) may be used (e.g., an editing system may comprise two extended guide nucleic acids). One or both of the two extended guide nucleic acids may have a structure and/or be designed as described in Anzalone et al., Nature, 2019 December; 576 (7785): 149-157. The two extended guide nucleic acids may comprise a primer binding site (PBS) optionally having a sequence of 1, 2, 3, 4, or 5 to 6, 7, 8, 9, 10, 11, 12, 13, 14, or 15 nucleotides and a reverse transcriptase template (RT template) sequence optionally having a sequence of 50 nucleotides or more. The RT template sequences of the two extended guide nucleic acids may be complementary to each other and as such the polynucleotides that are respectively reverse transcribed from each the RT templates will be complementary to each other and will be able to hybridize with each other. This may allow for the intermediates that are produced by this system and/or method to join together two sections of DNA that are otherwise separated by more than 50 nucleotides, e.g., within a chromosome, or that are positioned on two separate pieces of DNA, e.g., on two different chromosomes. After repair of the intermediates, the resultant products may produce, depending on the design of the RT template, large deletions, large inversions, or inter-chromosomal recombinations. Since all of these products are produced by homology directed repair, the products may be predictably precise and/or reproducible. In some embodiments, a DNA binding polypeptide (e.g., a DNA binding domain) and/or DNA endonuclease may have a structure and/or be designed as described in Anzalone et al., Nature, 2019 December; 576 (7785): 149-157. In some embodiment, a DNA binding polypeptide and/or DNA endonuclease is a CRISPR Cas polypeptide such as a Cas9 nickase, a similar nicking variant of another CRISPR Cas polypeptide, or Cas12a. In some embodiments, a DNA binding polypeptide and/or DNA endonuclease is a Cas9 nuclease, a similar nuclease from another CRISPR Cas polypeptide, or Cas12a. Using a nuclease (rather than a nickase) may facilitate the intra- or interchromosomal recombination processes through single-strand annealing of the more than 50 nucleotide 3′ overhangs that would be produced at each of the two target sites corresponding to the two pegRNA target nucleic acids. In some embodiments, an editing system comprises one extended guide nucleic acid and a guide nucleic acid that is devoid of a reverse transcriptase template and/or primer binding site.

[0103] An extended guide nucleic acid may comprise a CRISPR nucleic acid (e.g., CRISPR RNA, CRISPR DNA, crRNA, crDNA) and/or a CRISPR nucleic acid and a tracr nucleic acid; and (b) an extended portion comprising a primer binding site and a reverse transcriptase template (RT template), wherein the RT template encodes a modification to be incorporated into the target nucleic acid. The CRISPR nucleic acid may be a Type II or Type V CRISPR nucleic acid and/or the tracr nucleic acid may be any tracr corresponding to the appropriate Type II or Type V CRISPR nucleic acid. In some embodiments, an extended guide nucleic acid comprises: (i) a Type V CRISPR nucleic acid or a Type II CRISPR nucleic acid (e.g., a Type II or Type V CRISPR RNA, Type II or Type V CRISPR DNA, Type II or Type V crRNA, or Type II or Type V crDNA) and/or a CRISPR nucleic acid and a tracr nucleic acid (e.g., a Type II or Type V tracrRNA, Type II or Type V tracrDNA); and (ii) an extended portion comprising a primer binding site and a reverse transcriptase template (RT template), wherein the Type V CRISPR nucleic acid or Type II CRISPR nucleic acid comprises a spacer that binds to a first strand (e.g., the target strand) of a target nucleic acid (e.g., the spacer is complementary to a portion of consecutive nucleotides in the first strand of the target nucleic acid) and the primer binding site binds to the first strand (e.g., target strand). In some embodiments, the extended portion can be fused to either the 5′ end or 3′ end of the CRISPR nucleic acid (e.g., from 5′ to 3′: repeat-spacer-extended portion or extended portion-repeat-spacer) and/or to the 5′ or 3′ end of the tracr nucleic acid. In some embodiments, the extended portion of an extended guide nucleic acid comprises, 5′ to 3′, an RT template (RTT) and a primer binding site (PBS) (e.g., 5′-crRNA-spacer-RTT (edit encoded)-PBS-3′) or comprises 5′ to 3′ a PBS and RTT, depending on the location of the extended portion relative to the CRISPR nucleic acid of the extended guide nucleic acid (e.g., 5′-crRNA-spacer-PBS-RTT (edit encoded)-3′). For example, in some embodiments, an extended portion of the extended guide nucleic acid may comprise, 5′ to 3′, an RT template and a primer binding site (when the extended guide is linked to the 3′ end of the CRISPR nucleic acid). In some embodiments, an extended portion of the extended guide may comprise, 5′ to 3′, a primer binding site and an RT template (when the extended guide is linked to the 5′ end of the CRISPR nucleic acid).

[0104] In some embodiments, a target nucleic acid is double stranded and comprises a first strand and a second strand and a primer binding site of an extended guide nucleic acid binds to the second strand (e.g., the non-target, top strand) of the target nucleic acid. In some embodiments, a target nucleic acid is double stranded and comprises a first strand and a second strand and a primer binding site of an extended guide nucleic acid binds to the first strand (e.g., binds to the target strand, optionally the same strand to which a CRISPR-Cas effector protein is recruited, bottom strand) of the target nucleic acid. In some embodiments, a target nucleic acid is double stranded and comprises a first strand and a second strand and the primer binding site of an extended guide nucleic acid binds to the second strand (e.g., the non-target strand, optionally the opposite strand from that to which the CRISPR-Cas effector protein is recruited) of the target nucleic acid. In some embodiments, a reverse transcriptase (RT) may add to the target strand of a target nucleic acid (e.g., the strand to which the spacer of the CRISPR nucleic acid of the extended guide nucleic acid is complementary and to which the CRISPR-Cas effector protein is recruited). In some embodiments, the reverse transcriptase (RT) adds to the non-target strand of a target nucleic acid (e.g., the strand that is complementary to the strand to which the spacer of the CRISPR nucleic acid is complementary and to which the CRISPR-Cas effector protein is recruited). Example methods and editing systems are described in International Patent Publication No. WO 2021/092130, International Patent Publication No. WO 2022/098993, and U.S. Patent Application Publication Nos. 2021/0147862, 2021/0130835, 2021/0147862, and 2022/0145334, each of which are incorporated herein by reference in their entirety.

[0105] The RT template of an extended guide nucleic acid may encode one or more modification(s) (e.g., edit(s)) to be incorporated into a target nucleic acid. The one or more modification(s) may be located in any position within an RT template (e.g., where the position location may be relative to the position of a protospacer adjacent motif (PAM) of the target nucleic acid). In some embodiments, an RT template has a modification at one or more positions from −1 to 23 (e.g., −1, 1, 2, 3, 4, 5, 6, 7, 8, 9, 10, 11, 12, 13, 14, 15, 16, 17, 18, 19, 20, 21, 22, or 23) relative to the position of a protospacer adjacent motif (PAM) (e.g., TTTG, TCCG, CCCC, and TTTV) in a target nucleic acid. In some embodiments, an RT template may comprise a modification located at nucleotide position-1, 1, 2, 3, 4, 5, 6, 7, 8, 9, 10, 11, 12, 13, 14, 15, 16, 17, 18, 19, 20, 21, 22 or 23. In some embodiments, an RT template may comprise a modification located at nucleotide position 4 to nucleotide position 17 (e.g., position 4, 5, 6, 7, 8, 9, 10, 11, 12, 13, 14, 15, 16, or 17) of the RT template relative to the position of a PAM of a target nucleic acid. In some embodiments, an RT template may comprise a modification located at nucleotide position 10 to nucleotide position 17 (e.g., position 10, 11, 12, 13, 14, 15, 16, or 17) of the RT template relative to the position of a PAM of a target nucleic acid. In some embodiments, an RT template may comprise a modification located at nucleotide position 12 to nucleotide position 15 (e.g., position 12, 13, 14, or 15) of the RT template relative to the position of a PAM of a target nucleic acid.

[0106] In some embodiments, an extended portion of an extended guide nucleic acid may comprise, 5′ to 3′, an RT template and a primer binding site (e.g., when the extended portion is linked to the 3′ end of a CRISPR nucleic acid). In some embodiments, an extended portion of an extended guide nucleic acid may comprise, 5′ to 3′, a primer binding site and an RT template (RTT) (e.g., when the extended portion is linked to the 5′ end of the CRISPR nucleic acid). In some embodiments, an RT template may have a length of about 1 nucleotide to about 100 nucleotides (e.g., about 1, 2, 3, 4, 5, 6, 7, 8, 9, 10, 11, 12, 13, 14, 15, 16, 17, 18, 19, 20, 21, 22, 23, 24, 25, 26, 27, 28, 29, 30, 31, 32, 33, 34, 35, 36, 37, 38, 39, 40, 41, 42, 43, 44, 45, 46, 47, 48, 49, 50, 51, 52, 53, 54, 55, 56, 57, 58, 59, 60, 61, 62, 63, 64, 65, 66, 67, 68, 69, 70, 71, 72, 73, 74, 75, 76, 77, 78, 79, 80, 81, 82, 83, 84, 85, 86, 87, 88, 89, 90, 91, 92, 93, 94, 95, 96, 97, 98, 99, 100 or more nucleotides, and any range or value therein), e.g., about 1 nucleotide to about 10 nucleotides, about 1 nucleotide to about 15 nucleotides, about 1 nucleotide to about 20 nucleotides, about 1 nucleotide to about 25 nucleotides, about 1 nucleotide to about 30 nucleotides, about 1 nucleotide to about 35, 36, 37, 38, 39 or 40 nucleotides, about 1 nucleotide to about 50 nucleotides, about 5 nucleotides to about 15 nucleotides, about 5 nucleotides to about 20 nucleotides, about 5 nucleotides to about 25 nucleotides, about 5 nucleotides to about 30 nucleotides, about 5 nucleotides to about 35, 36, 37, 38, 39 or 40 nucleotides, about 5 nucleotides to about 50 nucleotides, about 8 nucleotides to about 15 nucleotides, about 8 nucleotide to about 20 nucleotides, about 8 nucleotide to about 25 nucleotides, about 8 nucleotide to about 30 nucleotides, about 8 nucleotide to about 35, 36, 37, 38, 39 or 40 nucleotides, about 8 nucleotide to about 50 nucleotides in length, about 8 nucleotides to about 100 nucleotides, about 10 nucleotide to about 15 nucleotides, about 10 nucleotide to about 20 nucleotides, about 10 nucleotide to about 25 nucleotides, about 10 nucleotide to about 30 nucleotides, about 10 nucleotide to about 36 nucleotides, about 10 nucleotide to about 40 nucleotides, about 10 nucleotide to about 50 nucleotides, about 10 nucleotides to about 100 nucleotides in length and any range or value therein. In some embodiments, the length of an RT template may be at least 8 nucleotides, optionally about 8 nucleotides to about 100 nucleotides. In some embodiments, the length of an RT template is 36, 37, 38, 39 or 40 nucleotides or less (e.g., about 1, 2, 3, 4, 5, 6, 7, 8, 9, 10, 11, 12, 13, 14, 15, 16, 17, 18, 19, 20, 21, 22, 23, 24, 25, 26, 27, 28, 29, 30, 31, 32, 33, 34, 35, 36, 37, 38, 39, or 40 nucleotides in length, or any value or range therein (e.g., about 1, 2, 3, 4, 5, 6, 7, 8, 9, 10, 11, 12, 13, 14, or 15 nucleotides in length to about 16, 17, 18, 19, 20, 21, 22, 23, 24, 25, 26, 27, 28, 29, 30, 31, 32, 33, 34, 35, 36, 37, 38, 39, or 40 nucleotides in length). In some embodiments, the length of an RT template may be at least 30 nucleotides, optionally about 30, 31, 32, 33, 34, 35, 36, 37, 38, 39, or 40 nucleotides in length to about to about 41, 42, 43, 44, 45, 46, 47, 48, 49, 50, 51, 52, 53, 54, 55, 56, 57, 58, 59, 60, 61, 62, 63, 64, 65, 66, 67, 68, 69, 70, 71, 72, 73, 74, 75, 76, 77, 78, 79, or 80 nucleotides in length, or any range or value therein. In some embodiments, the length of an RT template may be about 36, 40, 44, 47, 50, 52, 55, 63, 72 or 74 nucleotides. Within the length of the RTT one or more modification(s) may be present. The one or more modification(s) may be located anywhere within the RTT, wherein the position of the modification may be described relative to the position of a protospacer adjacent motif (PAM) of a target nucleic acid. In some embodiments, an RT template may comprise a modification located at nucleotide position-1, 1, 2, 3, 4, 5, 6, 7, 8, 9, 10, 11, 12, 13, 14, 15, 16, 17, 18, 19, 20, 21, 22 or 23. In some embodiments, an RT template may comprise a modification located at nucleotide position 4 to nucleotide position 17 (e.g., position 4, 5, 6, 7, 8, 9, 10, 11, 12, 13, 14, 15, 16, or 17) of the RT template relative to the position of a protospacer adjacent motif (PAM) of a target nucleic acid. In some embodiments, an RT template may comprise a modification located at nucleotide position 10 to nucleotide position 17 (e.g., position 10, 11, 12, 13, 14, 15, 16, or 17) of the RT template relative to the position of a protospacer adjacent motif (PAM) of a target nucleic acid. In some embodiments, an RT template may comprise a modification located at nucleotide position 12 to nucleotide position 15 (e.g., position 12, 13, 14, or 15) of the RT template relative to the position of a protospacer adjacent motif (PAM) of a target nucleic acid.

[0107] As used herein, a “primer binding site” (PBS) of an extended portion of an extended guide nucleic acid (e.g., a tagRNA) refers to a sequence of consecutive nucleotides that can bind to a region or “primer” on a target nucleic acid, e.g., is complementary to the target nucleic acid primer. As an example, a CRISPR Cas effector protein (e.g., a Type II or Type V, e.g., Cas 9 or Cas12a) may nick/cut the DNA and the 3′ end of the cut DNA acts as a primer for the PBS portion of the extended guide nucleic acid. The PBS may be complementary to the 3′ end of a strand of the target nucleic acid and may bind and/or may be configured to bind to either the target strand or non-target strand. A primer binding site can be fully complementary to the primer or it may be substantially complementary (e.g., at least 70% complementary (e.g., 70% or about 71%, 72%, 73%, 74%, 75%, 76%, 77%, 78%, 79%, 80%, 81%, 82%, 83%, 84%, 85%, 86%, 87%, 88%, 89%, 90%, 91%, 92%, 93%, 94%, 95%, 96%, 97%, 98%, 99%, 99.5%, 99.6%, 99.7%, 99.8%, 99.9% or more)) to the primer of a target nucleic acid. In some embodiments, the length of a primer binding site of an extended portion may be about 1 nucleotide to about 100 nucleotides in length (e.g., about 1, 2, 3, 4, 5, 6, 7, 8, 9, 10, 11, 12, 13, 14, 15, 16, 17, 18, 19, 20, 21, 22, 23, 24, 25, 26, 27, 28, 29, 30, 31, 32, 33, 34, 35, 36, 37, 38, 39, 40, 41, 42, 43, 44, 45, 46, 47, 48, 49, 50, 51, 52, 53, 54, 55, 56, 57, 58, 59, 60, 61, 62, 63, 64, 65, 66, 67, 68, 69, 70, 71, 72, 73, 74, 75, 76, 77, 78, 79, 80, 81, 82, 83, 84, 85, 86, 87, 88, 89, 90, 91, 92, 93, 94, 95, 96, 97, 98, 99, 100 or more nucleotides, or any value or range therein), or about 4 nucleotide to about 85 nucleotides, about 10 nucleotide to about 80 nucleotides, about 20 nucleotide to about 80 nucleotides, about 25 nucleotides to about 80 nucleotides about 30 nucleotide to about 80 nucleotides, about 40 nucleotide to about 80 nucleotides, about 45 nucleotide to about 80 nucleotides, about 45 nucleotide to about 75 nucleotides, or about 45 nucleotide to about 60 nucleotides, or any range or value therein. In some embodiments, the length of a PBS may be at least 30 nucleotides, optionally about 30, 31, 32, 33, 34, 35, 36, 37, 38, 39, or 40 nucleotides to about 41, 42, 43, 44, 45, 46, 47, 48, 49, 50, 51, 52, 53, 54, 55, 56, 57, 58, 59, 60, 61, 62, 63, 64, 65, 66, 67, 68, 69, 70, 71, 72, 73, 74, 75, 76, 77, 78, 79, or 80 nucleotides in length, or any range or value therein. In some embodiments, the length of a PBS may be about 8, 16, 24, 32, 40, 48, 56, 64, 72, or 80 nucleotides.

[0108] In some embodiments, an RTT may have a length of about 35 nucleotides to about 75 nucleotides and a PBS may have a length of about 30 nucleotides to about 80 nucleotides, optionally wherein the PBS may comprise a length of about 8, 16, 24, 32, 40, 48, 56, 64, 72, or 80 nucleotides and the RTT may comprise a length of about 36, 40, 44, 47, 50, 52, 55, 63, 72 or 74 nucleotides, or any combination thereof of the RTT length and/or PBS length.

[0109] In some embodiments, an extended portion of an extended guide nucleic acid may be fused to either the 5′ end or 3′ end of a Type II or a Type V CRISPR nucleic acid (e.g., 5′ to 3′: repeat-spacer-extended portion, or extended portion-repeat-spacer) and/or to the 5′ or 3′ end of the tracr nucleic acid. In some embodiments, when an extended portion is located 5′ of the crRNA, a Type V CRISPR-Cas effector protein is modified to reduce (or eliminate) self-processing RNase activity.

[0110] In some embodiments, the extended portion of an extended guide nucleic acid may be linked to the Type II or Type V CRISPR nucleic acid and/or the Type II or Type V tracrRNA via a linker. In some embodiments, a linker have a length of about 1 to about 100 nucleotides or more (e.g., about 1, 2, 3, 4, 5, 6, 7, 8, 9, 10, 11, 12, 13, 14, 15, 16, 17, 18, 19, 20, 21, 22, 23, 24, 25, 26, 27, 28, 29, 30, 31, 32, 33, 34, 35, 36, 37, 38, 39, 40, 41, 42, 43, 44, 45, 46, 47, 48, 49, 50, 51, 52, 53, 54, 55, 56, 57, 58, 59, 60, 61, 62, 63, 64, 65, 66, 67, 68, 69, 70, 71, 72, 73, 74, 75, 76, 77, 78, 79, 80, 81, 82, 83, 84, 85, 86, 87, 88, 89, 90, 91, 92, 93, 94, 95, 96, 97, 98, 99, 100 or more nucleotides in length, and any range therein (e.g., about 2 to about 40, about 2 to about 50, about 2 to about 60, about 4 to about 40, about 4 to about 50, about 4 to about 60, about 5 to about 40, about 5 to about 50, about 5 to about 60, about 9 to about 40, about 9 to about 50, about 9 to about 60, about 10 to about 40, about 10 to about 50, about 10 to about 60, about 40 to about 100, about 50 to about 100, or about 2, 3, 4, 5, 6, 7, 8, 9, 10, 11, 12, 13, 14, 15, 16, 17, 18, 19, 20, 21, 22, 23, 24, 25 nucleotides to about 26, 27, 28, 29, 30, 31, 32, 33, 34, 35, 36, 37, 38, 39, 40, 41, 42, 43, 44, 45, 46, 47, 48, 49, 50, 51, 52, 53, 54, 55, 56, 57, 58, 59, 60, 61, 62, 63, 64, 65, 66, 67, 68, 69, 70, 71, 72, 73, 74, 75, 76, 77, 78, 79, 80, 81, 82, 83, 84, 85, 86, 87, 88, 89, 90, 91, 92, 93, 94, 95, 96, 97, 98, 99, 100 or more nucleotides in length (e.g., about 105, 110, 115, 120, 130, 140 150 or more nucleotides in length).

[0111] A guide nucleic acid and/or an extended guide nucleic acid may comprise one or more recruiting motifs as described herein, which may be linked to the 5′ end and/or the 3′ end of the guide nucleic acid and/or it may be inserted into the guide nucleic acid (e.g., within a hairpin loop of the guide nucleic acid). In some embodiments, an extended guide nucleic acid may be linked to an RNA recruiting motif. An extended guide nucleic acid and/or guide nucleic acid may be linked to one or to two or more RNA recruiting motifs (e.g., 1, 2, 3, 4, 5, 6, 7, 8, 9, 10 or more motifs; e.g., at least 10 to about 25 motifs), optionally wherein the two or more RNA recruiting motifs may be the same RNA recruiting motif or different RNA recruiting motifs. In some embodiments, an RNA recruiting motif may be located on the 3′ end of the extended portion of an extended guide nucleic acid (e.g., 5′-3′, repeat-spacer-extended portion (RT template-primer binding site)-RNA recruiting motif). In some embodiments, an RNA recruiting motif may be embedded in the extended portion of an extended guide nucleic acid.

[0112] In some embodiments, an editing system comprises an extended guide nucleic acid that is linked to an RNA recruiting motif and a reverse transcriptase that is a reverse transcriptase fusion protein, wherein the reverse transcriptase fusion protein comprises a reverse transcriptase polypeptide fused to an affinity polypeptide that binds to the RNA recruiting motif, wherein the extended guide nucleic acid binds to a target nucleic acid and the RNA recruiting motif binds to the affinity polypeptide, thereby recruiting the reverse transcriptase fusion protein to the extended guide nucleic acid and contacting the target nucleic acid with the reverse transcriptase. In some embodiments, two or more reverse transcriptase fusion proteins may be recruited to an extended guide nucleic acid, thereby contacting the target nucleic acid with two or more reverse transcriptase fusion proteins.

[0113] The terms “transgene” or “transgenic” as used herein refer to at least one nucleic acid sequence that is taken from the genome of one organism or produced synthetically, and which is then introduced into a host cell (e.g., a plant cell) or organism or tissue of interest and which is subsequently integrated into the host's genome by means of “stable” transformation or transfection approaches. In contrast, the term “transient” transformation or transfection or introduction refers to a way of introducing molecular tools including at least one nucleic acid (DNA, RNA, single-stranded or double-stranded or a mixture thereof) and/or at least one amino acid sequence, optionally comprising suitable chemical or biological agents, to achieve a transfer into at least one compartment of interest of a cell, including, but not restricted to, the cytoplasm, an organelle, including the nucleus, a mitochondrion, a vacuole, a chloroplast, or into a membrane, resulting in transcription and/or translation and/or association and/or activity of the at least one molecule introduced without achieving a stable integration or incorporation into the genome and thus without inheritance of the respective at least one molecule introduced into the genome of a cell. The term “transgene-free” refers to a condition in which a transgene is not present or found in the genome of a host cell or tissue or organism of interest.

[0114] In some embodiments, a polynucleotide and/or a nucleic acid construct of the invention can be an “expression cassette” or can be comprised within an expression cassette. As used herein, “expression cassette” means a recombinant nucleic acid molecule comprising, for example, a nucleic acid construct of the invention (e.g., a polynucleotide encoding a polypeptide (e.g., a circular permutant) of the present invention, a polynucleotide encoding a nuclease, a polynucleotide encoding a reverse transcriptase, a polynucleotide encoding a reverse transcriptase fusion protein, a polynucleotide encoding a peptide tag, a polynucleotide encoding an affinity polypeptide, a polynucleotide encoding a glycosylase, and/or a polynucleotide comprising a guide nucleic acid), wherein the nucleic acid construct is operably associated with at least a control sequence (e.g., a promoter). Thus, some embodiments of the invention provide expression cassettes designed to express, for example, a nucleic acid construct of the invention. When an expression cassette comprises more than one polynucleotide, the polynucleotides may be operably linked to a single promoter that drives expression of all of the polynucleotides or the polynucleotides may be operably linked to one or more separate promoters (e.g., three polynucleotides may be driven by one, two or three promoters in any combination). Thus, for example, a polynucleotide encoding a polypeptide of the present invention, and a polynucleotide comprising a guide nucleic acid comprised in an expression cassette may each be operably associated with a single promoter or one or more of the polynucleotide(s) may be operably associated with separate promoters (e.g., two or three promoters) in any combination, which may be the same or different from each other.

[0115] In some embodiments, an expression cassette comprising the polynucleotides/nucleic acid constructs of the invention may be optimized for expression in an organism (e.g., an animal, a plant, a bacterium and the like).

[0116] An expression cassette comprising a nucleic acid construct of the invention may be chimeric, meaning that at least one of its components is heterologous with respect to at least one of its other components (e.g., a promoter from the host organism operably linked to a polynucleotide of interest to be expressed in the host organism, wherein the polynucleotide of interest is from a different organism than the host or is not normally found in association with that promoter). An expression cassette may also be one that is naturally occurring but has been obtained in a recombinant form useful for heterologous expression.

[0117] An expression cassette can optionally include a transcriptional and/or translational termination region (i.e., termination region) and/or an enhancer region that is functional in the selected host cell. A variety of transcriptional terminators and enhancers are known in the art and are available for use in expression cassettes. Transcriptional terminators are responsible for the termination of transcription and correct mRNA polyadenylation. A termination region and/or the enhancer region may be native to the transcriptional initiation region, may be native to a gene encoding a CRISPR-Cas effector protein, or a gene encoding a polypeptide of the present invention, may be native to a host cell, or may be native to another source (e.g., foreign or heterologous to the promoter, to a gene encoding the CRISPR-Cas effector protein, to a host cell, or any combination thereof).

[0118] An expression cassette of the invention also can include a polynucleotide encoding a selectable marker, which can be used to select a transformed host cell. As used herein, “selectable marker” means a polynucleotide sequence that when expressed imparts a distinct phenotype to the host cell expressing the marker and thus allows such transformed cells to be distinguished from those that do not have the marker. Such a polynucleotide sequence may encode either a selectable or screenable marker, depending on whether the marker confers a trait that can be selected for by chemical means, such as by using a selective agent (e.g., an antibiotic and the like), or on whether the marker is simply a trait that one can identify through observation or testing, such as by screening (e.g., fluorescence). Many examples of suitable selectable markers are known in the art and can be used in the expression cassettes described herein.

[0119] The expression cassettes, the nucleic acid molecules/constructs and polynucleotide sequences described herein can be used in connection with vectors. The term “vector” refers to a composition for transferring, delivering or introducing a nucleic acid (or nucleic acids) into a cell. A vector may comprise a nucleic acid construct comprising one or more nucleotide sequence(s) to be transferred, delivered or introduced into a cell. Vectors for use in transformation of host organisms are well known in the art. Non-limiting examples of general classes of vectors include viral vectors (e.g., Adeno-associated virus (AAV) vectors), plasmid vectors, phage vectors, phagemid vectors, cosmid vectors, fosmid vectors, bacteriophages, artificial chromosomes, minicircles, or Agrobacterium binary vectors in double or single stranded linear or circular form which may or may not be self transmissible or mobilizable. In some embodiments, a viral vector can include, but is not limited, to a retroviral, lentiviral, adenoviral, adeno-associated, or herpes simplex viral vector. A vector as defined herein can transform a prokaryotic or eukaryotic host either by integration into the cellular genome or exist extrachromosomally (e.g., autonomous replicating plasmid with an origin of replication). Additionally, included are shuttle vectors by which is meant a DNA vehicle capable, naturally or by design, of replication in two different host organisms, which may be selected from actinomycetes and related species, bacteria and eukaryotic (e.g., higher plant, mammalian, yeast or fungal cells). In some embodiments, the nucleic acid in the vector is under the control of, and operably linked to, an appropriate promoter or other regulatory elements for transcription in a host cell. The vector may be a bi-functional expression vector which functions in multiple hosts. In the case of genomic DNA, this may contain its own promoter and/or other regulatory elements and in the case of cDNA this may be under the control of an appropriate promoter and/or other regulatory elements for expression in the host cell. Accordingly, a nucleic acid construct of this invention and/or expression cassettes comprising the same may be comprised in vectors as described herein and as known in the art.

[0120] As used herein, “contact,” “contacting,” “contacted,” and grammatical variations thereof, refer to placing the components of a desired reaction together under conditions suitable for carrying out the desired reaction (e.g., transformation, transcriptional control, genome editing, nicking, and/or cleavage). Thus, for example, a target nucleic acid may be contacted with a nucleic acid construct of the invention comprising, for example, a polynucleotide encoding a polypeptide of the present invention and optionally a guide nucleic acid, under conditions whereby the polypeptide (e.g., comprising a circular permutant) is expressed, and the polypeptide forms a complex with a guide nucleic acid, the complex hybridizes to the target nucleic acid, and optionally the polypeptide of the present invention may recruit one or more additional component(s) (e.g., a reverse transcriptase, glycosylase inhibitor, and/or deaminase) to it (and thus, to the target nucleic acid) or one or more additional component(s) is/are fused to the polypeptide, thereby modifying the target nucleic acid. In some embodiments, a polypeptide of the present invention localizes at a target nucleic acid, optionally through non-covalent interactions. Methods for recruiting one or more additional component(s) (e.g., a reverse transcriptase and/or deaminase) may be used that take advantage of other protein-protein interactions, RNA-protein interactions, and/or chemical interactions. In some embodiments, a target nucleic acid may be contacted with a ribonucleoprotein comprising a polypeptide of the present invention (e.g., comprising a circular permutant) and optionally a guide nucleic acid and the ribonucleoprotein hybridizes to the target nucleic acid, and optionally the polypeptide of the present invention may recruit one or more additional component(s) (e.g., a reverse transcriptase, glycosylase inhibitor, and/or deaminase) to it (and thus, to the target nucleic acid) or one or more additional component(s) is/are fused to the polypeptide, thereby modifying the target nucleic acid.

[0121] In some embodiments, a target nucleic acid may be contacted with a nucleic acid construct of the invention encoding a polypeptide of the present invention and optionally a guide nucleic acid, under conditions whereby the polypeptide is expressed, or a target nucleic acid may be contacted with a polypeptide of the present invention and optionally a guide nucleic acid. The polypeptide of the present invention can form a complex with the guide nucleic acid, and the complex can hybridize to the target nucleic acid, and/or a polypeptide of the present invention may be recruited to a target nucleic acid, which may result in modifying the target nucleic acid.

[0122] As used herein, “modifying” or “modification” in reference to a target nucleic acid includes editing (e.g., mutating), covalent modification, exchanging/substituting nucleic acids/nucleotide bases, deleting, cleaving, and/or nicking of a target nucleic acid to thereby provide a modified nucleic acid and/or altering transcriptional control of a target nucleic acid to thereby provide a modified nucleic acid. In some embodiments, a modification may include an insertion and/or deletion of any size and/or a single base change (SNP) of any type. In some embodiments, a modification comprises a SNP. In some embodiments, a modification comprises exchanging and/or substituting one or more (e.g., 1, 2, 3, 4, 5, or more) nucleotides. In some embodiments, an insertion or deletion may be about 1 base to about 30,000 bases or more in length (e.g., about 1, 2, 3, 4, 5, 6, 7, 8, 9, 10, 11, 12, 13, 14, 15, 16, 17, 18, 19, 20, 21, 22, 23, 24, 25, 26, 27, 28, 29, 30, 31, 32, 33, 34, 35, 36, 37, 38, 39, 40, 41, 42, 43, 44, 45, 46, 47, 48, 49, 50, 51, 52, 53, 54, 55, 56, 57, 58, 59, 60, 61, 62, 63, 64, 65, 66, 67, 68, 69, 70, 71, 72, 73, 74, 75, 76, 77, 78, 79, 80, 81, 82, 83, 84, 85, 86, 87, 88, 89, 90, 91, 92, 93, 94, 95, 96, 97, 98, 99, 100, 110, 120, 130, 140, 150, 160, 170, 180, 190, 200, 210, 220, 230, 240, 250, 260, 270, 280, 290, 300, 310, 320, 330, 340, 350, 360, 370, 380, 390, 400, 410, 400, 410, 420, 430, 440, 450, 460, 470, 480, 490, 500, 510, 520, 530, 540, 550, 560, 570, 580, 590, 600, 610, 620, 630, 640, 650, 660, 670, 680, 690, 700, 710, 720, 730, 740, 750, 760, 770, 780, 790, 800, 810, 820, 830, 840, 850, 860, 870, 880, 890, 900, 910, 920, 930, 940, 950, 960, 970, 980, 990, 1000, 1100, 1200, 1300, 1400, 1500, 1600, 1700, 1800, 1900, 2000, 2500, 3000, 3500, 4000, 4500, 5000, 5500, 6000, 6500, 7000, 7500, 8000, 8500, 9000, 9500, 10,000, 10,500, 11,000, 11,500, 12,000, 12,500, 13,000, 13,500, 14,000, 14,500, 15,000, 15,500, 16,000, 16,500, 17,000, 17,500, 18,000, 18,500, 19,000, 19,500, 20,000, 20,500, 21,000, 21,500, 22,000, 22,500, 23,000, 23,500, 24,000, 24,500, 25,000, 25,500, 26,000, 26,500, 27,000, 27,500, 28,000, 28,500, 29,000, 29,500, 30,000 bases in length or more, or any value or range therein). Thus, in some embodiments, an insertion or deletion may be about 1, 2, 3, 4, 5, 6, 7, 8, 9, 10, 11, 12, 13, 14, 15, 16, 17, 18, 19, 20, 21, 22, 23, 24, 25, 26, 27, 28, 29, 30, 31, 32, 33, 34, 35, 36, 37, 38, 39, 40, 41, 42, 43, 44, 45, 46, 47, 48, 49, 50, 51, 52, 53, 54, 55, 56, 57, 58, 59, 60, 61, 62, 63, 64, 65, 66, 67, 68, 69, 70, 71, 72, 73, 74, 75, 76, 77, 78, 79, 80, 81, 82, 83, 84, 85, 86, 87, 88, 89, 90, 91, 92, 93, 94, 95, 96, 97, 98, 99, 100, 110, 120, 130, 140, 150, 160, 170, 180, 190, 200, 210, 220, 230, 240, 250, 260, 270, 280, 290, 300 to about 310, 320, 330, 340, 350, 360, 370, 380, 390, 400, 410, 420, 430, 440, 450, 460, 470, 480, 490, 500, 510, 520, 530, 540, 550, 560, 570, 580, 590, 600, 610, 620, 630, 640, 650, 660, 670, 680, 690, 700, 710, 720, 730, 740, 750, 760, 770, 780, 790, 800, 810, 820, 830, 840, 850, 860, 870, 880, 890, 900, 910, 920, 930, 940, 950, 960, 970, 980, 990, 1000 bases in length, or any range or value therein; about 50, 51, 52, 53, 54, 55, 56, 57, 58, 59, 60, 61, 62, 63, 64, 65, 66, 67, 68, 69, 70, 71, 72, 73, 74, 75, 76, 77, 78, 79, 80, 81, 82, 83, 84, 85, 86, 87, 88, 89, 90, 91, 92, 93, 94, 95, 96, 97, 98, 99, 100, 110, 120, 130, 140, 150, 160, 170, 180, 190, 200, 210, 220, 230, 240, 250, 260, 270, 280, 290, 300 bases to about 310, 320, 330, 340, 350, 360, 370, 380, 390, 400, 410, 420, 430, 440, 450, 460, 470, 480, 490, 500, 510, 520, 530, 540, 550, 560, 570, 580, 590, 600, 610, 620, 630, 640, 650, 660, 670, 680, 690, 700, 710, 720, 730, 740, 750, 760, 770, 780, 790, 800, 810, 820, 830, 840, 850, 860, 870, 880, 890, 900, 910, 920, 930, 940, 950, 960, 970, 980, 990, 1000, 1100, 1200, 1300, 1400, 1500, 1600, 1700, 1800, 1900, 2000 bases or more in length, or any value or range therein; about 500, 510, 520, 530, 540, 550, 560, 570, 580, 590, 600, 610, 620, 630, 640, 650, 660, 670, 680, 690, 700, 710, 720, 730, 740, 750, 760, 770, 780, 790, 800, 810, 820, 830, 840, 850, 860, 870, 880, 890, 900, 910, 920, 930, 940, 950, 960, 970, 980, 990, 1000, 1100, 1200, 1300, 1400, 1500, 1600, 1700, 1800, 1900, 2000 bases to about 2500, 3000, 3500, 4000, 4500, 5000, 5500, 6000, 6500, 7000, 7500, 8000, 8500, 9000, 9500, or 10,000 bases or more in length, or any value or range therein; or about 400, 410, 420, 430, 440, 450, 460, 470, 480, 490, 500, 510, 520, 530, 540, 550, 560, 570, 580, 590, 600, 610, 620, 630, 640, 650, 660, 670, 680, 690, or 700 bases to about 710, 720, 730, 740, 750, 760, 770, 780, 790, 800, 810, 820, 830, 840, 850, 860, 870, 880, 890, 900, 910, 920, 930, 940, 950, 960, 970, 980, 990, 1000, 1100, 1200, 1300, 1400, 1500, 1600, 1700, 1800, 1900, 2000, 2500, 3000, 3500, 4000, 4500, or 5000 bases or more in length, or any value or range therein. In some embodiments, an insertion or deletion may be about 1000, 1100, 1200, 1300, 1400, 1500, 1600, 1700, 1800, 1900, 2000, 2500, 3000, 3500, 4000, 4500, 5000, 5500, 6000, 6500, 7000, 7500, 8000, 8500, 9000, 9500, or 10,000 bases to about 10,500, 11,000, 11,500, 12,000, 12,500, 13,000, 13,500, 14,000, 14,500, 15,000, 15,500, 16,000, 16,500, 17,000, 17,500, 18,000, 18,500, 19,000, 19,500, 20,000, 20,500, 21,000, 21,500, 22,000, 22,500, 23,000, 23,500, 24,000, 24,500, 25,000, 25,500, 26,000, 26,500, 27,000, 27,500, 28,000, 28,500, 29,000, 29,500, or 30,000 bases or more in length, or any value or range therein.

[0123] “Recruit,” “recruiting” or “recruitment” as used herein refer to attracting one or more polypeptide(s) or polynucleotide(s) to another polypeptide or polynucleotide (e.g., to a particular location in a genome) using protein-protein interactions, nucleic acid protein interactions (e.g., RNA-protein interactions), and/or chemical interactions. Protein-protein interactions can include, but are not limited to, peptide tags (epitopes, multimerized epitopes) and corresponding affinity polypeptides, RNA recruiting motifs and corresponding affinity polypeptides, and/or chemical interactions. Example chemical interactions that may be useful with polypeptides and polynucleotides for the purpose of recruitment can include, but are not limited to, rapamycin-inducible dimerization of FRB-FKBP; Biotin-streptavidin interaction; SNAP tag (Hussain et al. Curr Pharm Des. 19 (30): 5437-42 (2013)); Halo tag (Los et al. ACS Chem Biol. 3 (6): 373-82 (2008)); CLIP tag (Gautier et al. Chemistry & Biology 15:128-136 (2008)); DmrA-DmrC heterodimer induced by a compound (Tak et al. Nat Methods 14 (12): 1163-1166 (2017)); and/or bifunctional ligand approaches (e.g., chemically induced dimerization (Voß et al. Curr Opin Chemical Biology 28:194-201 (2015) (e.g. dihyrofolate reductase (DHFR) (Kopyteck et al. Cell Cehm Biol 7 (5): 313-321 (2000)). In some embodiments, a recruiting method and/or system of the present invention uses a protein-protein interaction and/or nucleic acid-protein interaction (e.g., RNA-protein interactions) to attract a polypeptide or polynucleotide to another polypeptide or polynucleotide (e.g., to a particular location in a genome).

[0124] “Introducing,” “introduce,” “introduced” (and grammatical variations thereof) in the context of a polynucleotide of interest or editing system means presenting a nucleotide sequence of interest (e.g., polynucleotide, a nucleic acid construct, and/or a guide nucleic acid) and/or editing system (e.g., a polynucleotide, polypeptide, and/or ribonucleoprotein) to a host organism or cell of said organism (e.g., host cell; e.g., a plant cell) in such a manner that the nucleotide sequence and/or editing system gains access to the interior of a cell. Thus, for example, a nucleic acid construct of the invention encoding a polypeptide of the present invention and/or a guide nucleic acid may be introduced into a cell of an organism, thereby transforming the cell with the polypeptide, CRISPR-Cas effector protein, guide nucleic acid, and reverse transcriptase. In some embodiments, a polypeptide of the present invention and/or a guide nucleic acid may be introduced into a cell of an organism, optionally wherein the polypeptide and guide nucleic acid may be comprised in a complex (e.g., a ribonucleoprotein). In some embodiments, the organism is a eukaryote (e.g., a mammal such as a human).

[0125] The term “transformation” as used herein refers to the introduction of a nucleic acid, polypeptide, and/or ribonucleoprotein (e.g., a heterologous nucleic acid, polypeptide, and/or ribonucleoprotein) into a cell. Transformation of a cell may be stable or transient. Thus, in some embodiments, a host cell or host organism may be stably transformed with a polynucleotide/nucleic acid molecule of the invention. In some embodiments, a host cell or host organism may be transiently transformed with a nucleic acid construct, a polypeptide, and/or a ribonucleoprotein of the invention.

[0126] “Transient transformation” in the context of a polynucleotide, polypeptide, and/or ribonucleoprotein means that a polynucleotide, polypeptide, and/or ribonucleoprotein is introduced into the cell and does not integrate into the genome of the cell.

[0127] By “stably introducing” or “stably introduced” in the context of a polynucleotide introduced into a cell is intended that the introduced polynucleotide is stably incorporated into the genome of the cell, and thus the cell is stably transformed with the polynucleotide.

[0128] “Stable transformation” or “stably transformed” as used herein means that a nucleic acid molecule is introduced into a cell and integrates into the genome of the cell. As such, the integrated nucleic acid molecule is capable of being inherited by the progeny thereof, more particularly, by the progeny of multiple successive generations. “Genome” as used herein includes the nuclear and the plastid genome, and therefore includes integration of the nucleic acid into, for example, the chloroplast or mitochondrial genome. Stable transformation as used herein can also refer to a transgene that is maintained extrachromasomally, for example, as a minichromosome or a plasmid.

[0129] Transient transformation may be detected by, for example, an enzyme-linked immunosorbent assay (ELISA) or Western blot, which can detect the presence of a peptide or polypeptide encoded by one or more transgene introduced into an organism. Stable transformation of a cell can be detected by, for example, a Southern blot hybridization assay of genomic DNA of the cell with nucleic acid sequences which specifically hybridize with a nucleotide sequence of a transgene introduced into an organism (e.g., a mammal, plant, etc.). Stable transformation of a cell can be detected by, for example, a Northern blot hybridization assay of RNA of the cell with nucleic acid sequences which specifically hybridize with a nucleotide sequence of a transgene introduced into a host organism. Stable transformation of a cell can also be detected by, e.g., a polymerase chain reaction (PCR) or other amplification reactions as are well known in the art, employing specific primer sequences that hybridize with target sequence(s) of a transgene, resulting in amplification of the transgene sequence, which can be detected according to standard methods. Transformation can also be detected by direct sequencing and/or hybridization protocols well known in the art.

[0130] Accordingly, in some embodiments, nucleotide sequences, polynucleotides, nucleic acid constructs, and/or expression cassettes of the invention may be expressed transiently and/or they can be stably incorporated into the genome of the host organism. Thus, in some embodiments, a nucleic acid construct of the invention may be transiently introduced into a cell with a guide nucleic acid and as such, no DNA maintained in the cell.

[0131] A nucleic acid construct, polypeptide, and/or ribonucleoprotein of the invention can be introduced into a cell by any method known to those of skill in the art. In some embodiments, transformation methods include, but are not limited to, transformation via bacterial-mediated nucleic acid delivery (e.g., via Agrobacteria), viral-mediated nucleic acid delivery, silicon carbide and/or nucleic acid whisker-mediated nucleic acid delivery, liposome mediated nucleic acid delivery, microinjection, microparticle bombardment, calcium-phosphate-mediated transformation, cyclodextrin-mediated transformation, electroporation, nanoparticle-mediated transformation, sonication, infiltration, PEG-mediated nucleic acid uptake, as well as any other electrical, chemical, physical (mechanical) and/or biological mechanism that results in the introduction of nucleic acid into the cell (e.g., a plant cell or an animal cell), including any combination thereof. In some embodiments of the invention, transformation of a cell comprises nuclear transformation. In some embodiments, transformation of a cell comprises plastid transformation (e.g., chloroplast transformation). In some embodiments, a recombinant nucleic acid construct of the invention can be introduced into a cell via conventional breeding techniques.

[0132] Procedures for transforming both eukaryotic and prokaryotic organisms are well known and routine in the art and are described throughout the literature (See, for example, Jiang et al. 2013. Nat. Biotechnol. 31:233-239; Ran et al. Nature Protocols 8:2281-2308 (2013)). General guides to various plant transformation methods known in the art include Miki et al. (“Procedures for Introducing Foreign DNA into Plants” in Methods in Plant Molecular Biology and Biotechnology, Glick, B. R. and Thompson, J. E., Eds. (CRC Press, Inc., Boca Raton, 1993), pages 67-88) and Rakowoczy-Trojanowska (Cell. Mol. Biol. Lett. 7:849-858 (2002)).

[0133] A nucleotide sequence, polypeptide, and/or ribonucleoprotein therefore can be introduced into a host organism or its cell in any number of ways that are well known in the art. The methods of the invention do not depend on a particular method for introducing one or more nucleotide sequence(s), polypeptide(s), and/or ribonucleoprotein(s) into the organism, only that they gain access to the interior of at least one cell of the organism. Where more than one nucleotide sequence, polypeptide, and/or ribonucleoprotein is to be introduced, they can be assembled as part of a single nucleic acid construct, or as separate nucleic acid constructs, and can be located on the same or different nucleic acid constructs. Accordingly, a nucleotide sequence, polypeptide, and/or ribonucleoprotein can be introduced into the cell of interest in a single transformation event, and/or in separate transformation events, or, alternatively, where relevant, a nucleotide sequence can be incorporated into a plant, for example, as part of a breeding protocol. In some embodiments, the cell is a eukaryotic cell (e.g., a plant cell or a mammalian such as a human cell).

[0134] In some embodiments, a nucleic acid construct of the invention (e.g., a polynucleotide encoding a polypeptide of the present invention, and/or a guide nucleic acid and/or expression cassettes and/or vectors comprising the same) may be operably linked to at least one regulatory sequence, optionally, wherein the at least one regulatory sequence may be codon optimized for expression in a plant. In some embodiments, the at least one regulatory sequence may be, for example, a promoter, an operon, a terminator, or an enhancer. In some embodiments, the at least one regulatory sequence may be a promoter. In some embodiments, the regulatory sequence may be an intron. In some embodiments, the at least one regulatory sequence may be, for example, a promoter operably associated with an intron or a promoter region comprising an intron. In some embodiments, the at least one regulatory sequence may be, for example a ubiquitin promoter and its associated intron (e.g., Medicago truncatula and/or Zea mays and their associated introns). In some embodiments, the at least one regulatory sequence may be a terminator nucleotide sequence and/or an enhancer nucleotide sequence.

[0135] In some embodiments, a nucleic acid construct of the invention may be operably associated with a promoter region, wherein the promoter region comprises an intron, optionally wherein the promoter region may be a ubiquitin promoter and intron (e.g., a Medicago or a maize ubiquitin promoter and intron, e.g., SEQ ID NO:37 or SEQ ID NO:38). In some embodiments, the nucleic acid construct of the invention that is operably associated with a promoter region comprising an intron may be codon optimized for expression in a plant.

[0136] In some embodiments, a nucleic acid construct of the invention may encode one or more (e.g., 1, 2, 3, 4, or more) polypeptide(s) of interest. The one or more polypeptides of interest may be codon optimized for expression in a eukaryote (e.g., a human or a plant). In some embodiments, a polypeptide of the present invention may comprise to one or more (e.g., 1, 2, 3, 4, or more) polypeptide(s) of interest.

[0137] A polypeptide of interest useful with this invention can include, but is not limited to, a polypeptide or protein domain having deaminase activity, nickase activity, recombinase activity, transposase activity, methylase activity, glycosylase (DNA glycosylase) activity, glycosylase inhibitor activity (e.g., uracil-DNA glycosylase inhibitor (UGI)), a reverse transcriptase, a peptide tag (e.g., a GCN4 peptide tag), demethylase activity, transcription activation activity, transcription repression activity, transcription release factor activity, histone modification activity, nuclease activity, single-strand RNA cleavage activity, double-strand RNA cleavage activity, restriction endonuclease activity (e.g., Fok1), nucleic acid binding activity, methyltransferase activity, DNA repair activity, DNA damage activity, dismutase activity, alkylation activity, depurination activity, oxidation activity, pyrimidine dimer forming activity, integrase activity, transposase activity, polymerase activity, ligase activity, helicase activity, a nuclear localization sequence or activity, an affinity polypeptide, a peptide tag, and/or photolyase activity. In some embodiments, the polypeptide of interest is a Fok1 nuclease, or a uracil-DNA glycosylase inhibitor. In some embodiments, the polypeptide of interest is a cytosine deaminase (e.g., apolipoprotein B mRNA editing enzyme, catalytic polypeptide-like 3A (A3A)). In some embodiments, the polypeptide of interest is an adenine deaminase (e.g., TadA8e). When encoded in a nucleic acid (polynucleotide, expression cassette, and/or vector) the encoded polypeptide or protein domain may be codon optimized for expression in an organism. In some embodiments, a polypeptide of interest may be linked to a CRISPR-Cas effector protein domain to provide a CRISPR-Cas fusion protein. In some embodiments, a CRISPR-Cas fusion protein that comprises a CRISPR-Cas effector protein domain linked to a peptide tag may also be linked to a polypeptide of interest (e.g., a CRISPR-Cas effector protein domain may be, for example, linked to both a peptide tag (or an affinity polypeptide) and, for example, a polypeptide of interest.

[0138] In some embodiments, an editing system of the present invention comprises a CRISPR-Cas effector protein and/or a polypeptide of the present invention (e.g., a circular permutant). As used herein, a “CRISPR-Cas effector protein” is a protein or polypeptide that cleaves, cuts, or nicks a nucleic acid; binds a nucleic acid (e.g., a target nucleic acid and/or a guide nucleic acid); and/or that identifies, recognizes, or binds a guide nucleic acid as defined herein. In some embodiments, a CRISPR-Cas effector protein may be an enzyme (e.g., a nuclease, endonuclease, nickase, etc.) and/or may function as an enzyme. In some embodiments, a CRISPR-Cas effector protein refers to a CRISPR-Cas nuclease. In some embodiments, a CRISPR-Cas effector protein comprises nuclease activity and/or nickase activity, comprises a nuclease domain whose nuclease activity and/or nickase activity has been reduced or eliminated, comprises single stranded DNA cleavage activity (ss DNase activity) or which has ss DNase activity that has been reduced or eliminated, and/or comprises self-processing RNase activity or which has self-processing RNase activity that has been reduced or eliminated. A CRISPR-Cas effector protein may bind to a target nucleic acid. A CRISPR-Cas effector protein may be a Type I, II, III, IV, V, or VI CRISPR-Cas effector protein. In some embodiments, a CRISPR-Cas effector protein may be from a Type I CRISPR-Cas system, a Type II CRISPR-Cas system, a Type III CRISPR-Cas system, a Type IV CRISPR-Cas system, Type V CRISPR-Cas system, or a Type VI CRISPR-Cas system. In some embodiments, a CRISPR-Cas effector protein may be from a Type II CRISPR-Cas system or a Type V CRISPR-Cas system. In some embodiments, a CRISPR-Cas effector protein may be a Type II CRISPR-Cas effector protein, for example, a Cas9 effector protein. In some embodiments, a CRISPR-Cas effector protein may be Type V CRISPR-Cas effector protein, for example, a Cas12 effector protein. In some embodiments, a CRISPR-Cas effector protein may be Cas12a and optionally may have an amino acid sequence of any one of SEQ ID NOs: 39-65, 298, and 850-852 and/or a nucleotide sequence of any one of SEQ ID NOs: 66-68, 246, and 949. In some embodiments, a CRISPR-Cas effector protein may be an active Cas 12a and optionally may have an amino acid sequence of SEQ ID NO:46, 55 or 56. In some embodiments, a CRISPR-Cas effector protein may be an inactive (i.e., dead) Cas12a and optionally may have an amino acid sequence of SEQ ID NO: 59, 60, 61, or 850-852.

[0139] Exemplary CRISPR-Cas effector proteins include, but are not limited to, a Cas9, C2c1, C2c3, Cas12a (also referred to as Cpf1), Cas12b, Cas12c, Cas12d, Cas12e, Cas13a, Cas13b, Cas13c, Cas13d, Cas1, Cas1B, Cas2, Cas3, Cas3′, Cas3″, Cas4, Cas5, Cas6, Cas7, Cas8, Cas9 (also known as Csn1 and Csx12), Cas10, Csy1, Csy2, Csy3, Cse1, Cse2, Csc1, Csc2, Csa5, Csn2, Csm2, Csm3, Csm4, Csm5, Csm6, Cmr1, Cmr3, Cmr4, Cmr5, Cmr6, Csb1, Csb2, Csb3, Csx17, Csx14, Csx10, Csx16, CsaX, Csx3, Csx1, Csx15, Csf1, Csf2, Csf3, Csf4 (dinG), and/or Csf5 nuclease, optionally wherein the CRISPR-Cas effector protein may be a Cas9, Cas12a (Cpf1), Cas12b, Cas12c (C2c3), Cas12d (CasY), Cas12e (CasX), Cas12g, Cas12h, Cas12i, C2c4, C2c5, C2c8, C2c9, C2c10, Cas14a, Cas14b, and/or Cas14c effector protein.

[0140] In some embodiments, a CRISPR-Cas effector protein useful with the invention may comprise a mutation in its nuclease active site and/or nuclease domain (e.g., a RuvC, HNH, e.g., a RuvC site of a Cas12a nuclease domain; e.g., a RuvC site and/or HNH site of a Cas9 nuclease domain). A CRISPR-Cas effector protein having a mutation in its nuclease active site and/or nuclease domain that causes the protein to not have nuclease activity, is commonly referred to as “inactive” or “dead,” e.g., dCas9. In some embodiments, a CRISPR-Cas effector protein having a mutation in its nuclease active site and/or nuclease domain may have impaired activity or reduced activity (e.g., nickase activity) as compared to the same CRISPR-Cas effector protein without the mutation. In some embodiments, a CRISPR-Cas effector protein having a mutation in its nuclease active site may comprise an arginine to alanine mutation in its nuclease active site. In some embodiments, a CRISPR-Cas effector protein having a mutation in its nuclease active site may be a Cas12a nickase comprising an R1138A mutation and/or may have the amino acid sequence of SEQ ID NO:62. In some embodiments, a CRISPR-Cas effector protein may be a non-target strand catalytic nickase.

[0141] A CRISPR Cas9 effector protein or Cas9 useful with this invention may be any known or later identified Cas9 nuclease. In some embodiments, a Cas9 may be a protein from, for example, Streptococcus spp. (e.g., S. pyogenes, S. thermophilus), Lactobacillus spp., Bifidobacterium spp., Kandleria spp., Leuconostoc spp., Oenococcus spp., Pediococcus spp., Weissella spp., and/or Olsenella spp. In some embodiments, a CRISPR-Cas effector protein may be a Cas9 and optionally may have a nucleotide sequence of any one of SEQ ID NOs: 141-155 and/or an amino acid sequence of any one of SEQ ID NOs: 133-140 and 156-157.

[0142] In some embodiments, the CRISPR-Cas effector protein may be a Cas9 derived from Streptococcus pyogenes and/or may recognize the PAM sequence motif NGG, NAG, NGA (Mali et al, Science 2013; 339 (6121): 823-826). In some embodiments, the CRISPR-Cas effector protein may be a Cas9 derived from Streptococcus thermophiles and/or may recognize the PAM sequence motif NGGNG and/or NNAGAAW (W=A or T) (See, e.g., Horvath et al, Science, 2010; 327 (5962): 167-170, and Deveau et al, J Bacteriol 2008; 190 (4): 1390-1400). In some embodiments, the CRISPR-Cas effector protein may be a Cas9 derived from Streptococcus mutans and/or may recognize the PAM sequence motif NGG and/or NAAR (R=A or G) (See, e.g., Deveau et al, J BACTERIOL 2008; 190 (4): 1390-1400). In some embodiments, the CRISPR-Cas effector protein may be a Cas9 derived from Streptococcus aureus and/or may recognize the PAM sequence motif NNGRR (R=A or G). In some embodiments, the CRISPR-Cas effector protein may be a Cas9 derived from S. aureus and/or may recognize the PAM sequence motif N GRRT (R=A or G). In some embodiments, the CRISPR-Cas effector protein may be a Cas9 derived from S. aureus and/or may recognize the PAM sequence motif N GRRV (R=A or G). In some embodiments, the CRISPR-Cas effector protein may be a Cas9 that is derived from Neisseria meningitidis and/or may recognize the PAM sequence motif N GATT or N GCTT (R=A or G, V=A, G or C) (See, e.g., Hou et ah, PNAS 2013, 1-6). In the aforementioned embodiments in this paragraph, N in the PAM sequence motif can be any nucleotide residue, e.g., any of A, G, C or T. In some embodiments, the CRISPR-Cas effector protein may be a Cas13a derived from Leptotrichia shahii and/or may recognize a protospacer flanking sequence (PFS) (or RNA PAM (rPAM)) sequence motif of a single 3′ A, U, or C, which may be located within the target nucleic acid.

[0143] A Type V CRISPR-Cas effector protein useful with embodiments of the invention may be any Type V CRISPR-Cas nuclease. Exemplary Type V CRISPR-Cas effector proteins include, but are not limited, to Cas12a (Cpf1), Cas12b, Cas12c (C2c3), Cas12d (CasY), Cas12e (CasX), Cas12g, Cas12h, Cas12i, C2c1, C2c4, C2c5, C2c8, C2c9, C2c10, Cas14a, Cas14b, and/or Cas14c nuclease. In some embodiments, a Type V CRISPR-Cas effector protein may be a Cas12a. In some embodiments, a Type V CRISPR-Cas effector protein may be a nickase, optionally, a Cas12a nickase.

[0144] In some embodiments, the CRISPR-Cas effector protein may be a Type V Clustered Regularly Interspaced Short Palindromic Repeats (CRISPR)-Cas nuclease. Cas12a differs in several respects from the more well-known Type II CRISPR Cas9 nuclease. For example, Cas9 recognizes a G-rich protospacer-adjacent motif (PAM) that is 3′ to its guide RNA (gRNA, sgRNA, crRNA, crDNA, CRISPR array) binding site (protospacer, target nucleic acid, target DNA) (3′-NGG), while Cas12a recognizes a T-rich PAM that is located 5′ to the target nucleic acid (5′-TTN, 5′-TTTN. In fact, the orientations in which Cas9 and Cas12a bind their guide RNAs are very nearly reversed in relation to their N and C termini. Furthermore, Cas12a enzymes use a single guide RNA (gRNA, CRISPR array, crRNA) rather than the dual guide RNA (sgRNA (e.g., crRNA and tracrRNA)) found in natural Cas9 systems, and Cas12a processes its own gRNAs. Additionally, Cas12a nuclease activity produces staggered DNA double stranded breaks instead of blunt ends produced by Cas9 nuclease activity, and Cas12a relies on a single RuvC domain to cleave both DNA strands, whereas Cas9 utilizes an HNH domain and a RuvC domain for cleavage.

[0145] A CRISPR Cas12a effector protein useful with this invention may be any known or later identified Cas12a (previously known as Cpf1) (see, e.g., U.S. Pat. No. 9,790,490, which is incorporated by reference for its disclosures of Cpf1 (Cas12a) sequences). The term “Cas12a” refers to an RNA-guided protein that can have nuclease activity, the protein comprising a guide nucleic acid binding domain and an active, inactive, or partially active DNA cleavage domain, thereby the RNA-guided nuclease activity of the Cas12a may be active, inactive or partially active, respectively. In some embodiments, a Cas12a useful with the invention may comprise a mutation in the nuclease active site (e.g., a RuvC site of the Cas12a domain). A Cas12a having a mutation in its nuclease domain and/or nuclease active site, and therefore, no longer comprising nuclease activity, is commonly referred to as deadCas 12a (e.g., dCas12a). In some embodiments, a Cas12a having a mutation in its nuclease domain and/or nuclease active site may have impaired activity, e.g., may have reduced nickase activity. In some embodiments, a Cas12a may have an amino acid sequence of any one of SEQ ID NOs: 39-65, 298, and 850-852.

[0146] In some embodiments, a CRISPR-Cas effector protein may be optimized for expression in an organism, for example, in an animal (e.g., a mammal such as a human), a plant, a fungus, an archaeon, or a bacterium. In some embodiments, a CRISPR-Cas effector protein (e.g., Cas12a polypeptide/domain or a Cas9 polypeptide/domain) may be optimized for expression in a plant.

[0147] A polypeptide of the present invention may be used in combination with a guide nucleic acid (e.g., guide RNA (gRNA), CRISPR array, CRISPR RNA, crRNA, or extended guide nucleic acid) that is designed to function with a CRISPR-Cas effector protein to modify a target nucleic acid. A guide nucleic acid useful with this invention may comprise at least one spacer sequence and at least one repeat sequence. The guide nucleic acid may be capable of forming a complex with a CRISPR-Cas effector protein (e.g., with a nuclease domain of the protein) and/or a polypeptide of the present invention and the spacer sequence is capable of hybridizing to a target nucleic acid, thereby guiding the complex to the target nucleic acid, wherein the target nucleic acid may be modified (e.g., cleaved or edited) and/or modulated (e.g., modulating transcription) by a polypeptide of the present invention, optionally present in and/or recruited to the complex).

[0148] In some embodiments, a CRISPR-Cas effector protein comprising a Cas9 domain (or a nucleic acid construct encoding the same) may be used in combination with a Cas9 guide nucleic acid to modify a target nucleic acid, and may be in or may form a complex.

[0149] Likewise, a CRISPR-Cas effector protein may comprise a Cas12a domain (or other selected CRISPR-Cas nuclease, e.g., C2c1, C2c3, Cas12b, Cas12c, Cas12d, Cas12f, Cas12i, Cas12e, Cas13a, Cas13b, Cas13c, Cas13d, Cas1, Cas1B, Cas2, Cas3, Cas3′, Cas3″, Cas4, Cas5, Cas6, Cas7, Cas8, Cas9 (also known as Csn1 and Csx12), Cas10, Csy1, Csy2, Csy3, Cse1, Cse2, Csc1, Csc2, Csa5, Csn2, Csm2, Csm3, Csm4, Csm5, Csm6, Cmr1, Cmr3, Cmr4, Cmr5, Cmr6, Csb1, Csb2, Csb3, Csx17, Csx14, Csx10, Csx16, CsaX, Csx3, Csx1, Csx15, Csf1, Csf2, Csf3, Csf4 (dinG), and/or Csf5), which may be used in combination with a Cas12a guide nucleic acid (or the guide nucleic acid for the other selected CRISPR-Cas nuclease) to modify a target nucleic acid, thereby editing the target nucleic acid.

[0150] A “guide nucleic acid,” “guide RNA,” “gRNA,” “CRISPR RNA/DNA” “crRNA” or “crDNA” as used herein means a nucleic acid that comprises at least one spacer sequence, which is complementary to (and hybridizes to) a target nucleic acid (e.g., a target DNA and/or a protospacer), and at least one repeat sequence (e.g., a repeat of a Type V Cas12a CRISPR-Cas system, or a fragment or portion thereof; a repeat of a Type II Cas9 CRISPR-Cas system, or fragment thereof; a repeat of a Type V C2c1 CRISPR Cas system, or a fragment thereof; a repeat of a CRISPR-Cas system of, for example, C2c3, Cas12a (also referred to as Cpf1), Cas12b, Cas12c, Cas12d, Cas12e, Cas12f, Cas12i, Cas13a, Cas13b, Cas13c, Cas13d, Cas1, Cas1B, Cas2, Cas3, Cas3′, Cas3″, Cas4, Cas5, Cas6, Cas7, Cas8, Cas9 (also known as Csn1 and Csx12), Cas10, Csy1, Csy2, Csy3, Cse1, Cse2, Csc1, Csc2, Csa5, Csn2, Csm2, Csm3, Csm4, Csm5, Csm6, Cmr1, Cmr3, Cmr4, Cmr5, Cmr6, Csb1, Csb2, Csb3, Csx17, Csx14, Csx10, Csx16, CsaX, Csx3, Csx1, Csx15, Csf1, Csf2, Csf3, Csf4 (dinG), and/or Csf5, or a fragment thereof), wherein the repeat sequence may be linked to the 5′ end and/or the 3′ end of the spacer sequence. In some embodiments, the guide nucleic acid comprises DNA. In some embodiments, the guide nucleic acid comprises RNA (e.g., is a guide RNA). The design of a gRNA of this invention may be based on a Type I, Type II, Type III, Type IV, Type V, or Type VI CRISPR-Cas system.

[0151] In some embodiments, a spacer sequence of the present invention comprises a polynucleotide having at least 70%, 75%, 80%, 85%, 90%, 95%, 96%, 97%, 98%, 99%, or 100% sequence identity to one or more of any one of SEQ ID NOs: 275-277, 799-802, 804-808, 865-866, 873-877, and 889-917. In some embodiments, a spacer sequence of the present invention may be comprised in a vector. In some embodiments, a vector comprising a spacer sequence of the present invention comprises a polynucleotide having at least 70%, 75%, 80%, 85%, 90%, 95%, 96%, 97%, 98%, 99%, or 100% sequence identity to one or more of any one of SEQ ID NOs: 278-280, 809-816, 867-868, 878-882, and 918-946.

[0152] In some embodiments, a Cas12a gRNA may comprise, from 5′ to 3′, a repeat sequence (full length or portion thereof (“handle”); e.g., pseudoknot-like structure) and a spacer sequence.

[0153] In some embodiments, a guide nucleic acid may comprise more than one repeat sequence-spacer sequence (e.g., 2, 3, 4, 5, 6, 7, 8, 9, 10, or more repeat-spacer sequences) (e.g., repeat-spacer-repeat, e.g., repeat-spacer-repeat-spacer-repeat-spacer-repeat-spacer-repeat-spacer, and the like). The guide nucleic acids of this invention are synthetic, human-made and not found in nature. A gRNA can be quite long and may be used as an aptamer (like in the MS2 recruitment strategy) or other RNA structures hanging off the spacer.

[0154] A “repeat sequence” as used herein, refers to, for example, any repeat sequence of a wild-type CRISPR Cas locus (e.g., a Cas9 locus, a Cas 12a locus, a C2c1 locus, etc.) or a repeat sequence of a synthetic crRNA that is functional with the CRISPR-Cas effector protein encoded by the nucleic acid constructs of the invention. A repeat sequence useful with this invention can be any known or later identified repeat sequence of a CRISPR-Cas locus (e.g., Type I, Type II, Type III, Type IV, Type V or Type VI) or it can be a synthetic repeat designed to function in a Type I, II, III, IV, V or VI CRISPR-Cas system. A repeat sequence may comprise a hairpin structure and/or a stem loop structure. In some embodiments, a repeat sequence may form a pseudoknot-like structure at its 5′ end (i.e., “handle”). Thus, in some embodiments, a repeat sequence can be identical to or substantially identical to a repeat sequence from wild-type Type I CRISPR-Cas loci, Type II, CRISPR-Cas loci, Type III, CRISPR-Cas loci, Type IV CRISPR-Cas loci, Type V CRISPR-Cas loci and/or Type VI CRISPR-Cas loci. A repeat sequence from a wild-type CRISPR-Cas locus may be determined through established algorithms, such as using the CRISPRfinder offered through CRISPRdb (see, Grissa et al. Nucleic Acids Res. 35 (Web Server issue): W52-7). In some embodiments, a repeat sequence or portion thereof is linked at its 3′ end to the 5′ end of a spacer sequence, thereby forming a repeat-spacer sequence (e.g., guide nucleic acid, guide RNA/DNA, crRNA, crDNA).

[0155] In some embodiments, a repeat sequence comprises, consists essentially of, or consists of at least 10 nucleotides depending on the particular repeat and whether the guide nucleic acid comprising the repeat is processed or unprocessed (e.g., about 10, 11, 12, 13, 14, 15, 16, 17, 18, 19, 20, 21, 22, 23, 24, 25, 26, 27, 28, 29, 30, 31, 32, 33, 34, 35, 36, 37, 38, 39, 40, 41, 42, 43, 44, 45, 46, 47, 48, 49, 50 to 100 or more nucleotides, or any range or value therein; e.g., about). In some embodiments, a repeat sequence comprises, consists essentially of, or consists of about 10 to about 20, about 10 to about 30, about 10 to about 45, about 10 to about 50, about 15 to about 30, about 15 to about 40, about 15 to about 45, about 15 to about 50, about 20 to about 30, about 20 to about 40, about 20 to about 50, about 30 to about 40, about 40 to about 80, about 50 to about 100 or more nucleotides.

[0156] A repeat sequence linked to the 5′ end of a spacer sequence can comprise a portion of a repeat sequence (e.g., 5, 6, 7, 8, 9, 10, 11, 12, 13, 14, 15, 16, 17, 18, 19, 20, 21, 22, 23, 24, 25, 26, 27, 28, 29, 30, 31, 32, 33, 34, 35 or more contiguous nucleotides of a wild-type repeat sequence). In some embodiments, a portion of a repeat sequence linked to the 5′ end of a spacer sequence can be about five to about ten consecutive nucleotides in length (e.g., about 5, 6, 7, 8, 9, 10 nucleotides) and have at least 90% sequence identity (e.g., at least about 90%, 91%, 92%, 93%, 94%, 95%, 96%, 97%, 98%, 99%, or more) to the same region (e.g., 5′ end) of a wild-type CRISPR Cas repeat nucleotide sequence. In some embodiments, a portion of a repeat sequence may comprise a pseudoknot-like structure at its 5′ end (e.g., “handle”).

[0157] A “spacer sequence” as used herein is a nucleotide sequence that is complementary to a target nucleic acid (e.g., target DNA) (e.g., protospacer). The spacer sequence can be fully complementary or substantially complementary (e.g., at least about 70% complementary (e.g., about 70%, 71%, 72%, 73%, 74%, 75%, 76%, 77%, 78%, 79%, 80%, 81%, 82%, 83%, 84%, 85%, 86%, 87%, 88%, 89%, 90%, 91%, 92%, 93%, 94%, 95%, 96%, 97%, 98%, 99%, or more)) to a target nucleic acid. Thus, in some embodiments, the spacer sequence can have one, two, three, four, or five mismatches as compared to the target nucleic acid, which mismatches can be contiguous or noncontiguous. In some embodiments, the spacer sequence can have 70% complementarity to a target nucleic acid. In other embodiments, the spacer nucleotide sequence can have 80% complementarity to a target nucleic acid. In still other embodiments, the spacer nucleotide sequence can have 85%, 90%, 95%, 96%, 97%, 98%, 99% or 99.5% complementarity, and the like, to the target nucleic acid (protospacer). In some embodiments, the spacer sequence is 100% complementary to the target nucleic acid. A spacer sequence may have a length from about 15 nucleotides to about 30 nucleotides (e.g., 15, 16, 17, 18, 19, 20, 21, 22, 23, 24, 25, 26, 27, 28, 29, or 30 nucleotides, or any range or value therein). In some embodiments, a spacer sequence may have complete complementarity or substantial complementarity over a region of a target nucleic acid (e.g., protospacer) that is at least about 15 nucleotides to about 30 nucleotides in length. In some embodiments, the spacer is about 20 nucleotides in length. In some embodiments, the spacer is about 21, 22, or 23 nucleotides in length. The numbering and/or positioning of nucleotides in a spacer sequence starts at the first nucleotide at the 5′ end of the spacer sequence (i.e., nucleotide 1) and is consecutively numbered to the last nucleotide at the 3′ end of the spacer sequence. Thus, a spacer having a length of 30 nucleotides has nucleotide 1 up to nucleotide 30 in the 5′ to 3′ direction.

[0158] In some embodiments, the 5′ region of a spacer sequence of a guide nucleic acid may be fully complementary to a target nucleic acid, while the 3′ region of the spacer may be substantially complementary to the target nucleic acid (such as for a spacer in a Type V CRISPR-Cas system), or the 3′ region of a spacer sequence of a guide nucleic acid may be fully complementary to a target nucleic acid, while the 5′ region of the spacer may be substantially complementary to the target nucleic acid (such as for a spacer in a Type II CRISPR-Cas system), and therefore, the overall complementarity of the spacer sequence to the target nucleic acid may be less than 100%. Thus, for example, in a guide nucleic acid for a Type V CRISPR-Cas system, the first 1, 2, 3, 4, 5, 6, 7, 8, 9, 10 nucleotides in the 5′ region (i.e., seed region) of, for example, a 20 nucleotide spacer sequence may be 100% complementary to the target nucleic acid, while the remaining nucleotides in the 3′ region of the spacer sequence are substantially complementary (e.g., at least about 70% complementary) to the target nucleic acid. In some embodiments, the first 1 to 8 nucleotides (e.g., the first 1, 2, 3, 4, 5, 6, 7, 8, nucleotides, and any range therein) of the 5′ end of the spacer sequence may be 100% complementary to the target nucleic acid, while the remaining nucleotides in the 3′ region of the spacer sequence are substantially complementary (e.g., at least about 50% complementary (e.g., 50%, 55%, 60%, 65%, 70%, 71%, 72%, 73%, 74%, 75%, 76%, 77%, 78%, 79%, 80%, 81%, 82%, 83%, 84%, 85%, 86%, 87%, 88%, 89%, 90%, 91%, 92%, 93%, 94%, 95%, 96%, 97%, 98%, 99%, or more)) to the target nucleic acid.

[0159] As a further example, in a guide nucleic acid for a Type II CRISPR-Cas system, the first 1, 2, 3, 4, 5, 6, 7, 8, 9, 10 nucleotides in the 3′ region (i.e., seed region) of, for example, a 20 nucleotide spacer sequence may be 100% complementary to the target nucleic acid, while the remaining nucleotides in the 5′ region of the spacer sequence are substantially complementary (e.g., at least about 70% complementary) to the target nucleic acid. In some embodiments, the first 1 to 10 nucleotides (e.g., the first 1, 2, 3, 4, 5, 6, 7, 8, 9, 10 nucleotides, and any range therein) of the 3′ end of the spacer sequence may be 100% complementary to the target nucleic acid, while the remaining nucleotides in the 5′ region of the spacer sequence are substantially complementary (e.g., at least about 50% complementary (e.g., at least about 50%, 55%, 60%, 65%, 70%, 71%, 72%, 73%, 74%, 75%, 76%, 77%, 78%, 79%, 80%, 81%, 82%, 83%, 84%, 85%, 86%, 87%, 88%, 89%, 90%, 91%, 92%, 93%, 94%, 95%, 96%, 97%, 98%, 99%, or more or any range or value therein)) to the target nucleic acid. A recruiting guide RNA further comprises one or more recruiting motifs as described herein, which may be linked to the 5′ end of the guide or the 3′ end or it may be inserted into the recruiting guide nucleic acid (e.g., within the hairpin loop).

[0160] In some embodiments, a seed region of a spacer may be about 8 to about 10 nucleotides in length, about 5 to about 6 nucleotides in length, or about 6 nucleotides in length.

[0161] In some embodiments, a guide nucleic acid further comprises a reverse transcriptase template and may be referred to as an extended guide nucleic acid.

[0162] A guide nucleic acid and/or an extended guide nucleic acid may comprise one or more recruiting motifs as described herein, which may be linked to the 5′ end and/or the 3′ end of the guide nucleic acid and/or it may be inserted into the guide nucleic acid (e.g., within a hairpin loop of the guide nucleic acid).

[0163] A “target nucleic acid”, “target DNA,” “target nucleotide sequence,” “target region,” and “target region in the genome” are used interchangeably herein and refer to a region of an organism's (e.g., a plant's) genome that comprises a sequence that is fully complementary (100% complementary) or substantially complementary (e.g., at least 70% complementary (e.g., 70%, 71%, 72%, 73%, 74%, 75%, 76%, 77%, 78%, 79%, 80%, 81%, 82%, 83%, 84%, 85%, 86%, 87%, 88%, 89%, 90%, 91%, 92%, 93%, 94%, 95%, 96%, 97%, 98%, 99%, or more)) to a spacer sequence in a guide nucleic acid as defined herein. A target nucleic acid is targeted by an editing system (or a component thereof) as described herein. A target region useful for a CRISPR-Cas system may be located immediately 3′ (e.g., Type V CRISPR-Cas system) or immediately 5′ (e.g., Type II CRISPR-Cas system) to a PAM sequence in the genome of the organism (e.g., a plant genome or mammalian (e.g., human) genome). A target region may be selected from any region of at least 15 consecutive nucleotides (e.g., 16, 17, 18, 19, 20, 21, 22, 23, 24, 25, 26, 27, 28, 29, 30 nucleotides, and the like) located immediately adjacent to a PAM sequence.

[0164] A “protospacer sequence” or “protospacer” as used herein refer to a sequence that is fully or substantially complementary to (and can hybridize to) a spacer sequence of a guide nucleic acid. In some embodiments, the protospacer is all or a portion of a target nucleic acid as defined herein that is fully or substantially complementary (and hybridizes) to the spacer sequence of the CRISPR repeat-spacer sequences (e.g., guide nucleic acids, CRISPR arrays, crRNAs).

[0165] In the case of Type V CRISPR-Cas (e.g., Cas12a) systems and Type II CRISPR-Cas (Cas9) systems, the protospacer sequence is flanked by (e.g., immediately adjacent to) a protospacer adjacent motif (PAM). For Type V CRISPR-Cas systems, the PAM is located at the 5′ end on the non-target strand and at the 3′ end of the target strand (see below, as an example).

```
    5′-NNNNNNNNNNNNNNNNNNN-3′ RNA Spacer
            ||||||||||||||||||
3′AAANNNNNNNNNNNNNNNNNNN-5′ Target strand
    ||||
5′TTTNNNNNNNNNNNNNNNNNNN-3′ Non-target strand
```

[0166] In the case of Type II CRISPR-Cas (e.g., Cas9) systems, the PAM is located immediately 3′ of the target region. The PAM for Type I CRISPR-Cas systems is located 5′ of the target strand. There is no known PAM for Type III CRISPR-Cas systems. Makarova et al. describes the nomenclature for all the classes, types and subtypes of CRISPR systems (Nature Reviews Microbiology 13:722-736 (2015)). Guide structures and PAMs are described by R. Barrangou (Genome Biol. 16:247 (2015)).

[0167] Canonical Cas12a PAMs are T rich. In some embodiments, a canonical Cas12a PAM sequence may be 5′-TTN, 5′-TTTN, or 5′-TTTV. In some embodiments, canonical Cas9 (e.g., S. pyogenes) PAMs may be 5′-NGG-3′. In some embodiments, non-canonical PAMs may be used but may be less efficient. In some embodiments, non-canonical PAM sequences may include, but are not limited to, 5′-CCCC-3′ or 5′-TCCG-3′.

[0168] Additional PAM sequences may be determined by those skilled in the art through established experimental and computational approaches. Thus, for example, experimental approaches include targeting a sequence flanked by all possible nucleotide sequences and identifying sequence members that do not undergo targeting, such as through the transformation of target plasmid DNA (Esvelt et al. 2013. Nat. Methods 10:1116-1121; Jiang et al. 2013. Nat. Biotechnol. 31:233-239). In some aspects, a computational approach can include performing BLAST searches of natural spacers to identify the original target DNA sequences in bacteriophages or plasmids and aligning these sequences to determine conserved sequences adjacent to the target sequence (Briner and Barrangou. 2014. Appl. Environ. Microbiol. 80:994-1001; Mojica et al. 2009. Microbiology 155:733-740).

[0169] In some embodiments, the present invention provides expression cassettes and/or vectors comprising the nucleic acid constructs of the invention (e.g., one or more components of an editing system of the invention). In some embodiments, expression cassettes and/or vectors comprising the nucleic acid constructs of the invention and/or one or more guide nucleic acids may be provided. In some embodiments, a nucleic acid construct of the invention encodes a polypeptide of the present invention and/or a CRISPR-Cas effector protein, and each may be comprised on the same or on a separate expression cassette or vector from that comprising the one or more guide nucleic acids. When the nucleic acid construct encoding a polypeptide of the present invention or the components of an editing system is/are comprised on separate expression cassette(s) or vector(s) from that comprising the guide nucleic acid, a target nucleic acid may be contacted with (e.g., provided with) the expression cassette(s) or vector(s) encoding the polypeptide of the present invention or components of an editing system in any order from one another and the guide nucleic acid, e.g., prior to, concurrently with, or after the expression cassette comprising the guide nucleic acid is provided (e.g., contacted with the target nucleic acid).

[0170] Methods of recruiting one or more components of an editing system to each other and/or to a target nucleic acid are known in the art and may include the use of a peptide tag or an affinity polypeptide that interacts with the peptide tag. In some embodiments, a guide nucleic acid may be linked to an RNA recruiting motif and a polypeptide of the present invention may be linked to an affinity polypeptide capable of interacting with the RNA recruiting motif, thereby recruiting the polypeptide of the invention to the target nucleic acid. Alternatively, chemical interactions may be used to recruit a polypeptide (e.g., a polypeptide of the invention) to a target nucleic acid.

[0171] A “recruiting motif” as used herein refers to one half of a binding pair that may be used to recruit a compound to which the recruiting motif is bound to another compound that includes the other half of the binding pair (i.e., a “corresponding motif”). The recruiting motif and corresponding motif may bind noncovalently. In some embodiments, a recruiting motif is an RNA recruiting motif (e.g., an RNA recruiting motif that is capable of binding and/or configured to bind to an affinity polypeptide), an affinity polypeptide (e.g., an affinity polypeptide that is capable of binding and/or configured to bind an RNA recruiting motif and/or a peptide tag), or a peptide tag (e.g., a peptide tag that is capable of binding and/or configured to bind an affinity polypeptide). For example, when a recruiting motif is an RNA recruiting motif, the corresponding motif for the RNA recruiting motif may be an affinity polypeptide that binds the RNA recruiting motif. A further example is that when a recruiting motif is a peptide tag, the corresponding motif for the peptide tag may be an affinity polypeptide that binds the peptide tag. Thus, a compound comprising a recruiting motif (e.g., an affinity polypeptide) may be recruited to another compound (e.g., a guide nucleic acid) comprising a corresponding motif for the recruiting motif (e.g., an RNA recruiting motif).

[0172] A peptide tag (e.g., epitope) useful with this invention may include, but is not limited to, a GCN4 peptide tag (e.g., Sun-Tag), a c-Myc affinity tag, an HA affinity tag, a His affinity tag, an S affinity tag, a methionine-His affinity tag, an RGD-His affinity tag, a FLAG octapeptide, a strep tag or strep tag II, a V5 tag, and/or a VSV-G epitope. Any epitope that may be linked to a polypeptide and for which there is a corresponding affinity polypeptide that may be linked to another polypeptide may be used with this invention as a peptide tag. In some embodiments, a peptide tag may comprise 1 or 2 or more copies of a peptide tag (e.g., repeat unit, multimerized epitope (e.g., tandem repeats)) (e.g., 1, 2, 3, 4, 5, 6, 7, 8, 9, 10, 11, 12, 13, 14, 15, 16, 17, 18, 19, 20, 21, 22, 23, 24, 25 or more repeat units. In some embodiments, an affinity polypeptide that interacts with/binds to a peptide tag may be an antibody. In some embodiments, the antibody may be a scFv antibody. In some embodiments, an affinity polypeptide that binds to a peptide tag may be synthetic (e.g., evolved for affinity interaction) including, but not limited to, an affibody, an anticalin, a monobody and/or a DARPin (see, e.g., Sha et al., Protein Sci. 26 (5): 910-924 (2017)); Gilbreth (Curr Opin Struc Biol 22 (4): 413-420 (2013)), U.S. Pat. No. 9,982,053, each of which are incorporated by reference in their entireties for the teachings relevant to affibodies, anticalins, monobodies and/or DARPins.

[0173] In some embodiments, a guide nucleic acid may be linked to an RNA recruiting motif, and a polypeptide to be recruited (e.g., a polypeptide of the present invention) may be fused to an affinity polypeptide that binds to the RNA recruiting motif, wherein the guide binds to the target nucleic acid and the RNA recruiting motif binds to the affinity polypeptide, thereby recruiting the polypeptide to the guide and contacting the target nucleic acid with the polypeptide (e.g., a polypeptide of the present invention). In some embodiments, two or more polypeptides may be recruited to a guide nucleic acid, thereby contacting the target nucleic acid with two or more polypeptides (e.g., one or more polypeptide(s) of the present invention).

[0174] In some embodiments of the invention, a guide RNA may be linked to one or to two or more RNA recruiting motifs (e.g., 1, 2, 3, 4, 5, 6, 7, 8, 9, 10 or more motifs; e.g., at least 10 to about 25 motifs), optionally wherein the two or more RNA recruiting motifs may be the same RNA recruiting motif or different RNA recruiting motifs. In some embodiments, an RNA recruiting motif and corresponding affinity polypeptide may include, but is not limited, to a telomerase Ku binding motif (e.g., Ku binding hairpin) and the corresponding affinity polypeptide Ku (e.g., Ku heterodimer), a telomerase Sm7 binding motif and the corresponding affinity polypeptide Sm7, an MS2 phage operator stem-loop and the corresponding affinity polypeptide MS2 Coat Protein (MCP), a PP7 phage operator stem-loop and the corresponding affinity polypeptide PP7 Coat Protein (PCP), an SfMu phage Com stem-loop and the corresponding affinity polypeptide Com RNA binding protein, a PUF binding site (PBS) and the affinity polypeptide Pumilio/fem-3 mRNA binding factor (PUF), and/or a synthetic RNA-aptamer and the aptamer ligand as the corresponding affinity polypeptide. In some embodiments, the RNA recruiting motif and corresponding affinity polypeptide may be an MS2 phage operator stem-loop and the affinity polypeptide MS2 Coat Protein (MCP). In some embodiments, the RNA recruiting motif and corresponding affinity polypeptide may be a PUF binding site (PBS) and the affinity polypeptide Pumilio/fem-3 mRNA binding factor (PUF). Exemplary RNA recruiting motifs and corresponding affinity polypeptides that may be useful with this invention can include, but are not limited to, SEQ ID NOs: 220-230.

[0175] In some embodiments, the components for recruiting polypeptides and nucleic acids may include those that function through chemical interactions that may include, but are not limited to, rapamycin-inducible dimerization of FRB-FKBP; Biotin-streptavidin; SNAP tag; Halo tag; CLIP tag; DmrA-DmrC heterodimer induced by a compound; bifunctional ligand (e.g., chemically induced dimerization).

[0176] As described herein, a “peptide tag” may be employed to recruit one or more polypeptides. A peptide tag may be any polypeptide that is capable of being bound by a corresponding motif such as an affinity polypeptide. A peptide tag may also be referred to as an “epitope” and when provided in multiple copies, a “multimerized epitope.” Example peptide tags can include, but are not limited to, a GCN4 peptide tag (e.g., Sun-Tag), a c-Myc affinity tag, an HA affinity tag, a His affinity tag, an S affinity tag, a methionine-His affinity tag, an RGD-His affinity tag, a FLAG octapeptide, a strep tag or strep tag II, a V5 tag, and/or a VSV-G epitope. In some embodiments, a peptide tag may also include phosphorylated tyrosines in specific sequence contexts recognized by SH2 domains, characteristic consensus sequences containing phosphoserines recognized by 14-3-3 proteins, proline rich peptide motifs recognized by SH3 domains, PDZ protein interaction domains or the PDZ signal sequences, and an AGO hook motif from plants. Peptide tags are disclosed in WO2018/136783 and U.S. Patent Application Publication No. 2017/0219596, which are incorporated by reference for their disclosures of peptide tags. Peptide tags that may be useful with this invention can include, but are not limited to, SEQ ID NO:231 and SEQ ID NO:232. An affinity polypeptide useful with peptide tags includes, but is not limited to, SEQ ID NO:233.

[0177] A peptide tag may comprise or be present in one copy or in 2 or more copies of the peptide tag (e.g., multimerized peptide tag or multimerized epitope) (e.g., about 2, 3, 4, 5, 6, 7, 8, 9, 10, 11, 12, 13, 14, 15, 16, 17, 18, 9, 20, 21, 22, 23, 24, or 25 or more peptide tags). When multimerized, the peptide tags may be fused directly to one another or they may be linked to one another via one or more amino acids (e.g., 1, 2, 3, 4, 5, 6, 7, 8, 9, 10, 11, 12, 13, 14, 15, 16, 17, 18, 19, 20 or more amino acids, optionally about 3 to about 10, about 4 to about 10, about 5 to about 10, about 5 to about 15, or about 5 to about 20 amino acids, and the like, and any value or range therein. Thus, in some embodiments, a CRISPR-Cas effector protein and/or polypeptide of the invention may be fused to one peptide tag or to two or more peptide tags, optionally wherein the two or more peptide tags are fused to one another via one or more amino acid residues. In some embodiments, a peptide tag useful with the invention may be a single copy of a GCN4 peptide tag or epitope or may be a multimerized GCN4 epitope comprising about 2 to about 25 or more copies of the peptide tag (e.g., about 2, 3, 4, 5, 6, 7, 8, 9, 10, 11, 12, 13, 14, 15, 16, 17, 18, 19, 20, 21, 22, 23, 24, 25 or more copies of a GCN4 epitope or any range therein).

[0178] In some embodiments, a peptide tag may be fused to a CRISPR-Cas polypeptide or domain. In some embodiments, a peptide tag may be fused or linked to the C-terminus of a CRISPR-Cas effector protein to form a CRISPR-Cas fusion protein. In some embodiments, a peptide tag may be fused or linked to the N-terminus of a CRISPR-Cas effector protein to form a CRISPR-Cas fusion protein. In some embodiments, a peptide tag may be fused within a CRISPR-Cas effector protein (e.g., a peptide tag may be in a loop region of a CRISPR-Cas effector protein). In some embodiments, peptide tag may be fused to or a polypeptide of the present invention.

[0179] An “affinity polypeptide” (e.g., “recruiting polypeptide”) refers to any polypeptide that is capable of binding to its corresponding peptide tag, peptide tag, or RNA recruiting motif. An affinity polypeptide for a peptide tag may be, for example, an antibody and/or a single chain antibody that specifically binds the peptide tag, respectively. In some embodiments, an antibody for a peptide tag may be, but is not limited to, an scFv antibody. In some embodiments, an affinity polypeptide may be fused or linked to the N-terminus of a polypeptide 25 of the present invention. In some embodiments, the affinity polypeptide is stable under the reducing conditions of a cell or cellular extract.

[0180] The nucleic acid constructs of the invention and/or guide nucleic acids may be comprised in one or more expression cassettes as described herein. In some embodiments, a nucleic acid construct of the invention may be comprised in the same or in a separate expression cassette or vector from that comprising a guide nucleic acid and/or an extended guide nucleic acid.

[0181] In some embodiments, a nucleic acid construct, expression cassette, or vector of the invention that is optimized for expression in an organism (e.g., a human or plant) may be about 70% to 100% identical (e.g., about 70%, 71%, 72%, 73%, 74%, 75%, 76%, 77%, 78%, 79%, 80%, 81%, 82%, 83%, 84%, 85%, 86%, 87%, 88%, 89%, 90%, 91%, 92%, 93%, 94%, 95%, 96%, 97%, 98%, 99%, 99.5% or 100%) to a nucleic acid construct, expression cassette or vector comprising the same polynucleotide(s) but which have not been codon optimized for expression in the organism.

[0182] When used in combination with a guide nucleic acid, a nucleic acid construct of the invention (and expression cassette and/or vector comprising the same) may be used to modify a target nucleic acid and/or its expression. A target nucleic acid may be contacted with a nucleic acid construct of the invention and/or expression cassettes and/or vectors comprising the same prior to, concurrently with or after contacting the target nucleic acid with the guide nucleic acid/recruiting guide nucleic acid (and/or expression cassettes and vectors comprising the same.

[0183] According to embodiments of the present invention, provided herein are polypeptides comprising a circular permutant. A circular permutant of the present invention is a circular permutant of a Cas 12a or an engineered protein that comprises a Cas 12a polypeptide. “Circular permutant” as used herein refers to an altered polypeptide compared to an original polypeptide (e.g., an initial polypeptide, reference polypeptide, and/or control polypeptide), wherein the order of the amino acid residues in the altered polypeptide is different than the order of the amino acid residues in the original polypeptide and the altered polypeptide has the N-terminal amino acid residue and the C-terminal amino acid residue of the original polypeptide covalently linked together (directly or indirectly). The altered polypeptide can thus have a new N-terminal end and a new C-terminal end compared to the N-terminal end and C-terminal end, respectively, of the original polypeptide. Accordingly, the circular permutant has a different sequence than the original polypeptide. An “altered polypeptide” as used herein refers to a polypeptide that comprises a non-natural mutation compared to another polypeptide (e.g., an original polypeptide). For example, an altered polypeptide may be a circular permutant and the non-natural mutation is the covalent linkage of the N- and C-termini of an original polypeptide and/or the formation of new N- and C-termini compared to the N- and C-termini, respectively, of an original polypeptide. “N-terminus” and “N-terminal amino acid residue” as used herein refer to the amino acid residue at the start of a polypeptide (i.e., amino acid residue 1) that has a free amino group (e.g., an amine or ammonium cation). “C-terminus” and “C-terminal amino acid residue” as used herein refer to the amino acid residue at the end of a polypeptide that has a free carboxylate group. “N-terminal end” as used herein refers to all or a portion of the amino acid residues starting at and including the N-terminus up to the middle of the polypeptide. “C-terminal end” as used herein refers to all or a portion of the amino acid residues starting at and including the C-terminus up to the middle of the polypeptide. Thus, for a polypeptide including 500 amino acid residues, the N-terminal end can include all or a portion of the sequence that starts at amino acid residue 1 (the N-terminus) to amino acid residue 250 and the C-terminal end can include all or a portion of the sequence that starts at amino acid residue 251 to amino acid residue 500 (the C-terminus). As another example, for a polypeptide including 223 amino acid residues, the N-terminal end can include all or a portion of the sequence that starts at amino acid residue 1 (the N-terminus) to amino acid residue 111 and the C-terminal end can include all or a portion of the sequence that starts at amino acid residue 113 to amino acid residue 223 (the C-terminus).

[0184] In general, a circular permutant may be conceptualized as having the N- and C-termini of a polypeptide (e.g., an original polypeptide) linked together and new N- and C-terminal ends that result from breaking a peptide bond in the polypeptide. For example, a circular permutant of the present invention may comprise fused N- and C-termini of a Cas12a or engineered protein that comprises a Cas 12a polypeptide with the circular permutant having new sequences at N- and C-terminal ends that are different than the sequences at the N- and C-terminal ends of the Cas12a or engineered protein and/or having a new N-terminal residue and/or new C-terminal residue compared to the N-terminal residue and/or new C-terminal residue, respectively, of the Cas12a or engineered protein as shown, for example, in FIG. 1A and FIG. 1B. A circular permutant of the present invention is derived and/or obtained from a Cas12a or is derived and/or obtained from an engineered protein that comprises a Cas12a polypeptide and/or may be a variant of a Cas12a or an engineered protein that comprises a Cas12a polypeptide. “Variant” as used herein in reference to a circular permutant of the present invention being a variant of a referenced polypeptide means that the circular permutant has the N- and C-termini of the referenced polypeptide (e.g., an original polypeptide such as a Cas12a or an engineered protein that comprises a Cas12a polypeptide) covalently linked (e.g., directly or indirectly) and the N- and C-termini of the circular permutant can be provided by breaking a peptide bond in the sequence of the referenced polypeptide. In some embodiments, a circular permutant of the present invention is a variant of a Cas12a or an engineered protein that comprises a Cas 12a polypeptide (e.g., a variant of at least one of SEQ ID NOs: 39-65, 69-132, 159-182, 281-284, 298, 400-401, 741, 761, and 850-861) and the circular permutant has one or more (e.g., 1, 2, 3, 4, 5, or more) mutation(s) compared to the Cas12a or the engineered protein of which it is a variant. For example, a circular permutant of the present invention may be a variant of a Cas12a and the circular permutant may include a mutation in the nuclease active site (e.g., in a RuvC site) that is not present in the Cas12a. In some embodiments, a circular permutant of the present may have a sequence that, when reordered to have the same N- and C-termini as a referenced polypeptide of which the circular permutant is a variant, has at least 90%, 91%, 92%, 93%, 94%, 95%, 96%, 97%, 98%, 99%, or 100% sequence identity to the sequence of the referenced polypeptide.

[0185] An “engineered protein that comprises a Cas12a polypeptide” as used herein refers to a polypeptide that comprises (i) a Cas 12a polypeptide and/or domain and (ii) a polypeptide that is heterologous to the Cas12a polypeptide and/or domain. The Cas12a polypeptide and/or domain may be a portion of a Cas12a (e.g., a wild-type Cas12a or inactivated Cas12a). For example, an engineered protein that comprises a Cas12a polypeptide may comprise a portion of any one of SEQ ID NOs: 39-65, 298, and 850-852 and another polypeptide that is heterologous to the Cas12a polypeptide. An engineered protein that comprises a Cas12a polypeptide may comprise at least one non-natural mutation compared to a Cas12a (e.g., a wild-type Cas12a or inactivated Cas12a). In some embodiments, an engineered protein that comprises a Cas12a polypeptide has a similar structure and/or function compared to a Cas12a and/or comprises all or a portion of a Cas12a (e.g., a wild-type Cas12a or inactivated Cas12a). An engineered protein that comprises a Cas12a polypeptide is not found in nature (e.g., comprises a non-natural mutation) and may be altered (e.g., mutated) compared to a wild-type Cas12a or inactivated Cas12a. In some embodiments, an engineered protein that comprises a Cas12a polypeptide is devoid of a portion of a Cas12a.

[0186] In some embodiments, an engineered protein that comprises a Cas12a polypeptide comprises a domain that is not present in a Cas12a. In some embodiments, an engineered protein that comprises a Cas12a polypeptide comprises all or a portion of a wedge domain, a Rec1 domain, a Rec2 domain, a PAM-interacting domain, a RuvC domain, a bridge helix, and/or a Nuc domain each of which may be from a Cas12a and/or a protein having a sequence of any one of SEQ ID NOs: 39-65, 298, and 850-852. In some embodiments, an engineered protein that comprises a Cas12a polypeptide comprises all or a portion of a Cas12a domain having a structure as described in Yamano, Takashi, et al., Mol Cell 67:633-645 (2017). In some embodiments, an engineered protein that comprises a Cas 12a polypeptide comprises all or a portion of an alpha-helical recognition (REC) lobe, optionally wherein the domains of all or a portion of the REC lobe in the engineered protein may be in a different order and/or structure than in a Cas12a. A REC lobe may contain a Rec1 domain and Rec2 domain. A Rec1 domain may comprise 13 alpha helices and/or a Rec2 domain may comprise 10 alpha helices and two beta strands that may form a small antiparallel sheet. In some embodiments, an engineered protein that comprises a Cas12a polypeptide may comprise an HNH domain (e.g., an HNH domain of a Cas9, optionally Cas9 having a sequence of any one of SEQ ID NOs: 133-140 and 156-157) between a first polypeptide comprising all or a portion of a Rec1 domain and a second polypeptide comprising all or a portion of a Rec2 domain, wherein first and second polypeptides may each independently be from a Cas12a and/or a protein having a sequence of any one of SEQ ID NOs: 39-65, 298, and 850-852. In some embodiments, an engineered protein that comprises a Cas12a polypeptide comprises all or a portion of a RuvC domain.

[0187] In some embodiments, an engineered protein that comprises a Cas12a polypeptide may comprise an HNH domain (e.g., an HNH domain of a Cas9, optionally Cas9 having a sequence of any one of SEQ ID NOs: 133-140 and 156-157) between a first polypeptide comprising all or a portion of a Rec1 domain and a second polypeptide comprising all or a portion of a Rec2 domain, wherein first and second polypeptides may each independently be from a Cas12a and/or a protein having a sequence of any one of SEQ ID NOs: 39-65, 298, and 850-852, and the engineered protein may comprise all or a portion of a RuvC domain. In some embodiments, an engineered protein that comprises a Cas12a polypeptide may be an engineered protein as described in U.S. Patent Application Publication No. 2002/0112473 and/or PCT/US2023/063398. As one of skill in the art would understand, some domains (e.g., the wedge and RuvC domains of Cas12a) are not continuous in sequence and may be split into two or more (e.g., 2, 3, 4, or more)non-continuous sequences. In some embodiments, an engineered protein that comprises a Cas12a polypeptide comprises a Cas12a domain.

[0188] In some embodiments, an engineered protein that comprises a Cas12a polypeptide comprises, optionally in the N- to C-terminus direction, all or a portion of one or more of the following: first portion of the wedge domain (WED-1), Rec1 domain, Rec2 domain, second portion of the wedge domain (WED-2), PAM-interacting domain (PI), third portion of the wedge domain (WED-3), first portion of the RuvC domain (RuvC-1), bridge helix, second portion of the RuvC domain (RuvC-2), Nuc domain, and/or third portion of the RuvC domain (RuvC-3). For example, based on SEQ ID NO:246, an engineered protein that comprises a Cas12a polypeptide may be encoded by all or a portion of one or more of the following: nucleotides 1-69 making up WED-1, nucleotides 70-1,560 making up the REC lobe, nucleotides 1,561-1,755 making up WED-2, nucleotides 1,756-2,031 making up PI, nucleotides 2,032-2,421 WED-3, nucleotides 2,422-2,613 making up RuvC-1, nucleotides 2,614-2,667 making up the bridge helix, nucleotides 2,668-2,988 making up RuvC-2, nucleotides 2,989-3,534 making up Nuc domain, and/or nucleotides 3,535-3,681 making up RuvC-3. As another example, based on SEQ ID NO:56, an engineered protein that comprises a Cas12a polypeptide may comprise, optionally in the N- to C-terminus direction, all or a portion of one or more of the following: amino acid residues 1-23 making up WED-1, amino acid residues 24-520 making up the REC lobe, amino acid residues 521-585 making up WED-2, amino acid residues 586-677 making up PI, amino acid residues 678-807 WED-3, amino acid residues 808-871 making up RuvC-1, amino acid residues 872-889 making up the bridge helix, amino acid residues 890-996 making up RuvC-2, amino acid residues 997-1,178 making up Nuc domain, and/or amino acid residues 1,179-1,227 making up RuvC-3. In some embodiments, an engineered protein that comprises a Cas12a polypeptide comprises all or a portion of an active RuvC domain. In some embodiments, an engineered protein that comprises a Cas 12a polypeptide comprises all or a portion of an inactivated RuvC domain, optionally all or a portion of an inactivated RuvC domain that has a D10A mutation. In some embodiments, an engineered protein that comprises a Cas12a polypeptide comprises all or a portion of an inactivated RuvC domain and has an alanine at a position corresponding to amino acid residue 831 of SEQ ID NO:59 when the engineered protein is optimally aligned to SEQ ID NO:59, optionally wherein the mutation is referred to as a D10A and/or D832A mutation. In some embodiments, an engineered protein that comprises a Cas12a polypeptide comprises a polypeptide that comprises all or a portion of an inactivated RuvC domain and has a mutation of: D832A and/or E925A with reference to position numbering of SEQ ID NO:44, 45, 55, 56, and/or 59 (LbCas12a), D908A and/or E993A with reference to position numbering of SEQ ID NO: 39 (AsCas12a), D917A and/or E1006A with reference to position numbering of SEQ ID NO: 43 and/or 58 (FnCas12a), or a mutation corresponding thereto. In some embodiments, an engineered protein that comprises a Cas 12a polypeptide has an amino acid sequence having at least 70%, 75%, 80%, 85%, 90%, 95%, 96%, 97%, 98%, 99%, or more sequence identity to one or more of SEQ ID NOs: 69-132, 159-182, 281-284, 400-401, 761, and 853-861. In some embodiments, an engineered protein that comprises a Cas 12a polypeptide is a target strand nickase and/or a non-target strand nickase. In some embodiments, an engineered protein that comprises a Cas12a polypeptide is a non-target strand nickase.

[0189] A circular permutant of the present invention has an amino acid sequence in a different order compared to the amino acid sequence of a Cas12a or compared to the amino acid sequence of an engineered protein that comprises a Cas 12a polypeptide. For example, referring now to FIG. 1A and FIG. 1B, a Cas 12a may have a sequence in which its domains are ordered as shown in FIG. 1A, and a circular permutant of the present invention may have one or more domain(s) in a different location as shown in FIG. 1B compared to the location in Cas12a as shown in FIG. 1A. Alpha, Beta, Gamma, Delta, Epsilon, and Zeta as shown in FIG. 1B are each examples of circular permutants of the present invention. In some embodiments, in a circular permutant of the present invention, the WED-1 domain of a Cas12a or an engineered protein that comprises a Cas12a polypeptide may not be located at the N-terminus and/or N-terminal end. In some embodiments, in a circular permutant of the present invention, all or a portion of the WED-1 domain of a Cas12a or an engineered protein that comprises a Cas12a polypeptide may be located at the C-terminal end of the circular permutant. In some embodiments, in a circular permutant of the present invention, all or a portion of the REC lobe of a Cas12a or an engineered protein that comprises a Cas12a polypeptide may be located at the C-terminal end of the circular permutant. In some embodiments, in a circular permutant of the present invention, all or a portion of the Rec1 domain and/or all or a portion of the Rec2 domain of a Cas12a or an engineered protein that comprises a Cas12a polypeptide may be located at the C-terminal end of the circular permutant. In some embodiments, a circular permutant of the present invention may have all or a portion of a domain corresponding to a WED-1 domain, REC lobe, Rec1 domain, and/or Rec2 domain at its C-terminal end. In some embodiments, in a circular permutant of the present invention, all or a portion of the RuvC-3 domain of a Cas12a or an engineered protein that comprises a Cas12a polypeptide may be located at the N-terminal end of the circular permutant. In some embodiments, in a circular permutant of the present invention, all or a portion of the Nuc domain of a Cas12a or an engineered protein that comprises a Cas12a polypeptide may be located at the N-terminal end of the circular permutant. In some embodiments, a circular permutant of the present invention may have all or a portion of a domain corresponding to a RuvC-3 domain and/or a Nuc domain at its C-terminal end. In some embodiments, the N-terminus of a circular permutant of the present invention may be an amino acid residue that is in the REC lobe (e.g., in the Rec1 domain or Rec2 domain) of a Cas12a or an engineered protein that comprises a Cas12a polypeptide. For example, the N-terminus of a circular permutant of the present invention may be one of amino acid residues 24-520 of Cas12a having a sequence of SEQ ID NO:56 or a sequence optimally aligned thereto. In some embodiments, the N-terminus of a circular permutant of the present invention may be an amino acid residue that is in the Nuc domain of a Cas12a or an engineered protein that comprises a Cas12a polypeptide. For example, the N-terminus of a circular permutant of the present invention may be one of amino acid residues 997-1,178 of Cas12a having a sequence of SEQ ID NO:56 or a sequence optimally aligned thereto. In some embodiments, the N-terminus of a circular permutant of the present invention may be one of amino acid residues 50-100, 70-100, 80-90, 100-200, 110-140, 120-130, 700-800, 710-740, 720-730, 780-810, 790-800, 900-1000, 940-970, 1100-1200, 1140-1170, or 1150-1160 of Cas12a having a sequence of SEQ ID NO:56 or a sequence optimally aligned thereto. For example, the N-terminus of a circular permutant of the present invention may be amino acid residue 85, 292, 443, 517, 1118, or 1156 of Cas12a having a sequence of SEQ ID NO: 56 or a sequence optimally aligned thereto. In some embodiments, the N-terminus of a circular permutant of the present invention may be one of amino acid residues 50-1300 of Cas12a having a sequence of SEQ ID NO:298 or a sequence optimally aligned thereto. In some embodiments, the N-terminus of a circular permutant of the present invention may be one of amino acid residues 50-100, 70-100, 80-90, 85-95, 300-400, 315-325, 320-330, 400-500, 440-460, 455-465, 500-600, 520-530, 525-535, 1150-1250, 1205-1215, 1200-1300, or 1240-1250 of Cas12a having a sequence of SEQ ID NO:298 or a sequence optimally aligned thereto. For example, the N-terminus of a circular permutant of the present invention may be amino acid residue 88, 322, 457, 529, 1208, or 1245 of Cas 12a having a sequence of SEQ ID NO: 298 or a sequence optimally aligned thereto. In some embodiments, a circular permutant of the present invention is a circular permutant of any one of SEQ ID NOs: 39-65, 69-132, 159-182, 281-284, 298, 400-401, 741, 761, and 850-861 or is a circular permutant of a sequence have at least 70%, 75%, 80%, 85%, 90%, 95%, 96%, 97%, 98%, 99%, or more sequence identity to one of SEQ ID NOs: 39-65, 69-132, 159-182, 281-284, 298, 400-401, 741, 761, and 850-861.

[0190] In some embodiments, a circular permutant of the present invention is a protein or polypeptide that cleaves, cuts, or nicks a nucleic acid; binds a nucleic acid (e.g., a target nucleic acid and/or a guide nucleic acid); and/or that identifies, recognizes, or binds a guide nucleic acid as defined herein. In some embodiments, a circular permutant of the present invention may be an enzyme (e.g., a nuclease, endonuclease, nickase, etc.) and/or may function as an enzyme. In some embodiments, a circular permutant of the present invention is a nuclease and/or has at least one function and/or activity similar to a CRISPR-Cas nuclease (e.g., a Cas12a nuclease). In some embodiments, a circular permutant of the present invention comprises nuclease activity and/or nickase activity, comprises a nuclease domain whose nuclease activity and/or nickase activity has been reduced or eliminated, comprises single stranded DNA cleavage activity (ss DNase activity) or which has ss DNase activity that has been reduced or eliminated, and/or comprises self-processing RNase activity or which has self-processing RNase activity that has been reduced or eliminated. A circular permutant of the present invention may bind to a target nucleic acid. In some embodiments, a circular permutant of the present invention is a target strand nickase and/or a non-target strand nickase. In some embodiments, a circular permutant of the present invention is a non-target strand nickase.

[0191] In some embodiments, a circular permutant of the present invention is a circular permutant of a Cas12a (e.g., a Cas12a having at least 70%, 75%, 80%, 85%, 90%, 95%, 96%, 97%, 98%, 99%, or 100% sequence identity to one or more of SEQ ID NOs: 39-65, 298, and 850-852), wherein the Cas12a is a non-target strand nickase that may modify the non-target strand of a target nucleic acid, and the circular permutant of the Cas12a is a non-target strand nickase and/or modifies the non-target strand of a target nucleic acid. In some embodiments, a circular permutant of the present invention is a circular permutant of a Cas12a (e.g., a Cas12a having at least 70%, 75%, 80%, 85%, 90%, 95%, 96%, 97%, 98%, 99%, or 100% sequence identity to one or more of SEQ ID NOs: 39-65, 298, and 850-852), wherein the Cas12a is a non-target strand nickase that may modify the non-target strand of a target nucleic acid, and the circular permutant of the Cas 12a is a target strand nickase and/or modifies the target strand of a target nucleic acid and optionally the circular permutant of the Cas 12a may be a non-target strand nickase and/or may modify the non-target strand of a target nucleic acid. In some embodiments, a circular permutant of the present invention is a circular permutant of a Cas12a (e.g., a Cas12a having at least 70%, 75%, 80%, 85%, 90%, 95%, 96%, 97%, 98%, 99%, or 100% sequence identity to one or more of SEQ ID NOs: 39-65, 298, and 850-852), wherein the Cas12a is a non-target strand nickase that may modify the non-target strand of a target nucleic acid, and the circular permutant of the Cas12a modifies the target strand of a target nucleic acid and the circular permutant of the Cas 12a is a non-target strand nickase. In some embodiments, a circular permutant of the present invention is a circular permutant of a Cas12a (e.g., a Cas12a having at least 70%, 75%, 80%, 85%, 90%, 95%, 96%, 97%, 98%, 99%, or 100% sequence identity to one or more of SEQ ID NOs: 39-65, 298, and 850-852), wherein the Cas12a is a deactivated non-target strand nickase that may modify the non-target strand of a target nucleic acid, and the circular permutant of the deactivated Cas12a is a deactivated non-target strand nickase and/or modifies the non-target strand of a target nucleic acid. In some embodiments, a circular permutant of the present invention is a circular permutant of a Cas12a (e.g., a Cas12a having at least 70%, 75%, 80%, 85%, 90%, 95%, 96%, 97%, 98%, 99%, or 100% sequence identity to one or more of SEQ ID NOs: 39-65, 298, and 850-852), wherein the Cas12a is a deactivated non-target strand nickase that may modify the non-target strand of a target nucleic acid, and the circular permutant of the deactivated Cas12a is a deactivated target strand nickase and/or modifies the target strand of a target nucleic acid and optionally the circular permutant of the deactivated Cas12a may also be a deactivated non-target strand nickase and/or may modify the non-target strand of a target nucleic acid. In some embodiments, a circular permutant of the present invention is a circular permutant of a dead Cas12a, and the circular permutant of the dead Cas12a has no nuclease activity. In some embodiments, a circular permutant of the present invention is a circular permutant of a polypeptide (e.g., a polypeptide having at least 70%, 75%, 80%, 85%, 90%, 95%, 96%, 97%, 98%, 99%, or 100% sequence identity to one or more of SEQ ID NOs: 69-132, 159-182, 281-284, 400-401, 761, and 853-861), wherein the polypeptide is a target strand nickase and/or a non-target strand nickase that may modify the non-target strand and/or target strand of a target nucleic acid, and the circular permutant of the polypeptide is a target strand nickase and/or a non-target strand nickase that may modify the target and/or non-target strand of a target nucleic acid.

[0192] In some embodiments, a circular permutant of the present invention may comprise a mutation in its nuclease active site and/or nuclease domain (e.g., a RuvC, HNH, e.g., a RuvC site of a Cas12a nuclease domain; e.g., a RuvC site and/or HNH site of a Cas9 nuclease domain). A circular permutant of the present invention having a mutation in its nuclease active site and/or nuclease domain that causes the circular permutant to not have nuclease activity, is commonly referred to as “inactive” or “dead” circular permutant. In some embodiments, a circular permutant of the present invention having a mutation in its nuclease active site and/or nuclease domain may have impaired activity or reduced activity (e.g., nickase activity) as compared to the same circular permutant without the mutation and/or compared to a CRISPR-Cas effector protein without the mutation.

[0193] A circular permutant of the present invention may bind to a nucleic acid (e.g., may bind to a target nucleic acid). In some embodiments, a circular permutant of the present invention may bind a target nucleic acid and/or a guide nucleic acid. In some embodiments, a circular permutant of the present invention may be used to target a desired nucleic acid (e.g., a target nucleic acid) and/or to bring another component to a desired nucleic acid. In some embodiments, a circular permutant of the present invention has nuclease activity. Nuclease activity may be measured and/or tested using methods known in the art. In some embodiments, nuclease activity may be measured and/or tested by measuring the ability of a polypeptide (e.g., a circular permutant and/or enzyme) to make an insertion and/or deletion of one or more base(s) (e.g., INDELs) at one or more target nucleic acids (e.g., at about 3 to about 5 different target nucleic acids) in a cell such as HEK293T cells. In some embodiments, a polypeptide having a measurable insertion and/or deletion activity (e.g., INDEL activity) indicates that the polypeptide is expressed, folded, and/or performing one or more function(s) such as crRNA processing, nucleic acid binding (e.g., crRNA binding and/or DNA binding), and/or nuclease activity.

[0194] In some embodiments, a circular permutant of the present invention comprises a linker (e.g., a peptide linker) between two amino acid residues such as between two consecutive amino acid residues. When compared relative to the amino acid sequence of an original polypeptide (e.g., a Cas12a or an engineered protein that comprises a Cas 12a polypeptide) upon which the circular permutant is based, the linker may be between two non-consecutive amino acid residues of the original polypeptide. In some embodiments, for a linker that is between two amino acid residues of a circular permutant of the present invention, one of the two amino acid residues is at the N-terminal end of the original polypeptide and the other of the two amino acids is at the C-terminal end of the original polypeptide. In some embodiments, for a linker that is between two amino acid residues of a circular permutant of the present invention, one of the two amino acid residues is the N-terminal amino acid residue of the original polypeptide and the other of the two amino acids is the C-terminal amino acid residue of the original polypeptide. A linker present in a circular permutant of the present invention may have a length of about 1, 2, 3, 4, 5, 6, 7, 8, 9, 10, 11, 12, 13, 14, 15, 15, 16, 17, 18, 19, or 20 amino acid(s). In some embodiments, a linker present in a circular permutant of the present invention may have a length of about 1, 2, 3, 4, 5, 6, 7, 8, 9, or 10 amino acid(s) to about 11, 12, 13, 14, 15, 15, 16, 17, 18, 19, or 20 amino acid(s). In some embodiments, a linker present in a circular permutant of the present invention has a length of 10 amino acids or 16 amino acids. In some embodiments, a linker present in a circular permutant of the present invention is an amino acid linker that comprises glycine and/or serine. In some embodiments, a linker present in a circular permutant of the present invention has one of the amino acid sequences of SEQ ID NOs: 1-36, 313-314, 869-870, 883 and/or 885. In some embodiments, the peptide linker is encoded by a sequence of SEQ ID NO:311 or 312. In some embodiments, a linker present in a circular permutant of the present invention has a sequence of (GSS)ₙG (SEQ ID NO:36), (SGS)ₙ (SEQ ID NO: 869), or (SGGS)ₙ (SEQ ID NO:870) wherein n is an integer of 1-20 (e.g., 1, 2, 3, 4, 5, 6, 7, 8, 9, 10, 11, 12, 13, 14, 15, 16, 17, 18, 19, or 20). In some embodiments, a linker present in a circular permutant of the present invention has a sequence of (GSS)ₙG (SEQ ID NO:36), (SGS)ₙ (SEQ ID NO:869), or (SGGS)ₙ (SEQ ID NO:870) wherein n is 2, 3, 4, or 5. In some embodiments, a linker present in a circular permutant of the present invention has a sequence of STSQSDGSSVPADIDQSSDSDQSSSQGQPG (SEQ ID NO:5), SGSETPGTSESATPES (SEQ ID NO:29), SGGSSGSETPGTSESATPESSGGS (SEQ ID NO:883), SGGSSGGSSGSETPGTSESATPESSGGSSGGS (SEQ ID NO:30), SGGSSGSETPGTSESATPESSGGS (SEQ ID NO:883), or GSPKKKRKVSGGS (SEQ ID NO: 885). In some embodiments, a circular permutant of the present invention is devoid of a linker. In some embodiments, a circular permutant of the present invention is devoid of a linker between a first portion of an original polypeptide that comprises the C-terminal end of the original polypeptide and a second portion of the original polypeptide that comprises the N-terminal end of the original polypeptide.

[0195] In some embodiments, a circular permutant of the present invention may be fused to a polypeptide of interest (e.g., a deaminase, a reverse transcriptase, etc.) with a linker in between the circular permutant and the polypeptide of interest. The linker may have a length of 4, 5, 6, 7, 8, 9, 10, 11, 12, 13, 14, 15, 15, or 16 amino acids. In some embodiments, the linker has a length of 4 amino acids. In some embodiments, the linker has a length of 6 amino acids. In some embodiments, the linker has a length of 8 amino acids.

[0196] A circular permutant of the present invention and/or a polypeptide of the present invention comprising a circular permutant of the present invention may have a different editing window than that for a Cas12a or an engineered protein that comprises a Cas12a polypeptide, optionally measured and/or tested under the same conditions. In some embodiments, a circular permutant of the present invention and/or a polypeptide of the present invention comprising a circular permutant of the present invention has a different editing window than the original polypeptide upon which the circular permutant is based and/or for which the circular permutant is a variant, optionally measured and/or tested under the same conditions. In some embodiments, a circular permutant of the present invention and/or a polypeptide of the present invention comprising a circular permutant of the present invention has an editing window that is increased or decreased in length compared to the length of the editing window for a Cas12a or an engineered protein that comprises a Cas12a polypeptide, optionally measured and/or tested under the same conditions. In some embodiments, a circular permutant of the present invention and/or a polypeptide of the present invention comprising a circular permutant of the present invention has an editing window that is increased or decreased in length compared to the length of the editing window for the original polypeptide upon which the circular permutant is based and/or for which the circular permutant is a variant, optionally measured and/or tested under the same conditions. The polypeptide and/or circular permutant may have an altered (e.g., increased or decreased) editing window for base editing and/or REDRAW editing. The editing window for an editing system (e.g., for a base editing system and/or REDRAW system) may be measured and/or determined using methods known in the art. In some embodiments, an editing window for an editing system may be measured and/or determined by measuring editing efficiency of C's, A's, and/or precise edits within a spacer using sequencing (e.g., Next Generation sequencing (NGS)). In some embodiments, an editing window for an editing system may be measured and/or determined by an experiment in which a plasmid comprising a CRISPR-Cas effector protein and/or a circular permutant of the present invention is transiently co-transfected into a cell (e.g., an HEK293T cell) along with a plasmid comprising a guide or stagRNA, and the ability of the CRISPR-Cas effector protein and/or a circular permutant to make an edit (e.g., an edit within the spacer of the guide or stagRNA) at one or more target nucleic acids (e.g., at about 1 to about 3 or 5 different target nucleic acids) in the cell is detected and/or measured.

[0197] In some embodiments, a circular permutant of the present invention has an editing window in a region of a target nucleic acid corresponding to nucleotide 9 to nucleotide 23 (or any range or nucleotide therein) of the spacer sequence that has complementarity to the target nucleic acid (i.e., the region is the corresponding nucleotides of the target nucleic acid that are opposite (e.g., matched or mismatched) to nucleotide 9 to nucleotide 23 of the spacer sequence). In some embodiments, a circular permutant of the present invention that is fused to a polypeptide of interest (e.g., a deaminase, a reverse transcriptase, etc.) with a linker (e.g., a linker having a length of 4, 5, 6, 7, or 8 amino acids) in between the circular permutant and the polypeptide of interest has an editing window in a region of a target nucleic acid corresponding to nucleotide 9 to nucleotide 23 (or any range or nucleotide therein) of the spacer sequence that has complementarity to the target nucleic acid. In some embodiments, a protein of the present invention comprises an amino acid sequence having at least 70%, 75%, 80%, 85%, 90%, 95%, 96%, 97%, 98%, 99%, or 100% sequence identity to one or more of SEQ ID NOs: 453, 459, and 629-639 and has an editing window in a region of a target nucleic acid corresponding to nucleotide 9 to nucleotide 23 (or any range or nucleotide therein) of the spacer sequence that has complementarity to the target nucleic acid.

[0198] In some embodiments, a protein of the present invention has an editing window in a region of a target nucleic acid corresponding to nucleotide 9 to nucleotide 33 (or any range or nucleotide therein) of the spacer sequence that has complementarity to the target nucleic acid. In some embodiments, a protein of the present invention has an editing window in a region of a target nucleic acid corresponding to nucleotide 24 to nucleotide 33 (or any range or nucleotide therein) of the spacer sequence that has complementarity to the target nucleic acid. In some embodiments, a protein of the present invention comprises an amino acid sequence having at least 70%, 75%, 80%, 85%, 90%, 95%, 96%, 97%, 98%, 99%, or 100% sequence identity to one or more of SEQ ID NOs: 453, 459, and 629-639 and has an editing window in a region of a target nucleic acid corresponding to nucleotide 9 to nucleotide 33 (or any range or nucleotide therein) of the spacer sequence that has complementarity to the target nucleic acid. In some embodiments, a protein of the present invention comprises an amino acid sequence having at least 70%, 75%, 80%, 85%, 90%, 95%, 96%, 97%, 98%, 99%, or 100% sequence identity to one or more of SEQ ID NOs: 453, 459, and 629-639 and has an editing window in a region of a target nucleic acid corresponding to nucleotide 24 to nucleotide 33 (or any range or nucleotide therein) of the spacer sequence that has complementarity to the target nucleic acid.

[0199] In some embodiments, a circular permutant and/or protein of the present invention deletes one or more nucleotide(s) (e.g., 1, 2, 5, 10, 20, 30, 40, or 50 nucleotide(s) or more) from a target nucleic acid, optionally wherein the deletion is longer than the spacer sequence for the target nucleic acid and/or the deletion is in a region that extends outside the spacer sequence. In some embodiments, a protein of the present invention comprises an amino acid sequence having at least 70%, 75%, 80%, 85%, 90%, 95%, 96%, 97%, 98%, 99%, or 100% sequence identity to one or more of SEQ ID NOs: 234-245, 299-310, 390-399, 537-560, 702-704, 735-740, and 757-760 and deletes one or more nucleotide(s) (e.g., 1, 2, 5, 10, 20, 30, 40, or 50 nucleotide(s) or more) from a target nucleic acid, optionally wherein the deletion is longer than the spacer sequence for the target nucleic acid and/or the deletion is in a region that extends outside the spacer sequence.

[0200] In some embodiments, a circular permutant of the present invention has an editing window in a region of a target nucleic acid corresponding to nucleotide 6 to nucleotide 23 (or any range or nucleotide therein) of the spacer sequence that has complementarity to the target nucleic acid (i.e., the region is the corresponding nucleotides of the target nucleic acid that are opposite (e.g., matched or mismatched) to nucleotide 6 to nucleotide 23 of the spacer sequence). In some embodiments, a circular permutant of the present invention that is fused to a polypeptide of interest (e.g., a deaminase, a reverse transcriptase, etc.) with a linker (e.g., a linker having a length of 4, 5, 6, 7, or 8 amino acids) in between the circular permutant and the polypeptide of interest has an editing window in a region of the target nucleic acid corresponding to nucleotide 6 to nucleotide 23 (or any range or nucleotide therein) of the spacer sequence that has complementarity to the target nucleic acid. In some embodiments, a protein of the present invention comprises an amino acid sequence having at least 70%, 75%, 80%, 85%, 90%, 95%, 96%, 97%, 98%, 99%, or 100% sequence identity to one or more of SEQ ID NOs: 450-452, 454-458, 560-461, and 624-628 and has an editing window in a region of the target nucleic acid corresponding to nucleotide 6 to nucleotide 23 (or any range or nucleotide therein) of the spacer sequence that has complementarity to the target nucleic acid.

[0201] In some embodiments, a protein of the present invention has an editing window in a region of a target nucleic acid corresponding to nucleotide 6 to nucleotide 30 (or any range or nucleotide therein) of the spacer sequence that has complementarity to the target nucleic acid (i.e., the region is the corresponding nucleotides of the target nucleic acid that are opposite (e.g., matched or mismatched) to nucleotide 6 to nucleotide 30 of the spacer sequence). In some embodiments, a protein of the present invention has an editing window in a region of the target nucleic acid corresponding to nucleotide 24 to nucleotide 30 (or any range or nucleotide therein) of the spacer sequence that has complementarity to the target nucleic acid. In some embodiments, a protein of the present invention comprises an amino acid sequence having at least 70%, 75%, 80%, 85%, 90%, 95%, 96%, 97%, 98%, 99%, or 100% sequence identity to one or more of SEQ ID NOs: 450-452, 454-458, 560-461, and 624-628 and has an editing window in a region of a target nucleic acid corresponding to nucleotide 6 to nucleotide 30 (or any range or nucleotide therein) of the spacer sequence that has complementarity to the target nucleic acid. In some embodiments, a protein of the present invention comprises an amino acid sequence having at least 70%, 75%, 80%, 85%, 90%, 95%, 96%, 97%, 98%, 99%, or 100% sequence identity to one or more of SEQ ID NOs: 450-452, 454-458, 560-461, and 624-628 and has an editing window in a region of the target nucleic acid corresponding to nucleotide 24 to nucleotide 30 (or any range or nucleotide therein) of the spacer sequence that has complementarity to the target nucleic acid.

[0202] In some embodiments, a circular permutant of the present invention has an editing window in a region of a target nucleic acid corresponding to nucleotide 8 to nucleotide 21 (or any range or nucleotide therein) of the spacer sequence that has complementarity to the target nucleic acid (i.e., the region is the corresponding nucleotides of the target nucleic acid that are opposite (e.g., matched or mismatched) to nucleotide 8 to nucleotide 21 of the spacer sequence). In some embodiments, a circular permutant of the present invention that is fused to a polypeptide of interest (e.g., a deaminase, a reverse transcriptase, etc.) with a linker (e.g., a linker having a length of 4, 5, 6, 7, or 8 amino acids) in between the circular permutant and the polypeptide of interest has an editing window in a region of the target nucleic acid corresponding to nucleotide 8 to nucleotide 21 (or any range or nucleotide therein) of the spacer sequence that has complementarity to the target nucleic acid. In some embodiments, a protein of the present invention comprises an amino acid sequence having at least 70%, 75%, 80%, 85%, 90%, 95%, 96%, 97%, 98%, 99%, or 100% sequence identity to one or more of SEQ ID NOs: 486-497 and 609-623 and has an editing window in a region of the target nucleic acid corresponding to nucleotide 8 to nucleotide 21 (or any range or nucleotide therein) of the spacer sequence that has complementarity to the target nucleic acid.

[0203] A circular permutant of the present invention and/or a polypeptide of the present invention comprising a circular permutant of the present invention may have increased nuclease activity compared to the nuclease activity of a Cas12a or an engineered protein that comprises a Cas 12a polypeptide, optionally measured and/or tested under the same conditions. In some embodiments, a circular permutant of the present invention and/or a polypeptide of the present invention comprising a circular permutant of the present invention has increased nuclease activity compared to the original polypeptide upon which the circular permutant is based and/or for which the circular permutant is a variant, optionally measured and/or tested under the same conditions.

[0204] In some embodiments, the N-terminus and/or C-terminus of a circular permutant of the present invention are closer (e.g., in distance such as Angstroms) to a target nucleic acid (e.g., a bound target nucleic acid) than the N-terminus and/or C-terminus of a Cas12a or an engineered protein that comprises a Cas12a polypeptide, optionally measured and/or tested under the same conditions. In some embodiments, the N-terminus and/or C-terminus of a polypeptide of the present invention comprising a circular permutant of the present invention are closer (e.g., in distance such as Angstroms) to a target nucleic acid (e.g., a bound target nucleic acid) than the N-terminus and/or C-terminus of a Cas 12a or an engineered protein that comprises a Cas 12a polypeptide, optionally measured and/or tested under the same conditions. In some embodiments, the N-terminus and/or C-terminus of a circular permutant of the present invention are closer to the non-target strand of a target nucleic acid than the N-terminus and/or C-terminus of a Cas12a or an engineered protein that comprises a Cas12a polypeptide, optionally measured and/or tested under the same conditions. In some embodiments, the N-terminus and/or C-terminus of a polypeptide of the present invention comprising a circular permutant of the present invention are closer to the non-target strand of a target nucleic acid than the N-terminus and/or C-terminus of a Cas12a or an engineered protein that comprises a Cas12a polypeptide, optionally measured and/or tested under the same conditions. In some embodiments, the N-terminus and/or C-terminus of a circular permutant of the present invention are closer (e.g., in distance such as Angstroms) to a target nucleic acid (e.g., a bound target nucleic acid) than the N-terminus and/or C-terminus of the original polypeptide upon which the circular permutant is based and/or for which the circular permutant is a variant, optionally measured and/or tested under the same conditions. In some embodiments, the N-terminus and/or C-terminus of a circular permutant of the present invention are closer to the non-target strand of a target nucleic acid than the N-terminus and/or C-terminus of the original polypeptide upon which the circular permutant is based and/or for which the circular permutant is a variant, optionally measured and/or tested under the same conditions. In some embodiments, a nucleic acid (e.g., DNA and/or RNA) binding domain of a circular permutant of the present invention is closer (e.g., in distance such as Angstroms) to a target nucleic acid (e.g., a bound target nucleic acid) than the nucleic acid binding domain of a Cas12a or an engineered protein that comprises a Cas12a polypeptide, optionally measured and/or tested under the same conditions. In some embodiments, a nucleic acid (e.g., DNA and/or RNA) binding domain of a polypeptide of the present invention comprising a circular permutant of the present invention is closer (e.g., in distance such as Angstroms) to a target nucleic acid (e.g., a bound target nucleic acid) than the nucleic acid binding domain of a Cas12a or an engineered protein that comprises a Cas12a polypeptide, optionally measured and/or tested under the same conditions. Access and/or distance may be determined using methods known in the art. In some embodiments, access (e.g., a N- or C termini's access to a nucleic acid or a binding domain's access to a nucleic acid) and/or distance (e.g., a distance from a N- or C-termini to a nucleic acid or a distance from a N- or C-termini to a nucleic acid) may be determined and/or measured based on a structural analysis of the polypeptide and/or nucleic acid (e.g., a structure determined via modeling, nuclear magnetic resonance, and/or crystallography).

[0205] In some embodiments, a circular permutant of the present invention and/or a polypeptide of the present invention comprising a circular permutant of the present invention has improved (e.g., better) access to a nucleic acid (e.g., a target nucleic acid, a ss-RNA) compared to the access of a Cas12a or an engineered protein that comprises a Cas12a polypeptide, optionally measured and/or tested under the same conditions. In some embodiments, a circular permutant of the present invention and/or a polypeptide of the present invention comprising a circular permutant of the present invention has improved (e.g., better) access to a nucleic acid (e.g., a target nucleic acid, a ss-RNA) compared to the access of the original polypeptide upon which the circular permutant is based and/or for which the circular permutant is a variant, optionally measured and/or tested under the same conditions. In some embodiments, a polypeptide of the present invention comprising a circular permutant of the present invention and a second polypeptide (e.g., a deaminase and/or reverse transcriptase) provides the second polypeptide with improved (e.g., better) access to a nucleic acid (e.g., a target nucleic acid, a ss-RNA) compared to the access of a Cas12a or an engineered protein that comprises a Cas12a polypeptide, optionally measured and/or tested under the same conditions. In some embodiments, a polypeptide of the present invention comprising a circular permutant of the present invention and a second polypeptide (e.g., a deaminase and/or reverse transcriptase) provides the second polypeptide with improved (e.g., better) access to a nucleic acid (e.g., a target nucleic acid, a ss-RNA) compared to the access of the original polypeptide upon which the circular permutant is based and/or for which the circular permutant is a variant, optionally measured and/or tested under the same conditions. In some embodiments, improved access to a nucleic acid (e.g., a target nucleic acid) may result in and/or provide an increased editing efficiency and/or modified (e.g., increased or decreased) editing window, which may indicate improved access to the nucleic acid.

[0206] A circular permutant of the present invention and/or a polypeptide of the present invention comprising a circular permutant of the present invention may bind to a target nucleic acid. In some embodiments, the polypeptide and/or circular permutant binds the target nucleic acid in an improved (e.g., more accessible) orientation compared to a Cas12a or an engineered protein that comprises a Cas 12a polypeptide and/or to the original polypeptide upon which the circular permutant is based and/or for which the circular permutant is a variant.

[0207] In some embodiments, a circular permutant of the present invention and/or a polypeptide of the present invention comprising a circular permutant of the present invention may have increased RNase activity compared to a Cas12a or an engineered protein that comprises a Cas12a polypeptide and/or to the original polypeptide upon which the circular permutant is based and/or for which the circular permutant is a variant. A circular permutant of the present invention and/or a polypeptide of the present invention comprising a circular permutant of the present invention may be able to self-process a guide nucleic acid. RNase activity and/or ability to self-process a guide nucleic acid may be measured and/or determined using methods known in the art. In some embodiments, RNase activity and/or ability to self-process a guide nucleic acid may be measured and/or determined by testing the length of an array a polypeptide (e.g., a circular permutant of the present invention) can process. For example, a crRNA array may be generated with guide nucleic acids directed to one or more different target nucleic acids (e.g., at the beginning, middle, and end of the array) in a cell (e.g., an HEK293T cell), then the INDEL efficiency at each of the target nucleic acids may be determined using sequencing (e.g., NGS).

[0208] A circular permutant of the present invention and/or a polypeptide of the present invention comprising a circular permutant of the present invention may have modified (e.g., increased) crRNA binding compared a Cas12a or an engineered protein that comprises a Cas12a polypeptide and/or to the original polypeptide upon which the circular permutant is based and/or for which the circular permutant is a variant. In some embodiments, a circular permutant of the present invention and/or a polypeptide of the present invention comprising a circular permutant of the present invention may have modified (e.g., increased) PAM access compared to a Cas12a or an engineered protein that comprises a Cas 12a polypeptide and/or to the original polypeptide upon which the circular permutant is based and/or for which the circular permutant is a variant. PAM access and/or crRNA binding may be measured and/or determined using methods known in the art. In some embodiments, PAM access may be measured and/or determined by performing a bacterial, in vivo PAM binding assay (PAM-SCANR) on a polypeptide (e.g., a circular permutant of the present invention) and sequencing the assay result (e.g., NGS).

[0209] A circular permutant of the present invention may include a non-natural PAM recognition site and/or sequence. For example, a circular permutant of the present invention may be a nuclease that comprises non-natural PAM recognition specificity (e.g., altered binding affinity) in addition to or instead of the natural PAM recognition specificity (e.g., wild-type binding affinity) for a Cas12a. As used herein in reference to a circular permutant, modified protein, engineered protein, and/or nuclease, “altered PAM specificity” means that the PAM specificity of the circular permutant, modified protein, engineered protein, and/or nuclease is altered from that of the wild-type nuclease (e.g., non-native PAM sequences are recognized by the circular permutant, modified protein, engineered protein, and/or nuclease in addition to and/or instead of the native PAM sequence that are recognized by the wild-type nuclease). For example, a modified Cas12a nuclease (e.g., a modified protein) or a circular permutant would be altered in its PAM specificity if it recognizes a PAM sequence other than and/or in addition to the native Cas12a PAM sequence of TTTV, wherein V is A, C or G. In some embodiments, a circular permutant of the present invention comprises a polypeptide that is a portion of Cas12a and the circular permutant has altered PAM specificity in that it recognizes a PAM sequence other than and/or in addition to the native Cas 12a PAM sequence of TTTV, wherein V is A, C or G. In some embodiments, a circular permutant of the present invention recognizes a native PAM sequence (e.g., a PAM sequence of TTTV, wherein V is A, C or G) and/or recognizes a non-native PAM sequence (e.g., a PAM sequence of CCCC, TCCA, TCCC, TCCG, TTCA, TTCC, TATA, TATC, and TATG, and/or TTCG).

[0210] In some embodiments, a circular permutant of the present invention may comprise an altered protospacer adjacent motif (PAM) specificity as compared to wild type LbCas 12a (e.g., SEQ ID NO:56) and/or a modified Cas12a having a sequence of one of SEQ ID NOs: 850-852. A circular permutant of the present invention may have an altered PAM specificity, wherein the altered PAM specificity includes, but is not limited to, NNNG, NNNT, NNNA, NNNC, NNG, NNT, NNC, NNA, NG, NT, NC, NA, NN, NNN, NNNN, wherein each N of each sequence is independently selected from any of T, C, G, or A. In some embodiments, the altered PAM specificity may include, but is not limited to, TTTA, TTTC, TTTG, TTTT, TTCA, TTCC, TTCG, TATA, TATC, TCCG, TCCC, TCCA, and/or TATG. In some embodiments, the altered PAM specificity may be NNNN, wherein each N of each sequence is independently selected from any of T, C, G, or A.

[0211] In addition to having an altered PAM recognition specificity a circular permutant of the present invention may further comprise a mutation in the nuclease active site (e.g., RuvC domain) (e.g., deadLbCas12a, dLbCas12a). Such modifications may result in the circular permutant having reduced nuclease activity (e.g., nickase activity) or no nuclease activity.

[0212] In some embodiments, a circular permutant of the present invention and/or a polypeptide of the present invention comprising a circular permutant of the present invention may have an increased stability (e.g., increased thermal stability, expression stability, and/or purified stability) compared to a Cas12a or an engineered protein that comprises a Cas12a polypeptide and/or to the original polypeptide upon which the circular permutant is based and/or for which the circular permutant is a variant. Stability may be measured and/or determined using methods known in the art. In some embodiments, stability (e.g., expression and/or purification stability) may be measured and/or determined by quantifying the protein expression yield in bacteria (e.g., E. coli), optionally as compared to the protein expression yield for a control (e.g., a Cas12a such as LbCas12a and/or an engineered protein that comprises a Cas 12a polypeptide). In some embodiments, thermal stability may be measured in vitro by performing a cutting assay at two or more different temperatures, or in vivo by measuring cutting efficiency of a polypeptide (e.g., a circular permutant of the present invention) compared to a Cas 12a or an engineered protein that comprises a Cas 12a polypeptide in a cell (e.g., an HEK293T cell or plant cell) or in a plant. In some embodiments, thermal stability may be measured using differential scanning calorimetry (DSC).

[0213] A circular permutant of the present invention and/or a polypeptide of the present invention comprising a circular permutant of the present invention may have at least one improvement (e.g., modified editing window, increased nuclease activity, increased stability, increased binding to a nucleic acid, etc.) compared to a polypeptide (e.g., a Cas12a and/or an engineered protein that comprises a Cas 12a polypeptide) having an amino acid sequence of any one of SEQ ID NOs: 39-65, 69-132, 159-182, 281-284, 298, 400-401, 741, 761, and 850-861.

[0214] The N-terminal amino acid residue and/or the C-terminal amino acid residue of a circular permutant of the present invention may be an amino acid residue that is present in a loop of the original polypeptide (e.g., a Cas12a or an engineered protein that comprises a Cas12a polypeptide) upon which the circular permutant is based and/or for which the circular permutant is a variant or may be an acid residue that is present immediately before or immediately after a loop of the original polypeptide upon which the circular permutant is based and/or for which the circular permutant is a variant. The loop may be a surface exposed loop. In some embodiments, the N-terminal amino acid residue and the C-terminal amino acid residue of the circular permutant are each amino acid residues that are present in a loop (e.g., a surface exposed loop) of the original polypeptide. In some embodiments, one of the N-terminal amino acid residue and the C-terminal amino acid residue of the circular permutant is an amino acid residue that is present in a loop (e.g., a surface exposed loop) of the original polypeptide and the other of the N-terminal amino acid residue and the C-terminal amino acid residue of the circular permutant is an amino acid residue that is immediately before or immediately after a loop of the original polypeptide. A Cas12a and/or an engineered protein that comprises a Cas12a polypeptide may have 1, 2, 3, 4, 5, 6, 7, 8, 9, 10, 11, 12, 13, 14, or more loop(s). In some embodiments, the N-terminal amino acid residue and/or the C-terminal amino acid residue of a circular permutant of the present invention may be an amino acid residue that is present in, optionally from the N- to C-terminus direction, the first, second, third, fourth, fifth, sixth, seventh, eighth, ninth, tenth, eleventh, twelfth, thirteenth, or fourteenth loop, etc., (e.g., Loop 1, Loop 2, . . . . Loop 14, etc., respectively) of the original polypeptide upon which the circular permutant is based and/or for which the circular permutant is a variant or may be an amino acid residue that is immediately before or immediately after, optionally from the N- to C-terminus direction, the first, second, third, fourth, fifth, sixth, seventh, eighth, ninth, tenth, eleventh, twelfth, thirteenth, or fourteenth loop, etc. of the original polypeptide. The N-terminal amino acid residue and/or the C-terminal amino acid residue of the circular permutant may be present in a loop of a Cas 12a having a sequence of SEQ ID NO:55 or 56 and/or present in a corresponding region (e.g., loop) that is optimally aligned to SEQ ID NO:55 or 56, or may be an amino acid residue that is immediately before or immediately after a loop of a Cas12a having a sequence of SEQ ID NO:55 or 56 and/or present in a corresponding region (e.g., loop) that is optimally aligned to SEQ ID NO:55 or 56. In some embodiments, a circular permutant of the present invention is a based on and/or is a variant of SEQ ID NO:55 or a Cas12a or an engineered protein that comprises a Cas12a polypeptide that is optimally aligned to SEQ ID NO:55, wherein in SEQ ID NO:55 Loop 1 is amino acid residues 1141-1145, Loop 2 is amino acid residues 997-1019, Loop 3 is amino acid residues 84-86, Loop 4 is amino acid residues 268-295, Loop 5 is amino acid residues 1156-1160, Loop 6 is amino acid residues 1138-1141, Loop 7 is amino acid residues 1170-1177, Loop 8 is amino acid residues 1101-1110, Loop 9 is amino acid residues 513-520, Loop 10 is amino acid residues 438-448, Loop 11 is amino acid residues 476-482, Loop 12 is amino acid residues 405-408, Loop 13 is amino acid residues 332-336, and Loop 14 is amino acid residues 1118-1119, and wherein the N-terminal amino acid residue and/or the C-terminal amino acid residue of the circular permutant is an amino acid residue that is present in a loop of SEQ ID NO:55 or a sequence optimally aligned thereto or is an acid residue that is present immediately before or immediately after a loop of SEQ ID NO:55 or a sequence optimally aligned thereto. The N-terminal amino acid residue and/or the C-terminal amino acid residue of the circular permutant may be present in a loop of a Cas12a having a sequence of SEQ ID NO:298 and/or present in a corresponding region (e.g., loop) that is optimally aligned to SEQ ID NO:298, or may be an amino acid residue that is immediately before or immediately after a loop of a Cas 12a having a sequence of SEQ ID NO:298 and/or present in a corresponding region (e.g., loop) that is optimally aligned to SEQ ID NO:298. In some embodiments, the N-terminal amino acid residue and/or the C-terminal amino acid residue of a circular permutant of the present invention is in a Nuc domain of the original polypeptide (e.g., a Cas12a or an engineered protein that comprises a Cas12a polypeptide), optionally in a loop in the Nuc domain of the original polypeptide or is an amino acid residue that is immediately before or immediately after a loop in the Nuc domain of the original polypeptide. In some embodiments, the N-terminal amino acid residue and/or the C-terminal amino acid residue of a circular permutant of the present invention is in a Rec domain (e.g., Rec1 domain and/or Rec2 domain) of the original polypeptide (e.g., a Cas 12a or an engineered protein that comprises a Cas12a polypeptide), optionally in a loop in the Rec domain (e.g., Rec1 domain and/or Rec2 domain) of the original polypeptide or is an amino acid residue that is immediately before or immediately after a loop in the Rec domain (e.g., Rec1 domain and/or Rec2 domain) of the original polypeptide.

[0215] In some embodiments, a circular permutant of the present invention is a based on and/or is a variant of SEQ ID NO:55 or a Cas12a or an engineered protein that comprises a Cas12a polypeptide that is optimally aligned to SEQ ID NO:55, wherein the N-terminal amino acid residue of the circular permutant is amino acid residue 80, 81, 82, 83, 84, 85, 86, 87, 88, or 89 of SEQ ID NO:55 or a sequence optimally aligned thereto, and the C-terminal amino acid residue of the circular permutant is the acid residue of SEQ ID NO:55 or the sequence optimally aligned thereto that is present immediately before that corresponding to the N-terminal amino acid of the circular permutant. For example, if the N-terminal amino acid residue of a circular permutant of the present invention is amino acid residue 85 of SEQ ID NO: 55, then the C-terminal amino acid residue of the circular permutant is acid residue 84 of SEQ ID NO:55. In some embodiments, a circular permutant of the present invention is a based on and/or is a variant of SEQ ID NO:55 or a Cas12a or an engineered protein that comprises a Cas 12a polypeptide that is optimally aligned to SEQ ID NO:55, wherein the N-terminal amino acid residue of the circular permutant is amino acid residue 264, 265, 266, 267, 276, 277, 278, 279, 290, 291, 292, 293, 294, 295, 296, 297, or 298 of SEQ ID NO:55 or a sequence optimally aligned thereto, and the C-terminal amino acid residue of the circular permutant is the acid residue of SEQ ID NO:55 or the sequence optimally aligned thereto that is present immediately before that corresponding to the N-terminal amino acid of the circular permutant. In some embodiments, a circular permutant of the present invention is a based on and/or is a variant of SEQ ID NO:55 or a Cas12a or an engineered protein that comprises a Cas12a polypeptide that is optimally aligned to SEQ ID NO:55, wherein the N-terminal amino acid residue of the circular permutant is amino acid residue 434, 435, 436, 437, 438, 439, 440, 441, 442, 443, 444, 445, 446, 447, 448, 449, or 450 of SEQ ID NO:55 or a sequence optimally aligned thereto, and the C-terminal amino acid residue of the circular permutant is the acid residue of SEQ ID NO:55 or the sequence optimally aligned thereto that is present immediately before that corresponding to the N-terminal amino acid of the circular permutant. In some embodiments, a circular permutant of the present invention is a based on and/or is a variant of SEQ ID NO:55 or a Cas12a or an engineered protein that comprises a Cas12a polypeptide that is optimally aligned to SEQ ID NO:55, wherein the N-terminal amino acid residue of the circular permutant is amino acid residue 510, 511, 512, 513, 514, 515, 516, 517, 518, 519, 520, 521, 522, 523, 524, or 525 of SEQ ID NO:55 or a sequence optimally aligned thereto, and the C-terminal amino acid residue of the circular permutant is the acid residue of SEQ ID NO:55 or the sequence optimally aligned thereto that is present immediately before that corresponding to the N-terminal amino acid of the circular permutant. In some embodiments, a circular permutant of the present invention is a based on and/or is a variant of SEQ ID NO:55 or a Cas12a or an engineered protein that comprises a Cas 12a polypeptide that is optimally aligned to SEQ ID NO:55, wherein the N-terminal amino acid residue of the circular permutant is amino acid residue 1110, 1111, 1112, 1113, 1114, 1115, 1116, 1117, 1118, 1119, 1120, 1121, 1122, 1123, 1124, or 1125 of SEQ ID NO:55 or a sequence optimally aligned thereto, and the C-terminal amino acid residue of the circular permutant is the acid residue of SEQ ID NO:55 or the sequence optimally aligned thereto that is present immediately before that corresponding to the N-terminal amino acid of the circular permutant. In some embodiments, a circular permutant of the present invention is a based on and/or is a variant of SEQ ID NO:55 or a Cas12a or an engineered protein that comprises a Cas12a polypeptide that is optimally aligned to SEQ ID NO:55, wherein the N-terminal amino acid residue of the circular permutant is amino acid residue 1150, 1151, 1152, 1153, 1154, 1155, 1156, 1157, 1158, 1159, 1160, 1161, 1162, 1163, 1164, or 1165 of SEQ ID NO:55 or a sequence optimally aligned thereto, and the C-terminal amino acid residue of the circular permutant is the acid residue of SEQ ID NO:55 or the sequence optimally aligned thereto that is present immediately before that corresponding to the N-terminal amino acid of the circular permutant.

[0216] In some embodiments, a circular permutant of the present invention comprises a first amino acid sequence having at least 70%, 75%, 80%, 85%, 90%, 95%, 96%, 97%, 98%, 99%, or 100% sequence identity to a first portion of one of SEQ ID NOs: 39-65, 69-132, 159-182, 281-284, 298, 400-401, 741, 761, and 850-861, wherein the first portion includes the N-terminus and/or all or a portion of the N-terminal end of the one of SEQ ID NOs: 39-65, 69-132, 159-182, 281-284, 298, 400-401, 741, 761, and 850-861 and the first portion is less than the entire amino acid sequence of SEQ ID NOs: 39-65, 69-132, 159-182, 281-284, 298, 400-401, 741, 761, and 850-861. In some embodiments, the N-terminus of the one of SEQ ID NOs: 39-65, 69-132, 159-182, 281-284, 298, 400-401, 741, 761, and 850-861 is at or after amino acid residue 50, 70, 100, 200, 300, 400, 500, 600, 700, 800, 900, 1000, 1100, 1200, or 1300 of the circular permutant. In some embodiments, the N-terminus of the one of SEQ ID NOs: 39-65, 69-132, 159-182, 281-284, 298, 400-401, 741, 761, and 850-861 is between amino acid residues 50 and 100, 70 and 100, 80 and 90, 100 and 200, 110 and 140, 120 and 130, 700 and 800, 710 and 740, 720 and 730, 780 and 810, 790 and 800, 900 and 1000, 940 and 970, 1100 and 1200, 1140 and 1170, or 1150 and 1160 of the circular permutant. In some embodiments, the first portion of the one of SEQ ID NOs: 39-65, 69-132, 159-182, 281-284, 298, 400-401, 741, 761, and 850-861 includes a portion of the C-terminal end of the one of SEQ ID NOs: 39-65, 69-132, 159-182, 281-284, 298, 400-401, 741, 761, and 850-861. In some embodiments, the first portion of the one of SEQ ID NOs: 39-65, 69-132, 159-182, 281-284, 298, 400-401, 741, 761, and 850-861 includes the C-terminus of the circular permutant and/or the first amino acid sequence of the circular permutant includes the C-terminus. In some embodiments, the circular permutant comprises a second amino acid sequence having at least 70%, 75%, 80%, 85%, 90%, 95%, 96%, 97%, 98%, 99%, or 100% sequence identity to a second portion of the one of SEQ ID NOs: 39-65, 69-132, 159-182, 281-284, 298, 400-401, 741, 761, and 850-861, wherein the second portion includes the C-terminus and/or all or a portion of the C-terminal end of the one of SEQ ID NOs: 39-65, 69-132, 159-182, 281-284, 298, 400-401, 741, 761, and 850-861 and the second portion is less than the entire amino acid sequence of SEQ ID NOs: 39-65, 69-132, 159-182, 281-284, 298, 400-401, 741, 761, and 850-861. In some embodiments, the second portion of the one of SEQ ID NOs: 39-65, 69-132, 159-182, 281-284, 298, 400-401, 741, 761, and 850-861 includes the N-terminus of the circular permutant and/or the second amino acid sequence of the circular permutant includes the N-terminus. In some embodiments, the circular permutant comprises, in the N- to C-terminus direction, the second portion of the one of SEQ ID NOs: 39-65, 69-132, 159-182, 281-284, 298, 400-401, 741, 761, and 850-861 and the first portion of the one of SEQ ID NOs: 39-65, 69-132, 159-182, 281-284, 298, 400-401, 741, 761, and 850-861, wherein the first and second portions are covalently linked optionally via a linker (e.g., a peptide linker).

[0217] A circular permutant of the present invention may have an amino acid sequence comprising at least 70%, 75%, 80%, 85%, 90%, 95%, 96%, 97%, 98%, 99%, or 100% sequence identity to one or more of SEQ ID NOs: 234-245, 299-310, 390-399, 537-560, 702-704, 735-740, and 757-760. In some embodiments, a circular permutant of the present invention may be encoded by a nucleic acid comprising at least 70%, 75%, 80%, 85%, 90%, 95%, 96%, 97%, 98%, 99%, or 100% sequence identity to one or more of SEQ ID NOs: 247-258, 286-297, 327-338, 402-411, 561-584, 706-708, 742-747, and 763-766.

[0218] In some embodiments, a circular permutant of the present invention is a circular permutant of an engineered polypeptide, wherein the engineered polypeptide, optionally when optimally aligned to the amino acid sequence of SEQ ID NO:56, comprises one or more amino acid mutation(s) at a position selected from the group consisting of: D155, G531, K594, D831, R1137, and any combination thereof with reference to the position numbering of SEQ ID NO: 56. In some embodiments, a circular permutant of the present invention is a circular permutant of an engineered polypeptide that, optionally when optimally aligned to the amino acid sequence of SEQ ID NO:56, comprises one or more amino acid mutations selected from the group consisting of: D155R, G531R, K594R, D831A, R1137A, and any combination thereof with reference to the position numbering of SEQ ID NO:56. In some embodiments, the engineered polypeptide, optionally when optimally aligned to the amino acid sequence of SEQ ID NO:56, comprises G531R and K594R mutations, with reference to the position numbering of SEQ ID NO:56.

[0219] In some embodiments, a circular permutant of the present invention is a circular permutant of an engineered polypeptide, wherein the engineered polypeptide, optionally when optimally aligned to the amino acid sequence of SEQ ID NO:55, comprises one or more amino acid mutation(s) at a position selected from the group consisting of: D156, G532, K595, D832, R1138, and any combination thereof with reference to the position numbering of SEQ ID NO: 55. In some embodiments, a circular permutant of the present invention is a circular permutant of an engineered polypeptide that, optionally when optimally aligned to the amino acid sequence of SEQ ID NO:55, comprises one or more amino acid mutations selected from the group consisting of: D156R, G532R, K595R, D832A, R1138A, and any combination thereof with reference to the position numbering of SEQ ID NO:55. In some embodiments, the engineered polypeptide, optionally when optimally aligned to the amino acid sequence of SEQ ID NO:55, comprises G532R and K595R mutations, with reference to the position numbering of SEQ ID NO:55.

[0220] In some embodiments, a circular permutant of the present invention and/or a polypeptide of the present invention comprising a circular permutant of the present invention, optionally when optimally aligned to the amino acid sequence of SEQ ID NO:235, comprises one or more amino acid mutation(s) at a position selected from the group consisting of: D71, G447, K510, D747, R1053, and any combination thereof with reference to the position numbering of SEQ ID NO:235. In some embodiments, a circular permutant of the present invention and/or a polypeptide of the present invention comprising a circular permutant of the present invention, optionally when optimally aligned to the amino acid sequence of SEQ ID NO: 235, comprises one or more amino acid mutations selected from the group consisting of: D71R, G447R, K510R, D747A, R1053A, and any combination thereof with reference to the position numbering of SEQ ID NO:235. In some embodiments, a circular permutant of the present invention and/or a polypeptide of the present invention comprising a circular permutant of the present invention, optionally when optimally aligned to the amino acid sequence of SEQ ID NO: 235, comprises G447R and K510R mutations, with reference to the position numbering of SEQ ID NO:235.

[0221] In some embodiments, a circular permutant of the present invention and/or a polypeptide of the present invention comprising a circular permutant of the present invention, optionally when optimally aligned to the amino acid sequence of SEQ ID NO:237, may comprise one or more amino acid mutation(s) at a position selected from the group consisting of: D1107, D540, R846, and any combination thereof with reference to the position numbering of SEQ ID NO:237. In some embodiments, a circular permutant of the present invention and/or a polypeptide of the present invention comprising a circular permutant of the present invention, optionally when optimally aligned to the amino acid sequence of SEQ ID NO:237, comprises one or more amino acid mutations selected from the group consisting of: D1107R, D540A, R846A, and any combination thereof with reference to the position numbering of SEQ ID NO: 237.

[0222] In some embodiments, a circular permutant of the present invention and/or a polypeptide of the present invention comprising a circular permutant of the present invention, optionally when optimally aligned to the amino acid sequence of SEQ ID NO:239, comprises one or more amino acid mutation(s) at a position selected from the group consisting of: D243, G619, K682, D919, R1225, and any combination thereof with reference to the position numbering of SEQ ID NO:239. In some embodiments, a circular permutant of the present invention and/or a polypeptide of the present invention comprising a circular permutant of the present invention, optionally when optimally aligned to the amino acid sequence of SEQ ID NO: 239, comprises one or more amino acid mutations selected from the group consisting of: D243R, G619R, K682R, D919A, R1225A, and any combination thereof with reference to the position numbering of SEQ ID NO:239. In some embodiments, a circular permutant of the present invention and/or a polypeptide of the present invention comprising a circular permutant of the present invention, optionally when optimally aligned to the amino acid sequence of SEQ ID NO: 239, comprises G619R and K682R mutations, with reference to the position numbering of SEQ ID NO:239.

[0223] In some embodiments, a circular permutant of the present invention and/or a polypeptide of the present invention comprising a circular permutant of the present invention, optionally when optimally aligned to the amino acid sequence of SEQ ID NO:241, comprises one or more amino acid mutation(s) at a position selected from the group consisting of: D882, G15, K78, D315, R621, and any combination thereof with reference to the position numbering of SEQ ID NO:241. In some embodiments, a circular permutant of the present invention and/or a polypeptide of the present invention comprising a circular permutant of the present invention, optionally when optimally aligned to the amino acid sequence of SEQ ID NO:241, comprises one or more amino acid mutations selected from the group consisting of: D882R, G15R, K78R, D315A, R621A, and any combination thereof with reference to the position numbering of SEQ ID NO:241. In some embodiments, a circular permutant of the present invention and/or a polypeptide of the present invention comprising a circular permutant of the present invention, optionally when optimally aligned to the amino acid sequence of SEQ ID NO: 241, comprises G15R and K78R mutations, with reference to the position numbering of SEQ ID NO:241.

[0224] In some embodiments, a circular permutant of the present invention and/or a polypeptide of the present invention comprising a circular permutant of the present invention, optionally when optimally aligned to the amino acid sequence of SEQ ID NO:243, comprises one or more amino acid mutation(s) at a position selected from the group consisting of: D956, D389, R695, and any combination thereof with reference to the position numbering of SEQ ID NO: 243. In some embodiments, a circular permutant of the present invention and/or a polypeptide of the present invention comprising a circular permutant of the present invention, optionally when optimally aligned to the amino acid sequence of SEQ ID NO:243, comprises one or more amino acid mutations selected from the group consisting of: D956R, D389A, R695A, and any combination thereof with reference to the position numbering of SEQ ID NO: 243.

[0225] In some embodiments, a circular permutant of the present invention and/or a polypeptide of the present invention comprising a circular permutant of the present invention, optionally when optimally aligned to the amino acid sequence of SEQ ID NO:245, comprises one or more amino acid mutation(s) at a position selected from the group consisting of: D281, R20, D957, and any combination thereof with reference to the position numbering of SEQ ID NO: 245. In some embodiments, a circular permutant of the present invention and/or a polypeptide of the present invention comprising a circular permutant of the present invention, optionally when optimally aligned to the amino acid sequence of SEQ ID NO:245, comprises one or more amino acid mutations selected from the group consisting of: D281R, R20A, D957A, and any combination thereof with reference to the position numbering of SEQ ID NO: 245.

[0226] In some embodiments, a circular permutant of the present invention is a circular permutant of an engineered polypeptide, wherein the engineered polypeptide comprises an amino acid sequence having at least 80%, 81%, 82%, 83%, 84%, 85%, 86%, 87%, 88%, 89%, 90%, 91%, 92%, 93%, 94%, 95%, 96%, 97%, 98%, 99%, or more identity to the amino acid sequence of SEQ ID NO:55 and, relative to the amino acid sequence of SEQ ID NO:55 (e.g., optimally aligned to SEQ ID NO:55), the engineered polypeptide comprises a mutation at one or more of the following positions selected from the group consisting of: N100, K116, K120, K121, D122, E125, T148, T149, T152, D156, E159, N211, N263, T296, E330, K387, A404, D405, D423, E484, L498, N527, Q529, G532, D535, K538, E539, D541, Y542, Y553, Y554, D572, L585, K591, M592, K595, V596, S599, K600, K601, Y616, Y646, W649, and any combination thereof with reference to position numbering of SEQ ID NO:55.

[0227] In some embodiments, a circular permutant of the present invention is a circular permutant of an engineered polypeptide, wherein the engineered polypeptide comprises an amino acid sequence having at least 80%, 81%, 82%, 83%, 84%, 85%, 86%, 87%, 88%, 89%, 90%, 91%, 92%, 93%, 94%, 95%, 96%, 97%, 98%, 99%, or more identity to the amino acid sequence of SEQ ID NO:55 and, relative to the amino acid sequence of SEQ ID NO:55 (e.g., optimally aligned to SEQ ID NO:55), the engineered polypeptide comprises one or more amino acid mutation(s) selected from the group consisting of: N100S, K116D, K116R, K116N, K120R, K120H, K120N, K120T, K120Y, K120Q, K121S, K121T, K121H, K121R, K121G, K121D, K121Q, D122R, D122K, D122H, D122E, D122N, E125G, E125R, E125K, E125Q, E125Y, T148H, T148S, T148A, T148C, T149A, T149C, T149S, T149G, T149H, T149P, T149F, T149N, T149D, T149V, T152R, T152K, T152W, T152Y, T152H, T152Q, T152E, T152L, T152F, D156R, D156K, D156Y, D156W, D156Q, D156H, D156I, D156V, D156L, D156E, E159K, E159R, E159H, E159Y, E159Q, N211S, N263I, T296I, E330V, K387E, A404V, D405G, D423V, E484D, L498M, N527S, Q529N, Q529T, Q529H, Q529A, Q529F, Q529G, Q529S, Q529P, Q529W, Q529D, G532D, G532N, G532S, G532H, G532F, G532K, G532R, G532Q, G532A, G532L, G532C, D535N, D535H, D535V, D535T, D535S, D535A, D535W, D535K, K538R, K538V, K538Q, K538W, K538Y, K538F, K538H, K538L, K538M, K538C, K538G, K538A, K538P, E539V, D541N, D541H, D541R, D541K, D541Y, D541I, D541A, D541S, D541E, Y542R, Y542K, Y542H, Y542Q, Y542F, Y542L, Y542M, Y542P, Y542V, Y542N, Y542T, Y553H, Y554N, D572G, L585Q, L585G, L585H, L585F, K591W, K591F, K591Y, K591H, K591R, K591S, K591A, K591G, K591P, M592R, M592K, M592Q, M592E, M592A, K595R, K595Q, K595Y, K595L, K595W, K595H, K595E, K595S, K595D, K595M, V596T, V596H, V596G, V596A, S599G, S599H, S599N, S599D, K600R, K600H, K600G, K601R, K601H, K601Q, K601T, Y616K, Y616R, Y616E, Y616F, Y616H, Y646R, Y646E, Y646K, Y646H, Y646Q, Y646W, Y646N, W649H, W649K, W649Y, W649R, W649E, W649S, W649V, W649T, and any combination thereof with reference to the position numbering of SEQ ID NO:55. In some embodiments, a circular permutant of the present invention is a circular permutant of an engineered polypeptide that, optionally when optimally aligned to the amino acid sequence of SEQ ID NO:55, comprises one or more amino acid mutations selected from the group consisting of: N100S, K116D, E125G, T152R, D156E, N211S, N263I, T296I, E330V, K387E, A404V, D405G, D423V, E484D, L498M, N527S, G532R, K538V, E539V, Y542R, Y553H, Y554N, D572G, L585Q, K595R, K595Y, and any combination thereof with reference to the position numbering of SEQ ID NO:55.

[0228] In some embodiments, a circular permutant of the present invention is a circular permutant of an engineered polypeptide, wherein the engineered polypeptide comprises an amino acid sequence having at least 80%, 81%, 82%, 83%, 84%, 85%, 86%, 87%, 88%, 89%, 90%, 91%, 92%, 93%, 94%, 95%, 96%, 97%, 98%, 99%, or more identity to the amino acid sequence of SEQ ID NO:951 and, relative to the amino acid sequence of SEQ ID NO:951 (e.g., optimally aligned to SEQ ID NO:951), the engineered polypeptide comprises a mutation at one or more of the following positions selected from the group consisting of: N100, K116, K120, K121, D122, E125, T148, T149, T152, D156, E159, N211, N263, T443, E478, K535, A552, D553, D571, E632, L646, N675, Q677, G680, D683, K686, E687, D689, Y690, Y701, Y702, D720, L733, K739, M740, K743, V744, S747, K748, K749, Y764, Y794, W797, and any combination thereof with reference to position numbering of SEQ ID NO:951.

[0229] In some embodiments, a circular permutant of the present invention is a circular permutant of an engineered polypeptide, wherein the engineered polypeptide comprises an amino acid sequence having at least 80%, 81%, 82%, 83%, 84%, 85%, 86%, 87%, 88%, 89%, 90%, 91%, 92%, 93%, 94%, 95%, 96%, 97%, 98%, 99%, or more identity to the amino acid sequence of SEQ ID NO:951 and, relative to the amino acid sequence of SEQ ID NO:951 (e.g., optimally aligned to SEQ ID NO:951), the engineered polypeptide comprises one or more amino acid mutation(s) selected from the group consisting of: N100S, K116D, K116R, K116N, K120R, K120H, K120N, K120T, K120Y, K120Q, K121S, K121T, K121H, K121R, K121G, K121D, K121Q, D122R, D122K, D122H, D122E, D122N, E125G, E125R, E125K, E125Q, E125Y, T148H, T148S, T148A, T148C, T149A, T149C, T149S, T149G, T149H, T149P, T149F, T149N, T149D, T149V, T152R, T152K, T152W, T152Y, T152H, T152Q, T152E, T152L, T152F, D156R, D156K, D156Y, D156W, D156Q, D156H, D156I, D156V, D156L, D156E, E159K, E159R, E159H, E159Y, E159Q, N211S, N263I, T443I, E478V, K535E, A552V, D553G, D571V, E632D, L646M, N675S, Q677N, Q677T, Q677H, Q677A, Q677F, Q677G, Q677S, Q677P, Q677W, Q677D, G680D, G680N, G680S, G680H, G680F, G680K, G680R, G680Q, G680A, G680L, G680C, D683N, D683H, D683V, D683T, D683S, D683A, D683W, D683K, K686R, K686V, K686Q, K686W, K686Y, K686F, K686H, K686L, K686M, K686C, K686G, K686A, K686P, E687V, D689N, D689H, D689R, D689K, D689Y, D689I, D689A, D689S, D689E, Y690R, Y690K, Y690H, Y690Q, Y690F, Y690L, Y690M, Y690P, Y690V, Y690N, Y690T, Y701H, Y702N, D720G, L733Q, L733G, L733H, L733F, K739W, K739F, K739Y, K739H, K739R, K739S, K739A, K739G, K739P, M740R, M740K, M740Q, M740E, M740A, K743R, K743Q, K743Y, K743L, K743W, K743H, K743E, K743S, K743D, K743M, V744T, V744H, V744G, V744A, S747G, S747H, S747N, S747D, K748R, K748H, K748G, K749R, K749H, K749Q, K749T, Y764K, Y764R, Y764E, Y764F, Y764H, Y794R, Y794E, Y794K, Y794H, Y794Q, Y794W, Y794N, W797H, W797K, W797Y, W797R, W797E, W797S, W797V, W797T, and any combination thereof with reference to the position numbering of SEQ ID NO:951.

[0230] A circular permutant of the present invention may be fused (e.g., directly or indirectly such as via a linker) to one or more polypeptide(s) that are the same or different from each other. In some embodiments, a circular permutant of the present invention is fused (e.g., directly or indirectly such as via a linker) to a second polypeptide. In some embodiments, the second polypeptide is fused to the N-terminus or the C-terminus of the circular permutant via a peptide bond between an amino acid residue of the circular permutant and an amino acid residue of the second polypeptide. In some embodiments, the second polypeptide is fused to the N-terminus or the C-terminus of the circular permutant via a linker (e.g., a peptide linker). The second polypeptide may be a polypeptide of interest. In some embodiments, a circular permutant of the present invention is fused to one or more (e.g., 2, 3, 4, 5, or more) polypeptide(s) of interest. In some embodiments, a circular permutant of the present invention is fused to a cytosine deaminase (e.g., all or a portion of a cytosine deaminase having at least 70%, 75%, 80%, 85%, 90%, 95%, 96%, 97%, 98%, 99%, or 100% sequence identity to one or more of SEQ ID NOs: 183-193 and 798), optionally wherein the cytosine deaminase is fused (directly or indirectly) to the N- or C-terminus of the circular permutant. In some embodiments, a circular permutant of the present invention is fused to a glycosylase inhibitor, optionally wherein the glycosylase inhibitor is a uracil glycosylase inhibitor (UGI), e.g., all or a portion of a UGI having an amino acid sequence having at least 70%, 75%, 80%, 85%, 90%, 95%, 96%, 97%, 98%, 99%, or 100% sequence identity to SEQ ID NO:204. In some embodiments, a circular permutant of the present invention is fused (directly or indirectly) to a cytosine deaminase and a glycosylase inhibitor in any order. In some embodiments, a circular permutant of the present invention is fused to an adenine deaminase (e.g., all or a portion of an adenine deaminase having at least 70%, 75%, 80%, 85%, 90%, 95%, 96%, 97%, 98%, 99%, or 100% sequence identity to one or more of SEQ ID NOs: 194-203 and 884), optionally wherein the adenine deaminase is fused (directly or indirectly) to the N- or C-terminus of the circular permutant. In some embodiments, a circular permutant of the present invention is fused (directly or indirectly) to an adenine deaminase and a cytosine deaminase in any order, optionally wherein the adenine deaminase is fused (directly or indirectly) to one of the N- or C-terminus of the circular permutant and the cytosine deaminase is fused (directly or indirectly) to the other of the N- or C-terminus of the circular permutant. In some embodiments, a nucleotide sequence encoding a deaminase (e.g., a cytosine deaminase or adenine deaminase) comprises an intronic nucleotide sequence. In some embodiments, the intronic nucleotide sequence has at least about 70%, 75%, 80%, 85%, 90%, 95%, 96%, 97%, 98%, 99%, or more sequence identity to SEQ ID NO:950. In some embodiments, an intron (e.g., having at least about 70%, 75%, 80%, 85%, 90%, 95%, 96%, 97%, 98%, 99%, or more sequence identity to SEQ ID NO:950) may be between a first nucleotide sequence encoding a polypeptide of interest (e.g., a cytosine deaminase, adenine deaminase, reverse transcriptase, etc.) and a second nucleotide sequence encoding a circular permutant of the present invention.

[0231] In some embodiments, a circular permutant of the present invention is fused to a reverse transcriptase, optionally wherein the reverse transcriptase is fused (directly or indirectly) to the N- or C-terminus of the circular permutant. In some embodiments, a reverse transcriptase may have a sequence that has at least about 70%, 75%, 80%, 85%, 90%, 95%, 96%, 97%, 98%, 99%, or more sequence identity to one or more of SEQ ID NOs: 205-216. In some embodiments, a circular permutant of the present invention is fused to a nuclear localization signal. In some embodiments, a nuclear localization signal has at least 70%, 75%, 80%, 85%, 90%, 95%, 96%, 97%, 98%, 99%, or 100% sequence identity to one or more of SEQ ID NOs: 217-219 and 842-844. In some embodiments, a nuclear localization signal (NLS) of the present invention is encoded by a polynucleotide having at least 70%, 75%, 80%, 85%, 90%, 95%, 96%, 97%, 98%, 99%, or 100% sequence identity to one or more of any one of SEQ ID NOs: 845-849. In some embodiments, a circular permutant of the present invention comprises a NLS that is fused (directly or indirectly) to the N- or C-terminus of the circular permutant. In some embodiments, a NLS is present at the N-terminus and/or C-terminus of a circular permutant of the present invention.

[0232] In some embodiments, a polypeptide of the present invention comprises a circular permutant of the present invention and has polymerase activity. Polymerase activity may be measured using methods known in the art. Exemplary assays for measuring and/or determining polymerase activity include, but are not limited to, measuring incorporation of a labeled nucleotide, e.g., a radiolabeled and/or colorimetrically (e.g., fluorescently) labeled nucleotide. In some embodiments, radiolabeling is used to measure and/or determine polymerase activity (e.g., measuring the quantity of a radiolabeled nucleotide included in a polymerized nucleic acid). In some embodiments, a primer extension assay is used to measure and/or determine polymerase activity, optionally wherein the primer extension assay uses a labeled primer (e.g., a fluorescently labeled primer such as a Cy3 or Cy5 labeled primer) to determine the rate of synthesis. In some embodiments, a cleavage assay is used to measure and/or determine polymerase activity (e.g., RNase activity).

[0233] In some embodiments, the activity of a polypeptide of the present invention is measured by the number of nucleotides generated (e.g., polymerized) during one cell division and/or in about 20 minutes. Cell division and/or the time period for one cell division can be readily determined by one of skill in the art. In some embodiments, the cell division is a cell division for a bacterial cell, a human cell, or a plant cell. In some embodiments, the time of one cell division is about 18 to about 22 minutes, about 19 to about 21 minutes, or about 20 minutes. In some embodiments, a polypeptide of the present invention generates (e.g., polymerizes) at least 18, 19, 20, 21, 22, 23, 24, 25 or more nucleotides during one cell division and/or in about 20 minutes, optionally at a temperature of about 10° C., 15° C., 20° C., 25° C., 30° C., 35° C., 40° C., 45° C., 50° C., 55° C., 60° C., 65° C., 70° C., 75° C., or 80° C. Polypeptide activity may be measured by the rate of nucleotides generated (e.g., polymerized) in a period of time. In some embodiments, a polypeptide of the present invention polymerizes at least 18, 19, 20, 21, 22, 23, 24, or 25 nucleotides in 20 minutes. In some embodiments, a polypeptide of the present invention polymerizes at least 0.9, 0.95, 1.0, 1.05, 1.1, 1.15, 1.20, 1.25 or more nucleotides per minute at a physiologically relevant temperature. In some embodiments, a polypeptide of the present invention generates nucleotides at a rate of at least 0.9, 0.95, 1.0, 1.05, 1.1, 1.15, 1.20, or 1.25 nucleotides per minute at a temperature of about 10° C., 15° C., 20° C., 25° C., 30° C., 35° C., 40° C., 45° C., 50° C., 55° C., 60° C., 65° C., 70° C., 75° C., or 80° C. In some embodiments, a polypeptide of the present invention generates (e.g., polymerizes) at least 23 nucleotides during one cell division and/or in about 20 minutes, optionally at a temperature of about 10° C., 15° C., 20° C., 25° C., 30° C., 35° C., 40° C., 45° C., 50° C., 55° C., 60° C., 65° C., 70° C., 75° C., or 80° C.

[0234] In some embodiments, a polypeptide of the present invention generates DNA from RNA at a temperature in a range from about 10° C., 15° C., 20° C., 25° C., 30° C., 35° C., 40° C., 45° C. or 50° C. to about 55° C., 60° C., 65° C., 70° C., 75° C., or 80° C. In some embodiments, a polypeptide of the present invention generates DNA from RNA at a temperature of about 50° C. or less such as at a temperature of about 10° C., 15° C., 20° C., 25° C., 30° C., 35° C., 40° C., or 45° C. In some embodiments, a polypeptide of the present invention generates DNA from RNA at a temperature in a range of about 10° C. to about 40° C., about 15° C. to about 35° C., about 15° C. to about 40° C., about 15° C. to about 50° C., about 18° C. to about 30° C., about 18° C. to about 25° C., about 20° C. to about 25° C., about 20° C. to about 80° C., about 20° C. to about 50° C., about 20° C. to about 45° C., about 30° C. to about 50° C., about 30° C. to about 45° C., about 30° C. to about 40° C., about 20° C. to about 22° C., about 18° C., 19° C., 20° C., 21° C., 22° C., 23° C., 24° C., or 25° C., or about room temperature.

[0235] As used herein, “processivity” refers to the number of nucleotides generated (e.g., synthesized) in a single binding event of a polypeptide of the present invention. Processivity may be measured in vitro and/or in vivo using methods known in the art. In some embodiments, processivity may be measured by the number of bases generated over a period of time per unit of enzyme (e.g., polypeptide of the present invention), wherein 1 unit of enzyme is the amount of enzyme that will incorporate 1 nmol of dTTP into acid-insoluble material in a total reaction volume of 50 μl in 10 minutes at 37° C. using poly(rA)·oligo(dT) as the template primer with 50 mM Tris-HCl (pH 8.3), 6 mM MgCl2, 10 mM dithiothreitol, 0.5 mM [3H]-dTTP and 0.4 mM poly(rA)·oligo(dT) 12-18. In some embodiments, a polypeptide of the present invention has a processivity of at least about 100, 250, 500, 1000, 1500, or 2000 nucleotides or more, e.g. about 100, 150, 200, 250, 300, 350, 400, 450, 500, 550, 600, 650, 700, 750, 800, 850, 900, 950, 1000, 1050, 1100, 1150, 1200, 1250, 1300, 1350, 1400, 1450, 1500, 1550, 1600, 1650, 1700, 1750, 1800, 1850, 1900, 1950, 2000, 2500, 3000, 3500, 4000, 4500, or 5000 nucleotides or more. In some embodiments, a polypeptide of the present invention has a processivity of about 100 to about 600 nucleotides, about 200 to about 500 nucleotides, or at least about 300 nucleotides.

[0236] A polypeptide of the present invention may have a processivity that is increased compared to the processivity of a control reverse transcriptase. A “control reverse transcriptase” or “control RT” as used herein refers to a naturally occurring reverse transcriptase or commercially available reverse transcriptase. Exemplary control RTs include, but are not limited to, Moloney Murine Leukemia Virus Reverse Transcriptase (MMLV-RT or M-MuLV-RT), mutated MMLV (e.g., 5M-MMLV), Avian Myeloblastosis Virus Reverse Transcriptase (AMV-RT), Human Immunodeficiency Virus Reverse Transcriptase (HIV-RT). In some embodiments, the control RT may be MMLV and/or 5M-MMLV. In some embodiments, a control RT may have a sequence of one of SEQ ID NOs: 205-216. Processivity for a polypeptide of the present invention and for control RT may be measured by using one or more sequences under the same reaction conditions (e.g., same time, temperature, concentration, sequence identity, modification, etc.). In some embodiments, a polypeptide of the present invention may have a processivity that is reduced compared to (e.g., lower than) the processivity of a control RT and/or may have a processivity that is faster than a DNA repair enzyme's ability to correct a modification such that the polypeptide can out-run the DNA repair enzyme. In some embodiments, a polypeptide of the present invention has a processivity at a first temperature that is equal to or better than the processivity of a control reverse transcriptase at a second temperature, wherein the first temperature is lower than the second temperature. For example, a polypeptide of the present invention may have a processivity at room temperature that is equal to or better than the processivity of a control reverse transcriptase such as 5M-MMLV at a temperature of greater than room temperature, for example, about 42° C. or about 55° C. In some embodiments, the processivity of a polypeptide of the present invention is within ±about 5%, about 10%, about 15%, about 20%, or about 25% of the processivity of the DNA polymerase in the cell. In some embodiments, the processivity of the polypeptide of the present invention is within about 5%, about 10%, about 15%, about 20% or about 25% of the rate of one or more replicative polymerases of the cell, one or more repair polymerases of the cell, or a combination thereof.

[0237] In some embodiments, a polypeptide of the present invention is devoid of at least a portion of an RNaseH domain. RNaseH domains are conserved across viral RTs and are structurally similar to RNaseH domains in Escherichia coli, Bacillus halodurans and human RNase H1. See, e.g., Champoux et al., FEBS Journal, 276:6, 1506-1516 (2009). Enzymatic activity is conferred by the DEDD sequence motif, a conserved sequence composed of aspartate and glutamate residues, which, in HIV-1 RNase H, are Asp443, Glu478, Asp498 and Asp549, with the corresponding active site amino acids in the M-MLV enzyme of Asp524, Glu562, Asp583 and Asp653.

[0238] In some embodiments, a polypeptide of the present invention has reduced (e.g., about 90%, 80%, 70%, 60%, 50%, 40%, 30%, 20%, 15%, 10%, 5%, or less) or no ribonuclease (RNase) activity. In some embodiments, a polypeptide of the present invention has reduced (e.g., about 90%, 80%, 70%, 60%, 50%, 40%, 30%, 20%, 15%, 10%, 5%, or less) or no ribonuclease (RNase) activity compared to a control RT. In some embodiments, the control reverse transcriptase may be an RT with high RNase activity, for example, avian myeloblastosis virus (AMV) or medium RNasH activity, for example, MMLV-RT.

[0239] In some embodiments, a polypeptide of the present invention generates and/or is capable of generating DNA from RNA in two or more different species (e.g., 3, 4, 5, 6, 7, 8, 9, or 10, or more different species). In some embodiments, a polypeptide of the present invention generates DNA from RNA in two or more different species and has a processivity of at least about 100, 200, 300, 400, 500, 600, 700, 800, 900, 1,000, 1100, 1200, 1300, 1400, 1500, 1600, 1700, 1800, 1900, or 2,000 nucleotides or more, optionally at a temperature in a range of about 25° C., 30° C., 35° C., 40° C., 45° C. or 50° C. to about 55° C., 60° C., 65° C., 70° C., 75° C., or 80° C. In some embodiments, a polypeptide of the present invention generates DNA from RNA in two or more different species at a temperature in a range of about 20° C., 25° C., 30° C., 35° C., 40° C., 45° C. or 50° C. to about 55° C., 60° C., 65° C., 70° C., 75° C., or 80° C. for each of the two or more different species. In some embodiments, a polypeptide of the present invention generates DNA from RNA in two or more different species and has a processivity of at least about 100, 200, 300, 400, 500, 600, 700, 800, 900, 1,000, 1100, 1200, 1300, 1400, 1500, 1600, 1700, 1800, 1900, or 2,000 nucleotides or more, optionally at a temperature of less than 50° C. (e.g., about 20° C., 25° C., 30° C., 35° C., 40° C., or 45° C.) or at a temperature in a range of about 20° C., 25° C., or 30° C. to about 35° C., 40° C., or 45° C.

[0240] A polypeptide of the present invention may generate DNA from RNA in a prokaryote or a eukaryote. In some embodiments, a polypeptide of the present invention generates DNA from RNA in a plant and/or an animal. In some embodiments, a polypeptide of the present invention generates DNA from RNA in corn, soy, canola, wheat, rice, cotton, sugarcane, sugar beet, barley, oats, alfalfa, sunflower, safflower, oil palm, sesame, coconut, tobacco, potato, sweet potato, cassava, coffee, apple, plum, apricot, peach, cherry, pear, fig, banana, citrus, cocoa, avocado, olive, almond, walnut, strawberry, watermelon, pepper, grape, tomato, cucumber, blackberry, raspberry, black raspberry, and/or a Brassica spp.

[0241] A polypeptide of the present invention may be a fusion protein. In some embodiments, a polypeptide of the present invention is fused (e.g., directly or indirectly such as via a linker) to a second polypeptide (e.g., a deaminase and/or reverse transcriptase).

[0242] A polypeptide of the present invention (optionally in a complex of the present invention) may have an editing efficiency (e.g., indel percentage) that is the same as or greater than (e.g., increased compared to) a Cas12a (optionally in a complex with comparable components to those in the complex with the polypeptide of the present invention). In some embodiments, a polypeptide of the present invention has an editing efficiency that is the same as or greater than a Cas12a when performed at a temperature of less than 50° C. such as about 45° C., about 42° C., about 37° C., about 30° C., about 25° C., or about room temperature.

[0243] According to some embodiments of the present invention, a complex is provided that comprises a circular permutant of the present invention and a guide nucleic acid. In some embodiments, the guide nucleic acid is an extended guide nucleic acid and/or the complex further comprises an extended guide nucleic acid. In some embodiments, the circular permutant is fused to a second polypeptide (e.g., a deaminase and/or reverse transcriptase). In some embodiments, the circular permutant may be fused (e.g., directly or indirectly) to a peptide tag, optionally a peptide tag that is capable of binding an affinity polypeptide. In some embodiments, the circular permutant may be fused (e.g., directly or indirectly) an affinity polypeptide, optionally an affinity polypeptide that is capable of binding a peptide tag. In some embodiments, the circular permutant may be fused (e.g., directly or indirectly) to an affinity polypeptide that is capable of binding an RNA recruiting motif. In some embodiments, a system and/or composition of the present invention comprises a circular permutant of the present invention that comprises a peptide tag and a deaminase and/or reverse transcriptase comprising an affinity polypeptide that is capable of binding the peptide tag. In some embodiments, a system and/or composition of the present invention comprises a circular permutant of the present invention that comprises an affinity polypeptide and a deaminase and/or reverse transcriptase comprising a peptide tag that is capable of binding the affinity polypeptide. In some embodiments, a polypeptide of the present invention may be fused to an affinity polypeptide that is capable of binding an RNA recruiting polypeptide. A complex of the present invention may further comprise a guide nucleic acid that is optionally devoid of a reverse transcriptase template. In some embodiments, the guide nucleic acid is directed to a different target nucleic acid than the extended guide nucleic acid.

[0244] A nucleic acid molecule may encode a polypeptide of the present invention, which may be present in an expression cassette and/or vector. A polynucleotide and/or recombinant nucleic acid construct of this invention can be codon optimized for expression. In some embodiments, a polynucleotide, nucleic acid construct, expression cassette, and/or vector of the present invention (e.g., that comprises/encodes a polypeptide of the present invention, a nucleic acid binding polypeptide (e.g., a DNA binding domain such as a sequence-specific DNA binding domain from a polynucleotide-guided endonuclease such as a CRISPR-Cas effector protein), and/or an extended guide nucleic acid) may be codon optimized for expression in an organism (e.g., an animal, a plant, a fungus, an archaeon, or a bacterium). In some embodiments, a polynucleotide of the present invention comprises an intron, optionally an intron having at least about 70%, 75%, 80%, 85%, 90%, 95%, 96%, 97%, 98%, 99%, or more sequence identity to SEQ ID NO:950. In some embodiments, an intron (e.g., having at least about 70%, 75%, 80%, 85%, 90%, 95%, 96%, 97%, 98%, 99%, or more sequence identity to SEQ ID NO:950) may be between a first nucleotide sequence encoding a polypeptide of interest (e.g., a cytosine deaminase, adenine deaminase, reverse transcriptase, etc.) and a second nucleotide sequence encoding a circular permutant of the present invention.

[0245] In some embodiments, an expression cassette and/or vector of the present invention comprises a polynucleotide that has at least about 70%, 75%, 80%, 85%, 90%, 95%, 96%, 97%, 98%, 99%, or more sequence identity to one or more of SEQ ID NOs: 247-258, 260-271, 286-297, 327-338, 364-375, 377-388, 402-411, 414-423, 462-485, 503-514, 520-531, 561-608, 640-701, 706-708, 710-712, 728-733, 742-747, 749-754, 763-766, 768-772, 782, 784, 787, and 792-797. In some embodiments, an expression cassette and/or vector of the present invention comprises a polynucleotide that encodes a promoter sequence and a polynucleotide that encodes a polypeptide that has at least about 70%, 75%, 80%, 85%, 90%, 95%, 96%, 97%, 98%, 99%, or more sequence identity to one or more of SEQ ID NOs: 234-245, 299-310, 351-362, 390-399, 450-461, 486-497, 537-560, 609-639, 702-704, 735-740, and 757-760. In some embodiments, the vector comprising the polynucleotide that encodes a polypeptide has at least about 70%, 75%, 80%, 85%, 90%, 95%, 96%, 97%, 98%, 99%, or more sequence identity to one or more of SEQ ID NOs: 260-271, 286-297, 377-388, 414-423, 474-485, 520-531, 585-608, 671-701, 710-712, 728-733, 749-754, 768-772, and 792-797. The polynucleotide encoding the polypeptide of the present invention may be codon-optimized for expression in a particular organism (e.g., a human or plant). In some embodiments, the organism is an animal (e.g., a human), a plant, a fungus, an archaeon, or a bacterium.

[0246] Methods of modifying a target nucleic acid in a cell are provided, and may comprise introducing an expression cassette and/or vector of the present invention into the cell to provide a modified target nucleic acid. In some embodiments, the cell is a mammalian cell (e.g., a human cell). In some embodiments, the cell is a plant cell and the method further comprises regenerating the plant cell comprising the modified target nucleic acid to produce a plant comprising the modified target nucleic acid. In some embodiments, the introducing of the expression cassette is carried out at a temperature of about 20° C. to about 42° C.

[0247] Methods for producing a polypeptide of the present invention are provided herein and may comprise culturing a cell or a plurality of cells that have been transformed with a nucleic acid encoding a polypeptide of the present invention; and isolating the polypeptide of the present invention to thereby produce the polypeptide. In some embodiments, the step of isolating is performed by dialysis, centrifugation, column purification, and/or the like.

[0248] Methods for performing reverse transcription are provided herein and may comprise contacting a target nucleic acid with a polypeptide of the present invention. In some embodiments, all or a portion of the polypeptide has at least about 70%, 75%, 80%, 85%, 90%, 95%, 96%, 97%, 98%, 99%, or more sequence identity to one or more of SEQ ID NOs: 234-245, 299-310, 390-399, 537-560, 702-704, 735-740, and 757-760. A polypeptide of the present invention may reverse transcribe the target nucleic acid to provide a DNA (e.g., a cDNA). In some embodiments, the target nucleic acid is in a plant and/or in a plant cell that includes a cell wall. In some embodiments, the target nucleic acid is in a mammal and/or is in a mammalian cell.

[0249] Methods of modifying a target nucleic acid are provided herein and may comprise contacting the target nucleic acid with a polypeptide of the present invention and a guide nucleic acid. In some embodiments, all or a portion of the polypeptide has at least about 70%, 75%, 80%, 85%, 90%, 95%, 96%, 97%, 98%, 99%, or more sequence identity to one or more of SEQ ID NOs: 234-245, 299-310, 351-362, 390-399, 450-461, 486-497, 537-560, 609-639, 702-704, 735-740, and 757-760. In some embodiments, the target nucleic acid is in a plant and/or in a plant cell that includes a cell wall. In some embodiments, the method of modifying the target nucleic acid is a templated editing method.

[0250] A method of the present invention may comprise contacting the target nucleic acid with an extended guide nucleic acid. In some embodiments, the extended guide nucleic acid comprises a primer binding site and the target nucleic acid is double stranded and comprises a first strand and a second strand. In some embodiments, the primer binding site of the extended guide nucleic acid binds to the first strand or to the second strand of the target nucleic acid. In some embodiments, the second strand is the non-target strand of the target nucleic acid. In some embodiments, the target nucleic acid is double stranded and comprises a first strand and a second strand and the primer binding site binds to the first strand of the target nucleic acid. The first strand may be the target strand of the target nucleic acid and/or a polypeptide of the present invention may be recruited to the first strand. In some embodiments, the target nucleic acid is double stranded and comprises a first strand and a second strand and the primer binding site of the extended guide nucleic acid binds to the second strand of the target nucleic acid. In some embodiments, the second strand is the non-target strand of the target nucleic acid and/or the polypeptide of the present invention is recruited to the second strand. In some embodiments, the polypeptide of the present invention is a double stranded nuclease that cuts the first strand and the second strand of the target nucleic acid resulting in a double stranded break. In some embodiments, the polypeptide of the present invention and the extended guide nucleic acid form a complex or are comprised in a complex.

[0251] A method of the present invention may comprise contacting a target nucleic acid with and/or introducing into a cell an extended guide nucleic acid that comprises (i) a CRISPR nucleic acid and/or a CRISPR nucleic acid and a tracr nucleic acid; and (ii) an extended portion comprising a primer binding site and a reverse transcriptase template (RT template). In some embodiments, the extended portion of the extended guide nucleic acid is fused to either the 5′ end or 3′ end of the CRISPR nucleic acid (e.g., 5′ to 3′: repeat-spacer-extended portion, or extended portion-repeat-spacer) and/or to the 5′ or 3′ end of the tracr nucleic acid. In some embodiments, the extended portion of the extended guide nucleic acid comprises, 5′ to 3′, an RT template and a primer binding site. In some embodiments, the extended portion of the extended guide nucleic acid is located 5′ of the crRNA.

[0252] In some embodiments, the primer binding site has a length of about one nucleotide to about 100 nucleotides. In some embodiments, the primer binding site is at least 45 nucleotides in length or about 45 nucleotides to about 100 nucleotides, e.g., 45, 46, 47, 48, 49, 50, 51, 52, 53, 54, 55, 56, 57, 58, 59, 60, 61, 62, 63, 64, 65, 66, 67, 68, 69, 70, 71, 72, 73, 74, 75, 76, 77, 78, 79, 80, 81, 82, 83, 84, 85, 86, 87, 88, 89, 90, 91, 92, 93, 94, 95, 96, 97, 98, 99, or 100 nucleotides in length.

[0253] In some embodiments, the RT template has a length of about one to about 100 nucleotides, or the RT template can have a length of about 40 nucleotides or less, e.g., 40, 39, 38, 37, 36, 35, 34, 33, 32, 31, 30, 29, 28, 27, 26, 25, 24, 23, 22, 21, 20, 19, 18, 17, 16, 15, 14, 13, 12, 11, 10, 9, 8, 7, 6, 5, 4, 3, 2, or 1 nucleotide.

[0254] In some embodiments, the extended portion of the extended guide nucleic acid is linked to the CRISPR nucleic acid and/or the tracrRNA via a linker. The linker may be about 1 to about 100 nucleotides in length, e.g., 1, 2, 3, 4, 5, 6, 7, 8, 9, 10, 11, 12, 13, 14, 15, 16, 17, 18, 19, 20, 21, 22, 23, 24, 25 26, 27, 28, 29, 30, 31, 32, 33, 34, 35, 36, 37, 38, 39, 40, 41, 42, 43, 44, 45, 46, 47, 48, 49, 50, 51, 52, 53, 54, 55, 56, 57, 58, 59, 60, 61, 62, 63, 64, 65, 66, 67, 68, 69, 70, 71, 72, 73, 74, 75, 76, 77, 78, 79, 80, 81, 82, 83, 84, 85, 86, 87, 88, 89, 90, 91, 92, 93, 94, 95, 96, 97, 98, 99, or 100 nucleotides in length.

[0255] In some embodiments, in a method of the present invention, a polypeptide of the present invention is a fusion protein. In some embodiments, the polypeptide of the present invention is fused to one or more components that recruit a deaminase and/or reverse transcriptase to the polypeptide. In some embodiments, a circular permutant of the present invention is fused, e.g. linked, to a peptide tag, for example, an epitope or a multimerized epitope, and a reverse transcriptase is fused, e.g., linked, to an affinity polypeptide that binds to the peptide tag. In some embodiments, a circular permutant of the present invention is fused, e.g., linked, to a peptide tag, for example, an epitope or a multimerized epitope, and a reverse transcriptase is fused (linked) to an affinity polypeptide that binds to the peptide tag. In some embodiments, the target nucleic acid is contacted with two or more reverse transcriptases.

[0256] In some embodiments, an extended guide nucleic acid is linked to an RNA recruiting motif, and a reverse transcriptase is fused, e.g., linked, to an affinity polypeptide that binds to the RNA recruiting motif. In some embodiments, the target nucleic acid is contacted with two or more reverse transcriptases. In some embodiments, the extended guide nucleic acid, e.g. extended guide RNA, is linked to two or more RNA recruiting motifs, optionally wherein the two or more RNA recruiting motifs are the same RNA recruiting motif or different RNA recruiting motifs. In some embodiments, at least one of the two or more RNA recruiting motifs is located on the 3′ end of the extended portion of the extended guide nucleic acid or is embedded in the extended portion.

[0257] A method of the present invention may comprise contacting the target nucleic acid with a Dna2 polypeptide and/or a 5′ flap endonuclease (FEN). In some embodiments, the FEN and/or Dna2 polypeptide is overexpressed (e.g., overexpressed in the presence of the target nucleic acid). In some embodiments, the FEN is a fusion protein comprising an FEN domain fused to the CRISPR-Cas effector protein and/or wherein the Dna2 polypeptide is a fusion protein comprising an Dna2 domain fused to the CRISPR-Cas effector protein. In some embodiments, the CRISPR-Cas effector protein is a first CRISPR-Cas effector protein and the method includes a step of contacting the target nucleic acid with a second CRISPR-Cas effector protein. In some embodiments, the first CRISPR-Cas effector protein nicks or cuts a first site on the first strand of a double stranded target nucleic acid. In some embodiments, the nicking or cut site is located about 10 to about 125 base pairs upstream or downstream, e.g., 5′ or 3′, from a second site on the second strand of the target nucleic acid that has been nicked by a second CRISPR-Cas effector protein.

[0258] In some embodiments, a method of the present invention has increased efficiency in modifying a target nucleic acid compared to the efficiency of a control method (e.g., a method that uses a control Cas12a and is performed under the same conditions). A method of the present invention may generate increased indels and/or increased levels of modification (e.g., precise modifications) compared to a control method.

[0259] In some embodiments, a complex and/or method of the present invention may be a complex and/or method as described in U.S. Patent Application Publication No. 2021/0130835 and/or in U.S. Patent Application Publication No. 2022/0145334, the contents of each of which are incorporated herein by reference in their entirety.

[0260] In some embodiments, an editing system of the present invention is used in prime editing. “Prime editing” and grammatical variants thereof as used herein refer to a nucleic acid editing technology that uses a Cas9 nickase domain fused to a reverse transcriptase and modifies a target nucleic acid without a double strand break or a donor DNA template. In Prime editing, the Cas9 nickase domain cuts the non-complementary strand of DNA upstream of the PAM site, thereby providing a 3′ flap that is extended with the extension including a modification. Further details on Prime editing can be found in Anzalone et al. (2019) Nature 576, 149-157 and/or U.S. Patent Application Publication No. 2021/0147862, the contents of each of which are incorporated herein by reference in their entirety.

[0261] In some embodiments, an editing system of the present invention utilizes the Redraw editing system. Further details on the Redraw editing system can be found in U.S. Patent Application Publication No. 2021/0130835 and/or in U.S. Patent Application Publication No. 2022/0145334, the contents of each of which are incorporated herein by reference in their entirety.

[0262] As described herein, polypeptides of the present invention, nucleic acids, expression cassettes, and/or vectors of the present invention may be codon optimized for expression in an organism. An organism useful with this invention may be any organism or cell thereof for which nucleic acid modification may be useful. An organism can include, but is not limited to, any animal (e.g., a mammal), any plant, any fungus, any archaeon, or any bacterium. In some embodiments, the organism may be a plant or cell thereof. In some embodiments, the organism is an animal such as a mammal (e.g., a human). In some embodiments, an expression cassette and/or vector may be optimized for expression in an organism by including an organism specific promoter sequence, terminator sequence, nuclear localization sequence (NLS), and/or codon optimization. In some embodiments, an expression cassette and/or vector may be optimized for expression in a plant (e.g., soy).

[0263] The target nucleic acid may be a genomic sequence from any organism (e.g., eukaryote such as a mammal or a plant). In some embodiments, the target nucleic acid is a genomic sequence from a model organism such as, but not limited to, Escherichia coli, an immortalized human cell line (e.g., HEK293, HeLa, etc.), Caenorhabditis elegans, and/or Drosophila Melanogaster. In some embodiments, the target nucleic acid is a genomic sequence from a non-model organism. Exemplary non-model organisms include, but are not limited to crop plants (e.g., fruit crop plants, vegetable crop plants, and/or field crop plants) and/or animals such as humans, primates and/or mice. In some embodiments, the non-model organism is a crop plant such as corn, soybean, wheat, or canola. In some embodiments, the non-model organism is an animal for testing and/or use of a human therapeutic.

[0264] A target nucleic acid of any plant or plant part may be modified using the nucleic acid constructs of the invention. Any plant (or groupings of plants, for example, into a genus or higher order classification) may be modified using a polypeptide of the present invention including an angiosperm, a gymnosperm, a monocot, a dicot, a C3, C4, CAM plant, a bryophyte, a fern and/or fern ally, a microalgae, and/or a macroalgae. A plant and/or plant part useful with this invention may be a plant and/or plant part of any plant species/variety/cultivar. The term “plant part,” as used herein, includes but is not limited to, embryos, pollen, ovules, seeds, leaves, stems, shoots, flowers, branches, fruit, kernels, ears, cobs, husks, stalks, roots, root tips, anthers, plant cells including plant cells that are intact in plants and/or parts of plants, plant protoplasts, plant tissues, plant cell tissue cultures, plant calli, plant clumps, and the like. As used herein, “shoot” refers to the above ground parts including the leaves and stems. Further, as used herein, “plant cell” refers to a structural and physiological unit of the plant, which comprises a cell wall and also may refer to a protoplast. A plant cell can be in the form of an isolated single cell or can be a cultured cell or can be a part of a higher-organized unit such as, for example, a plant tissue or a plant organ.

[0265] Non-limiting examples of plants useful with the present invention include turf grasses (e.g., bluegrass, bentgrass, ryegrass, fescue), feather reed grass, tufted hair grass, miscanthus, arundo, switchgrass, vegetable crops, including artichokes, kohlrabi, arugula, leeks, asparagus, lettuce (e.g., head, leaf, romaine), malanga, melons (e.g., muskmelon, watermelon, crenshaw, honeydew, cantaloupe), cole crops (e.g., brussels sprouts, cabbage, cauliflower, broccoli, collards, kale, Chinese cabbage, bok choy), cardoni, carrots, napa, okra, onions, celery, parsley, chick peas, parsnips, chicory, peppers, potatoes, cucurbits (e.g., marrow, cucumber, zucchini, squash, pumpkin, honeydew melon, watermelon, cantaloupe), radishes, dry bulb onions, rutabaga, eggplant, salsify, escarole, shallots, endive, garlic, spinach, green onions, squash, greens, beet (sugar beet and fodder beet), sweet potatoes, chard, horseradish, tomatoes, turnips, and spices; a fruit crop such as apples, apricots, cherries, nectarines, peaches, pears, plums, prunes, cherry, quince, fig, nuts (e.g., chestnuts, pecans, pistachios, hazelnuts, pistachios, peanuts, walnuts, macadamia nuts, almonds, and the like), citrus (e.g., clementine, kumquat, orange, grapefruit, tangerine, mandarin, lemon, lime, and the like), blueberries, black raspberries, boysenberries, cranberries, currants, gooseberries, loganberries, raspberries, strawberries, blackberries, grapes (wine and table), avocados, bananas, kiwi, persimmons, pomegranate, pineapple, tropical fruits, pomes, melon, mango, papaya, and lychee, a field crop plant such as clover, alfalfa, timothy, evening primrose, meadow foam, corn/maize (field, sweet, popcorn), hops, jojoba, buckwheat, safflower, quinoa, wheat, rice, barley, rye, millet, sorghum, oats, triticale, sorghum, tobacco, kapok, a leguminous plant (beans (e.g., green and dried), lentils, peas, soybeans), an oil plant (rape, canola, mustard, poppy, olive, sunflower, coconut, castor oil plant, cocoa bean, groundnut, oil palm), duckweed, Arabidopsis, a fiber plant (cotton, flax, hemp, jute), Cannabis (e.g., Cannabis sativa, Cannabis indica, and Cannabis ruderalis), lauraceae (cinnamon, camphor), or a plant such as coffee, sugar cane, tea, and natural rubber plants; and/or a bedding plant such as a flowering plant, a cactus, a succulent and/or an ornamental plant (e.g., roses, tulips, violets), as well as trees such as forest trees (broad-leaved trees and evergreens, such as conifers; e.g., elm, ash, oak, maple, fir, spruce, cedar, pine, birch, cypress, eucalyptus, willow), as well as shrubs and other nursery stock. In some embodiments, the nucleic acid constructs of the invention and/or expression cassettes and/or vectors encoding the same may be used to modify maize, soybean, wheat, canola, rice, tomato, pepper, sunflower, raspberry, blackberry, black raspberry and/or cherry.

[0266] In some embodiments, the invention provides cells (e.g., plant cells, animal cells, bacterial cells, archaeon cells, and the like) comprising the polypeptides, polynucleotides, nucleic acid constructs, expression cassettes or vectors of the invention.

[0267] The present invention further comprises a kit or kits to carry out the methods of this invention. A kit of this invention can comprise reagents, buffers, and apparatus for mixing, measuring, sorting, labeling, etc., as well as instructions and the like as would be appropriate for modifying a target nucleic acid.

[0268] In some embodiments, the invention provides a kit for comprising one or more polypeptides of the present invention (e.g., circular permutants), nucleic acid constructs of the present invention, and/or expression cassettes and/or vectors and/or cells comprising the same as described herein, with optional instructions for the use thereof. In some embodiments, a kit may further comprise a CRISPR-Cas guide nucleic acid (corresponding to a Cas12a protein as provided herein, which may be encoded by a polynucleotide) and/or expression cassettes and/or vectors and or cells comprising the same. In some embodiments, a guide nucleic acid may be provided on the same expression cassette and/or vector as one or more nucleic acid constructs of the invention. In some embodiments, the guide nucleic acid may be provided on a separate expression cassette or vector from that comprising the one or more nucleic acid constructs of the invention.

[0269] Accordingly, in some embodiments, kits are provided comprising a nucleic acid construct comprising (a) a polynucleotide(s) as provided herein and (b) a promoter that drives expression of the polynucleotide(s) of (a). In some embodiments, the kit may further comprise a nucleic acid construct encoding a guide nucleic acid, wherein the construct comprises a cloning site for cloning of a nucleic acid sequence identical or complementary to a target nucleic acid sequence into backbone of the guide nucleic acid.

[0270] In some embodiments, the nucleic acid construct of the invention may be an mRNA that may encode one or more introns within the encoded polynucleotide(s). In some embodiments, the nucleic acid constructs of the invention, and/or an expression cassettes and/or vectors comprising the same, may further encode one or more selectable markers useful for identifying transformants (e.g., a nucleic acid encoding an antibiotic resistance gene, herbicide resistance gene, and the like).

[0271] A polypeptide, polynucleotide, nucleic acid construct, expression cassette, vector, composition, kit, system and/or cell of the present invention may comprise all or a portion of a sequence of one or more of SEQ ID NOs: 1-951. In some embodiments, if not present in an amino acid sequence described herein and/or encoded in a nucleotide sequence described herein, the amino acid sequence and/or the nucleotide sequence may further include 1, 2, 3, 4, or 5 additional amino acid(s) or corresponding nucleotides such as a methionine at amino acid residue 1 of the amino acid sequence or the corresponding nucleotides and/or 1, 2, 3, or 4 additional amino acid(s) such as glycine or alanine or the corresponding nucleotides, which may aid in expression or enable the construction or cloning as needed for construction of a plasmid or construct or vector. In some embodiments, if present in an amino acid sequence described herein and/or encoded in a nucleotide sequence described herein, the amino acid sequence and/or the nucleotide sequence may be devoid of 1, 2, 3, 4, or 5 amino acid(s) present at amino acid residues 1-5 at the N-terminus of the amino acid sequence or corresponding nucleotides such as a methionine at amino acid residue 1 of the amino acid sequence or the corresponding nucleotides and/or 1, 2, 3, or 4 additional amino acid(s) such as glycine or alanine or the corresponding nucleotides, which may aid in expression or enable the construction or cloning as needed for construction of a plasmid or construct or vector. In some embodiments, a polypeptide, polynucleotide, nucleic acid construct, expression cassette, vector, composition, kit, system and/or cell of the present invention may comprise at least about 20%, 25%, 30%, 35%, 40%, 45%, 50%, 55%, 60%, 65%, 70%, 75%, 80%, 85%, 90%, 95%, 96%, 97%, 98%, 99%, or more consecutive amino acids or nucleotides of a sequence of one or more of SEQ ID NOs: 1-951.

[0272] The invention will now be described with reference to the following examples. It should be appreciated that these examples are not intended to limit the scope of the claims to the invention, but are rather intended to be exemplary of certain embodiments. Any variations in the exemplified methods that occur to the skilled artisan are intended to fall within the scope of the invention.

### EXAMPLES

### Example 1

[0273] Circular permutants were prepared based on LbCas12a (SEQ ID NO:56). Table 1 describes the location at which the N-terminus for the circular permutant was selected to begin relative to LbCas12a.

TABLE 1
Circular permutation of LbCas12a designs

| | | Amino acid residue of |
|---|---|---|
| | | LbCas12a that corresponds |
| Loop Number of | | to the N-terminus of the |
| LbCas12a | Selected Cut Point | circular permutant |
| 3 | After amino acid residue 84 of LbCas12a | 85 |
| 4 | After amino acid residue 291 of LbCas12a | 292 |
| 5 | After amino acid residue 1155 of | 1156 |
| | LbCas12a | |
| 9 | After amino acid residue 516 of LbCas12a | 517 |
| 10 | After amino acid residue 442 of LbCas12a | 443 |
| 14 | After amino acid residue 1117 of | 1118 |
| | LbCas12a | |

[0274] A glycine-serine linker was used to connect the native N- and C-termini of LbCas12a. The glycine-serine linker had either 10 amino acids and a sequence of (GSS)ₙG (SEQ ID NO: 36), wherein n is 3, or 16 amino acids and a sequence of (GSS)ₙG (SEQ ID NO:36), wherein n is 5. The circular permutants are listed in Table 2.

TABLE 2
Circular Permutants

| | Vector | DNA | | Protein |
|---|---|---|---|---|
| | SEQ | SEQ | | SEQ |
| pWISE | ID NO: | ID NO: | Description | ID NO: |
| pWISE121 | 259 | 246 | WT-LbCas12a (control) | 56 |
| pWISE8345 | 260 | 247 | Loop 3; 10-aa GS linker | 234 |
| pWISE8346 | 261 | 248 | Loop 3; 16-aa GS linker | 235 |
| pWISE8347 | 262 | 249 | Loop 4; 10-aa GS linker | 236 |
| pWISE8348 | 263 | 250 | Loop 4; 16-aa GS linker | 237 |
| pWISE8349 | 264 | 251 | Loop 5; 10-aa GS linker | 238 |
| pWISE8350 | 265 | 252 | Loop 5; 16-aa GS linker | 239 |
| pWISE8351 | 266 | 253 | Loop 9; 10-aa GS linker | 240 |
| pWISE8352 | 267 | 254 | Loop 9; 16-aa GS linker | 241 |
| pWISE8353 | 268 | 255 | Loop 10; 10-aa GS linker | 242 |
| pWISE8354 | 269 | 256 | Loop 10; 16-aa GS linker | 243 |
| pWISE8355 | 270 | 257 | Loop 14; 10-aa GS linker | 244 |
| pWISE8356 | 271 | 258 | Loop 14; 16-aa GS linker | 245 |

### Example 2

[0275] The circular permutants of Example 1 were tested for their ability to generate INDELS at three different target nucleic acids (SEQ ID NOs: 272-274) in HEK293T cells. As a control, LbCas12a was also tested for its ability to generate INDELS at the three target nucleic acids (SEQ ID NOs: 272-274) in HEK293T cells (Table 3).

TABLE 3
Targets

| Target | Target | | Spacer | | Vector |
|---|---|---|---|---|---|
| Nucleic | SEQ | | SEQ | | SEQ |
| Acid | ID NO: | Spacer | ID NO: | pWISE | ID NO: |
| human DNMT1 | 272 | PWsp143 | 275 | pWISE264 | 278 |
| human FANCF | 273 | PWsp449 | 276 | pWISE878 | 279 |
| human RNF2 | 274 | PWsp453 | 277 | pWISE882 | 280 |

[0276] Edit characterization was performed using a bioinformatic workflow. First, low quality base-pairs and bases matching Illumina adapter sequences were trimmed using HtStream. High quality reads were then aligned to the amplicon references using bbmap. The CIGAR string, which represents the number of matches and INDELs, was parsed for each aligned read to generate an edit string. The edit string includes the starting location and length of each INDEL relative to the reference.

[0277] The results are shown in FIGS. 2-4 and demonstrate that all of the circular permutants are functional. As shown in FIG. 2, excellent INDELs were observed for control (WT-LbCas12a) at all three target sites and INDELs were generated at a high enough level for the circular permutants. For the control (pWISE121) and each circular permutant (pWISE8345-pWISE8356) the deletion lengths were parsed for each observed edit. As shown in FIG. 3, the deletion length distribution was examined at the three target sites (PWsp143, PWsp449, and PWsp453). The majority of deletions are between 1-5 base pair(s) (bp) long irrespective of the target. When looking at circular permutants compared to the controls, changes are observed in the deletion size distribution as shown in FIG. 3. For example, for pWISE8351 with PWsp143, it can be seen that 9 bp deletions were the most common, whereas, for the control (pWISE121) with PWsp143, 4 bp deletions were the most common. While at PWsp449 for pWISE8351, an increase in 1 and 2 bp deletions was seen compared to the control at PWsp449.

[0278] For the control (pWISE121) and each circular permutant (pWISE8345-pWISE8356) the deletion positions were parsed for each observed edit. As shown in FIG. 4, the deletion starting location distribution was examined at the three target sites (PWsp143, PWsp449, and PWsp453). Kenerl density estimate (kde) was used to fit a smoothed line to the observed distribution to aid in visualization. As can be seen in FIG. 4, there are clear differences in the location of the 1st bp of the deletion between circular permutants and the control. For example, as shown in FIG. 4, pWISE8352 shows a shift in the starting location towards the expected cut site on the target strand (dashed line) at all three sites. Conversely, as shown in FIG. 4, pWISE8354 shows a widening of the distribution with a shift away from the expected cut site at PWsp449 and PWsp453.

### Example 3

[0279] Circular permutants of LbCas12a according to some embodiments of the present invention were tested for REDRAW editing by fusing a mutated Moloney Murine Leukemia Virus Reverse Transcriptase (MMLV-RT (5M); SEQ ID NO:209) to either the N-terminus or C-terminus of the circular permutant to provide a fusion protein. These fusion proteins, along with the controls, are listed in Table 4.

TABLE 4
REDRAW constructs tested.

| | Vector SEQ | DNA SEQ | Protein SEQ |
|---|---|---|---|
| pWISE | ID NO: | ID NO: | ID NO: |
| pWISE121 | 259 | 246 | 56 |
| pWISE6099 | 886 | 948 | 158 |
| pWISE9459 | 377 | 364 | 351 |
| pWISE9460 | 378 | 365 | 352 |
| pWISE9461 | 379 | 366 | 353 |
| pWISE9462 | 380 | 367 | 354 |
| pWISE9463 | 381 | 368 | 355 |
| pWISE9464 | 382 | 369 | 356 |
| pWISE9465 | 383 | 370 | 357 |
| pWISE9466 | 384 | 371 | 358 |
| pWISE9467 | 385 | 372 | 359 |
| pWISE9468 | 386 | 373 | 360 |
| pWISE9469 | 387 | 374 | 361 |
| pWISE9470 | 388 | 375 | 362 |
| pWISE9471 | 389 | 376 | 363 |

[0280] The fusion proteins were tested for their precise editing ability and ability to generate INDELS at three different target nucleic acids (SEQ ID NOs: 272-274) in HEK293T cells using three spacers (SEQ ID NOs: 275-277). Controls used in these experiments were LbCas12a (SEQ ID NO:56), RE2 (SEQ ID NO:158), and RE2 reverse (SEQ ID NO:363). Three biological replicates (HCF806, HCF807, and HCF808) and two technical replicates were tested. HEK293T cells were seeded into 48-well collagen-coated plates (Corning) in the absence of an antibiotic using DMEM media. At 70-80% confluency, cells were transfected with 1.5 μL of LTX (ThermoFisher Scientific) using 500 ng of the control or fusion protein plasmid and 500 ng of guide RNA plasmid according to manufacturer's protocol. After 3 days, the cells were lysed with a crude extraction method using TritonX buffer. Each control or fusion protein was scored based on the precise base pair editing and indel placement percentage in the DNMT1, FANCF, and RNF2 genes using the guide RNAs. Results are provided in FIGS. 6A, 6B, 7A, 7B, 8A, 8B, and 10A-10C and demonstrate that certain fusion proteins showed significant precise editing and indel frequency. In general, the fusion proteins with a C-terminal MMLV-RT (5M) showed slightly improved editing and INDEL efficiency in comparison to the fusion proteins with an N-terminal MMLV-RT (5M). Moreover, the fusion protein with the CP02 circular permutant and MMLV-RT (5M) at the C-terminus (SEQ ID NO: 357) and the fusion protein with the CP12 circular permutant and MMLV-RT (5M) at the C-terminus (SEQ ID NO:362) had the highest editing and INDEL efficiency. FIGS. 9A and 9B show that the newly placed termini of CP02 and CP12 are placed near the target strand DNA. The indel frequency of the tested guide RNAs, as crRNA, against the target DNMT1, FANCF, and RNF2 loci were tested as a control (FIG. 5).

### Example 4

[0281] Circular permutants of LbCas12a according to some embodiments of the present invention were tested for cytosine base editing by fusing a cytosine deaminase (SEQ ID NO: 798) to either the N-terminus or C-terminus of the circular permutant to provide a fusion protein. The tested constructs are provided in Table 5.

TABLE 5
Tested constructs

| | Vector SEQ | DNA SEQ | Protein SEQ |
|---|---|---|---|
| pWISE | ID NO: | ID NO: | ID NO: |
| pWISE121 | 259 | 246 | 56 |
| pWISE1921 | 444 | 436 | 428 |
| pWISE1925 | 445 | 437 | 429 |
| pWISE4332 | 446 | 438 | 430 |
| pWISE4339 | 447 | 439 | 431 |
| pWISE6852 | 448 | 440 | 432 |
| pWISE6853 | 449 | 441 | 433 |
| pWISE9117 | 474 | 462 | 450 |
| pWISE9118 | 475 | 463 | 451 |
| pWISE9119 | 476 | 464 | 452 |
| pWISE9120 | 477 | 465 | 453 |
| pWISE9121 | 478 | 466 | 454 |
| pWISE9122 | 479 | 467 | 455 |
| pWISE9123 | 480 | 468 | 456 |
| pWISE9124 | 481 | 469 | 457 |
| pWISE9125 | 482 | 470 | 458 |
| pWISE9126 | 483 | 471 | 459 |
| pWISE9127 | 484 | 472 | 460 |
| pWISE9128 | 485 | 473 | 461 |
| pWISE9134 | 442 | 434 | 426 |
| pWISE9135 | 443 | 435 | 427 |

[0282] The fusion proteins and controls were tested for their ability to perform base editing at five different sites in three target nucleic acids (SEQ ID NOs: 273, 863, and 864) in HEK293T cells using five spacers (SEQ ID NOs: 276, and 799-802). A single biological replicate and two technical replicates were tested. Controls used in this study were: pWISE9134 which is a dead LbCas12a fused to a cytosine deaminase by a GS-XTEN-GS linker; pWISE9135 which is a dead LbCas12a fused a cytosine deaminase at the C-terminus of the dead LbCas12a via a GS-XTEN-GS linker; and pWISE121 which is wild-type LbCas12a. HEK293T cells were seeded into 48-well collagen-coated plates (Corning) in the absence of an antibiotic using DMEM media. At 70-80% confluency, cells were transfected with 1.5 μL of LTX (ThermoFisher Scientific) using 500 ng of the control or fusion protein plasmid and 500 ng of guide RNA plasmid according to manufacturer's protocol. After 3 days, the cells were lysed with a crude extraction method using TritonX buffer. Each control or fusion protein was scored based on the precise base pair editing in the FANCF, RUNX1, and AAVS1 genes using the guide RNAs (SEQ ID NOs: 276 and 799-802). These guide RNAs were also tested using control LbCas12a (SEQ ID NO:56) as shown in FIG. 11. The results are provided in Tables 6-25. As seen in Tables 6, 7, 10, 11, 14, 15, 18, 19, 22, and 23, fusion of a cytosine deaminase at the N-terminus of a circular permutant produced effective C to T editing on the non-target DNA strand in almost all genes. Surprisingly, the fusion protein with circular permutant CP08 (SEQ ID NO:453) demonstrated G to A editing on the non-target strand, corresponding to C to T changes on the target strand (Tables 8, 9, 12, 13, 16, 17, 20, 21, 24, and 25). The values in Tables 6-25 that are below 0.1% are considered to be in the noise of the instrument (below the limit of detection) and are not indicative of editing. Values that are between 0.1% and 0.5% indicate that editing is present in the experiment at the specified location, but the assay is not sensitive enough to accurately quantify the amount of base editing. This was unexpected as typical cytosine base editors (e.g., SEQ ID NOs: 426-429) are not capable of deaminating cytosines on the target strand within the spacer sequence.

TABLE 6

| | | Average C to T editing percent at the nucleotides numbered | | | | | | |
|---|---|---|---|---|---|---|---|---|
| | Protein | according to the position in the PWsp132 spacer sequence | | | | | | |
| | SEQ | on the non-target, genomic DNA strand | | | | | | |
| pWISE | ID NO: | C.-7 | C.-6 | C.-4 | C.-1 | C.2 | C.3 | C.11 |
| pWISE121 | 56 | 0.004% | 0.002% | 0.000% | 0.004% | 0.000% | 0.063% | 0.138% |
| pWISE1921 | 428 | 0.127% | 0.068% | 0.030% | 0.445% | 0.049% | 0.183% | 24.432% |
| pWISE1925 | 429 | 0.132% | 0.086% | 0.054% | 0.481% | 0.028% | 0.100% | 18.509% |
| pWISE4332 | 430 | 0.086% | 0.052% | 0.006% | 0.348% | 0.004% | 0.028% | 13.214% |
| pWISE4339 | 431 | 0.541% | 0.548% | 0.008% | 0.119% | 0.003% | 0.011% | 14.075% |
| pWISE6852 | 432 | 0.045% | 0.020% | 0.004% | 0.128% | 0.001% | 0.009% | 13.502% |
| pWISE6853 | 433 | 0.005% | 0.004% | 0.000% | 0.396% | 0.005% | 0.033% | 20.059% |
| pWISE9117 | 450 | 0.090% | 0.079% | 0.014% | 0.498% | 0.024% | 0.024% | 22.359% |
| pWISE9118 | 451 | 0.826% | 0.832% | 0.000% | 0.828% | 0.003% | 0.001% | 7.529% |
| pWISE9119 | 452 | 0.289% | 0.075% | 0.000% | 0.717% | 0.005% | 0.011% | 31.457% |
| pWISE9120 | 453 | 0.005% | 0.005% | 0.000% | 0.432% | 0.000% | 0.005% | 1.165% |
| pWISE9121 | 454 | 0.068% | 0.049% | 0.011% | 0.200% | 0.009% | 0.003% | 5.654% |
| pWISE9122 | 455 | 0.146% | 0.060% | 0.017% | 0.822% | 0.016% | 0.331% | 19.868% |
| pWISE9123 | 456 | 0.132% | 0.030% | 0.003% | 0.639% | 0.042% | 0.066% | 33.596% |
| pWISE9124 | 457 | 0.045% | 0.027% | 0.013% | 0.203% | 0.002% | 0.009% | 12.865% |
| pWISE9125 | 458 | 0.347% | 0.116% | 0.031% | 0.907% | 0.063% | 0.046% | 24.770% |
| pWISE9126 | 459 | 0.052% | 0.027% | 0.000% | 0.065% | 0.010% | 0.012% | 2.197% |
| pWISE9127 | 460 | 0.027% | 0.002% | 0.012% | 0.072% | 0.006% | 0.003% | 2.337% |
| pWISE9128 | 461 | 0.193% | 0.064% | 0.028% | 1.092% | 0.009% | 0.009% | 26.677% |
| pWISE9134 | 426 | No data | No data | No data | No data | No data | No data | No data |
| pWISE9135 | 427 | 0.495% | 0.225% | 0.071% | 1.249% | 0.065% | 0.106% | 30.645% |

| | | Average C to T editing percent at the nucleotides numbered | | | | | |
|---|---|---|---|---|---|---|---|
| | Protein | according to the position in the PWsp132 spacer sequence | | | | | |
| | SEQ | on the non-target, genomic DNA strand | | | | | |
| pWISE | ID NO: | C.14 | C.17 | C.19 | C.21 | C.24 | C.28 |
| pWISE121 | 56 | 0.277% | 0.166% | 0.468% | 0.077% | 0.141% | 0.100% |
| pWISE1921 | 428 | 14.118% | 0.888% | 12.688% | 12.201% | 0.077% | 0.000% |
| pWISE1925 | 429 | 9.889% | 0.804% | 10.183% | 7.735% | 0.065% | 0.000% |
| pWISE4332 | 430 | 10.446% | 0.655% | 7.603% | 4.914% | 0.088% | 0.004% |
| pWISE4339 | 431 | 10.742% | 0.229% | 3.610% | 1.972% | 0.030% | 0.006% |
| pWISE6852 | 432 | 9.480% | 0.205% | 7.076% | 4.012% | 0.000% | 0.001% |
| pWISE6853 | 433 | 14.378% | 0.274% | 7.868% | 3.897% | 0.056% | 0.005% |
| pWISE9117 | 450 | 15.118% | 1.821% | 13.456% | 7.506% | 0.068% | 0.017% |
| pWISE9118 | 451 | 4.418% | 1.974% | 7.519% | 10.685% | 0.001% | 0.001% |
| pWISE9119 | 452 | 29.350% | 5.438% | 25.789% | 29.548% | 1.016% | 0.075% |
| pWISE9120 | 453 | 0.742% | 0.005% | 0.785% | 2.237% | 0.371% | 0.000% |
| pWISE9121 | 454 | 3.083% | 0.809% | 2.868% | 4.221% | 0.030% | 0.006% |
| pWISE9122 | 455 | 22.961% | 1.819% | 18.625% | 18.934% | 0.530% | 0.015% |
| pWISE9123 | 456 | 30.464% | 3.149% | 25.577% | 18.123% | 0.084% | 0.021% |
| pWISE9124 | 457 | 10.678% | 1.617% | 13.999% | 10.984% | 0.088% | 0.013% |
| pWISE9125 | 458 | 13.647% | 3.699% | 17.469% | 5.738% | 0.065% | 0.029% |
| pWISE9126 | 459 | 0.858% | 0.193% | 1.201% | 1.043% | 0.072% | 0.002% |
| pWISE9127 | 460 | 0.791% | 0.040% | 0.819% | 0.713% | 0.013% | 0.002% |
| pWISE9128 | 461 | 16.895% | 0.743% | 9.214% | 10.269% | 0.101% | 0.000% |
| pWISE9134 | 426 | No data | No data | No data | No data | No data | No data |
| pWISE9135 | 427 | 17.210% | 4.584% | 20.697% | 7.073% | 0.079% | 0.010% |

TABLE 7

| | | Standard Deviation of the average editing percent at the nucleotides | | | | | | |
|---|---|---|---|---|---|---|---|---|
| | Protein | numbered according to the position in the PWsp132 spacer | | | | | | |
| | SEQ | sequence on the non-target, genomic DNA strand | | | | | | |
| pWISE | ID NO: | C.-7 | C.-6 | C.-4 | C.-1 | C.2 | C.3 | C.11 |
| pWISE121 | 56 | 0.000% | 0.003% | 0.000% | 0.005% | 0.000% | 0.089% | 0.149% |
| pWISE1921 | 428 | No data | No data | No data | No data | No data | No data | No data |
| pWISE1925 | 429 | 0.139% | 0.025% | 0.064% | 0.151% | 0.027% | 0.058% | 0.616% |
| pWISE4332 | 430 | No data | No data | No data | No data | No data | No data | No data |
| pWISE4339 | 431 | 0.708% | 0.688% | 0.011% | 0.168% | 0.004% | 0.006% | 2.500% |
| pWISE6852 | 432 | 0.064% | 0.020% | 0.005% | 0.173% | 0.001% | 0.012% | 2.875% |
| pWISE6853 | 433 | 0.007% | 0.004% | 0.000% | 0.335% | 0.007% | 0.047% | 0.156% |
| pWISE9117 | 450 | 0.091% | 0.065% | 0.020% | 0.114% | 0.015% | 0.012% | 0.380% |
| pWISE9118 | 451 | No data | No data | No data | No data | No data | No data | No data |
| pWISE9119 | 452 | No data | No data | No data | No data | No data | No data | No data |
| pWISE9120 | 453 | No data | No data | No data | No data | No data | No data | No data |
| pWISE9121 | 454 | 0.088% | 0.069% | 0.016% | 0.248% | 0.004% | 0.005% | 0.060% |
| pWISE9122 | 455 | 0.199% | 0.077% | 0.024% | 0.101% | 0.022% | 0.329% | 4.707% |
| pWISE9123 | 456 | No data | No data | No data | No data | No data | No data | No data |
| pWISE9124 | 457 | 0.063% | 0.038% | 0.001% | 0.067% | 0.002% | 0.012% | 1.371% |
| pWISE9125 | 458 | No data | No data | No data | No data | No data | No data | No data |
| pWISE9126 | 459 | 0.072% | 0.034% | 0.000% | 0.082% | 0.014% | 0.017% | 0.007% |
| pWISE9127 | 460 | 0.039% | 0.002% | 0.017% | 0.085% | 0.009% | 0.004% | 0.227% |
| pWISE9128 | 461 | No data | No data | No data | No data | No data | No data | No data |
| pWISE9134 | 426 | No data | No data | No data | No data | No data | No data | No data |
| pWISE9135 | 427 | No data | No data | No data | No data | No data | No data | No data |

| | | Standard Deviation of the average editing percent at the nucleotides | | | | | |
|---|---|---|---|---|---|---|---|
| | Protein | numbered according to the position in the PWsp132 spacer | | | | | |
| | SEQ | sequence on the non-target, genomic DNA strand | | | | | |
| pWISE | ID NO: | C.14 | C.17 | C.19 | C.21 | C.24 | C.28 |
| pWISE121 | 56 | 0.345% | 0.235% | 0.318% | 0.085% | 0.195% | 0.141% |
| pWISE1921 | 428 | No data | No data | No data | No data | No data | No data |
| pWISE1925 | 429 | 0.182% | 0.041% | 0.079% | 0.074% | 0.005% | 0.000% |
| pWISE4332 | 430 | No data | No data | No data | No data | No data | No data |
| pWISE4339 | 431 | 1.628% | 0.323% | 2.811% | 1.947% | 0.042% | 0.002% |
| pWISE6852 | 432 | 0.924% | 0.291% | 1.374% | 0.030% | 0.000% | 0.002% |
| pWISE6853 | 433 | 2.280% | 0.388% | 1.603% | 0.517% | 0.079% | 0.007% |
| pWISE9117 | 450 | 0.302% | 0.302% | 0.402% | 0.432% | 0.032% | 0.022% |
| pWISE9118 | 451 | No data | No data | No data | No data | No data | No data |
| pWISE9119 | 452 | No data | No data | No data | No data | No data | No data |
| pWISE9120 | 453 | No data | No data | No data | No data | No data | No data |
| pWISE9121 | 454 | 0.089% | 0.044% | 0.432% | 0.199% | 0.026% | 0.001% |
| pWISE9122 | 455 | 5.263% | 0.317% | 5.876% | 5.510% | 0.335% | 0.013% |
| pWISE9123 | 456 | No data | No data | No data | No data | No data | No data |
| pWISE9124 | 457 | 0.495% | 0.194% | 0.979% | 0.717% | 0.042% | 0.009% |
| pWISE9125 | 458 | No data | No data | No data | No data | No data | No data |
| pWISE9126 | 459 | 0.161% | 0.015% | 0.187% | 0.023% | 0.067% | 0.003% |
| pWISE9127 | 460 | 0.101% | 0.057% | 0.104% | 0.036% | 0.010% | 0.002% |
| pWISE9128 | 461 | No data | No data | No data | No data | No data | No data |
| pWISE9134 | 426 | No data | No data | No data | No data | No data | No data |
| pWISE9135 | 427 | No data | No data | No data | No data | No data | No data |

TABLE 8

| | | Average G to A editing percent at the nucleotides | | | | |
|---|---|---|---|---|---|---|
| | | numbered according to the position in the PWsp132 spacer | | | | |
| | Protein SEQ | sequence on the opposite, target genomic DNA strand | | | | |
| pWISE | ID NO: | G.−5 | G.6 | G.7 | G.9 | G.12 |
| pWISE121 | 56 | 0.000% | 0.002% | 0.000% | 0.152% | 0.000% |
| pWISE1921 | 428 | 0.019% | 0.005% | 0.035% | 0.056% | 0.089% |
| pWISE1925 | 429 | 0.016% | 0.007% | 0.002% | 0.115% | 0.026% |
| pWISE4332 | 430 | 0.017% | 0.009% | 0.010% | 0.033% | 0.038% |
| pWISE4339 | 431 | 0.021% | 0.001% | 0.001% | 0.038% | 0.014% |
| pWISE6852 | 432 | 0.011% | 0.005% | 0.004% | 0.008% | 0.003% |
| pWISE6853 | 433 | 0.001% | 0.003% | 0.006% | 0.023% | 0.012% |
| pWISE9117 | 450 | 0.006% | 0.005% | 0.003% | 0.025% | 0.003% |
| pWISE9118 | 451 | 0.008% | 0.002% | 0.001% | 0.001% | 1.265% |
| pWISE9119 | 452 | 0.037% | 0.037% | 0.075% | 0.257% | 0.059% |
| pWISE9120 | 453 | 0.000% | 0.000% | 0.000% | 1.560% | 8.974% |
| pWISE9121 | 454 | 0.005% | 0.136% | 0.216% | 0.122% | 0.391% |
| pWISE9122 | 455 | 0.002% | 0.025% | 0.051% | 0.118% | 0.059% |
| pWISE9123 | 456 | 0.021% | 0.012% | 0.009% | 0.264% | 0.054% |
| pWISE9124 | 457 | 0.026% | 0.002% | 0.013% | 0.191% | 1.569% |
| pWISE9125 | 458 | 0.007% | 0.007% | 0.055% | 0.118% | 0.082% |
| pWISE9126 | 459 | 0.011% | 0.009% | 0.004% | 2.134% | 3.260% |
| pWISE9127 | 460 | 0.009% | 0.015% | 0.014% | 0.002% | 0.025% |
| pWISE9128 | 461 | 0.037% | 0.000% | 0.009% | 0.101% | 0.101% |
| pWISE9134 | 426 | No data | No data | No data | No data | No data |
| pWISE9135 | 427 | 0.025% | 0.019% | 0.065% | 0.133% | 0.071% |

| | | Average G to A editing percent at the nucleotides | | | | |
|---|---|---|---|---|---|---|
| | | numbered according to the position in the PWsp132 spacer | | | | |
| | Protein SEQ | sequence on the opposite, target genomic DNA strand | | | | |
| pWISE | ID NO: | G.13 | G.15 | G.23 | G.25 | G.30 |
| pWISE121 | 56 | 0.004% | 0.000% | 0.666% | 0.008% | 0.016% |
| pWISE1921 | 428 | 0.045% | 0.391% | 0.087% | 0.023% | 2.625% |
| pWISE1925 | 429 | 0.030% | 0.244% | 0.020% | 0.045% | 1.279% |
| pWISE4332 | 430 | 0.018% | 0.170% | 0.119% | 0.119% | 1.136% |
| pWISE4339 | 431 | 0.010% | 0.102% | 0.029% | 0.079% | 0.342% |
| pWISE6852 | 432 | 0.011% | 0.081% | 0.012% | 0.037% | 0.349% |
| pWISE6853 | 433 | 0.009% | 0.183% | 0.025% | 0.059% | 0.391% |
| pWISE9117 | 450 | 0.001% | 0.417% | 0.321% | 0.825% | 3.152% |
| pWISE9118 | 451 | 0.589% | 2.668% | 1.004% | 0.653% | 1.403% |
| pWISE9119 | 452 | 0.128% | 0.717% | 2.743% | 1.962% | 10.667% |
| pWISE9120 | 453 | 9.416% | 10.981% | 2.763% | 0.470% | 3.007% |
| pWISE9121 | 454 | 0.204% | 0.868% | 0.213% | 0.208% | 0.793% |
| pWISE9122 | 455 | 0.253% | 0.674% | 0.552% | 0.835% | 5.303% |
| pWISE9123 | 456 | 0.039% | 0.874% | 1.039% | 2.152% | 7.802% |
| pWISE9124 | 457 | 1.563% | 7.892% | 3.097% | 1.319% | 2.874% |
| pWISE9125 | 458 | 0.109% | 0.702% | 0.188% | 0.492% | 6.920% |
| pWISE9126 | 459 | 3.110% | 6.625% | 0.798% | 0.193% | 0.538% |
| pWISE9127 | 460 | 0.000% | 0.235% | 0.140% | 0.116% | 0.222% |
| pWISE9128 | 461 | 0.046% | 0.587% | 0.422% | 1.037% | 5.249% |
| pWISE9134 | 426 | No data | No data | No data | No data | No data |
| pWISE9135 | 427 | 0.054% | 0.814% | 0.318% | 0.458% | 7.906% |

TABLE 9

| | | Standard deviation of the average G to A editing percent at the | | | | |
|---|---|---|---|---|---|---|
| | | nucleotides numbered according to the position in the PWsp132 | | | | |
| | Protein SEQ | spacer sequence on the opposite, target genomic DNA strand | | | | |
| pWISE | ID NO: | G.−5 | G.6 | G.7 | G.9 | G.12 |
| pWISE121 | 56 | 0.000% | 0.003% | 0.000% | 0.209% | 0.000% |
| pWISE1921 | 428 | No data | No data | No data | No data | No data |
| pWISE1925 | 429 | 0.011% | 0.003% | 0.003% | 0.078% | 0.036% |
| pWISE4332 | 430 | No data | No data | No data | No data | No data |
| pWISE4339 | 431 | 0.030% | 0.001% | 0.001% | 0.054% | 0.020% |
| pWISE6852 | 432 | 0.016% | 0.001% | 0.002% | 0.011% | 0.004% |
| pWISE6853 | 433 | 0.001% | 0.005% | 0.001% | 0.033% | 0.016% |
| pWISE9117 | 450 | 0.000% | 0.002% | 0.005% | 0.035% | 0.005% |
| pWISE9118 | 451 | No data | No data | No data | No data | No data |
| pWISE9119 | 452 | No data | No data | No data | No data | No data |
| pWISE9120 | 453 | No data | No data | No data | No data | No data |
| pWISE9121 | 454 | 0.007% | 0.137% | 0.189% | 0.172% | 0.236% |
| pWISE9122 | 455 | 0.003% | 0.035% | 0.072% | 0.167% | 0.084% |
| pWISE9123 | 456 | No data | No data | No data | No data | No data |
| pWISE9124 | 457 | 0.019% | 0.002% | 0.018% | 0.191% | 0.380% |
| pWISE9125 | 458 | No data | No data | No data | No data | No data |
| pWISE9126 | 459 | 0.013% | 0.004% | 0.000% | 0.230% | 0.285% |
| pWISE9127 | 460 | 0.004% | 0.021% | 0.019% | 0.002% | 0.035% |
| pWISE9128 | 461 | No data | No data | No data | No data | No data |
| pWISE9134 | 426 | No data | No data | No data | No data | No data |
| pWISE9135 | 427 | No data | No data | No data | No data | No data |
| | | Standard deviation of the average G to A editing percent at the | | | | |
| | | nucleotides numbered according to the position in the PWsp132 | | | | |
| | Protein SEQ | spacer sequence on the opposite, target genomic DNA strand | | | | |
| pWISE | ID NO: | G.13 | G.15 | G.23 | G.25 | G.30 |
| pWISE121 | 56 | 0.005% | 0.000% | 0.003% | 0.001% | 0.012% |
| pWISE1921 | 428 | No data | No data | No data | No data | No data |
| pWISE1925 | 429 | 0.018% | 0.040% | 0.005% | 0.057% | 0.327% |
| pWISE4332 | 430 | No data | No data | No data | No data | No data |
| pWISE4339 | 431 | 0.003% | 0.113% | 0.041% | 0.101% | 0.473% |
| pWISE6852 | 432 | 0.008% | 0.115% | 0.009% | 0.037% | 0.486% |
| pWISE6853 | 433 | 0.013% | 0.099% | 0.035% | 0.037% | 0.516% |
| pWISE9117 | 450 | 0.002% | 0.064% | 0.011% | 0.207% | 0.688% |
| pWISE9118 | 451 | No data | No data | No data | No data | No data |
| pWISE9119 | 452 | No data | No data | No data | No data | No data |
| pWISE9120 | 453 | No data | No data | No data | No data | No data |
| pWISE9121 | 454 | 0.041% | 0.254% | 0.037% | 0.079% | 0.038% |
| pWISE9122 | 455 | 0.266% | 0.321% | 0.781% | 0.635% | 1.675% |
| pWISE9123 | 456 | No data | No data | No data | No data | No data |
| pWISE9124 | 457 | 0.328% | 0.221% | 0.703% | 0.324% | 0.192% |
| pWISE9125 | 458 | No data | No data | No data | No data | No data |
| pWISE9126 | 459 | 0.072% | 0.011% | 0.118% | 0.083% | 0.110% |
| pWISE9127 | 460 | 0.000% | 0.211% | 0.127% | 0.152% | 0.010% |
| pWISE9128 | 461 | No data | No data | No data | No data | No data |
| pWISE9134 | 426 | No data | No data | No data | No data | No data |
| pWISE9135 | 427 | No data | No data | No data | No data | No data |

TABLE 10

| | | |
|---|---|---|
| | | Average C to T editing percent at the nucleotides numbered |
| | | according to the position in the PWsp449 spacer sequence on |
| Protein | Protein SEQ | the non-target, genomic DNA strand |

| Plasmid | ID NO: | C.−5 | C.−1 | C.2 | C.10 | C.11 |
|---|---|---|---|---|---|---|
| pWISE121 | 56 | 0.003% | 0.103% | 0.033% | 0.407% | 0.254% |
| pWISE1921 | 428 | 0.923% | 0.921% | 0.191% | 24.033% | 23.585% |
| pWISE1925 | 429 | 0.762% | 0.919% | 0.140% | 18.424% | 18.260% |
| pWISE4332 | 430 | 0.481% | 0.428% | 0.092% | 14.270% | 14.064% |
| pWISE4339 | 431 | 0.360% | 0.483% | 0.025% | 13.312% | 13.047% |
| pWISE6852 | 432 | 0.355% | 0.326% | 0.055% | 10.246% | 10.136% |
| pWISE6853 | 433 | 0.329% | 0.386% | 0.051% | 14.813% | 14.576% |
| pWISE9117 | 450 | No data | No data | No data | No data | No data |
| pWISE9118 | 451 | 0.690% | 0.795% | 0.294% | 8.872% | 9.034% |
| pWISE9119 | 452 | 1.769% | 1.903% | 0.245% | 34.072% | 32.966% |
| pWISE9120 | 453 | 0.256% | 0.294% | 0.063% | 4.899% | 4.716% |
| pWISE9121 | 454 | 0.672% | 0.580% | 0.195% | 7.651% | 7.707% |
| pWISE9122 | 455 | 1.646% | 2.007% | 0.210% | 25.512% | 25.766% |
| pWISE9123 | 456 | 1.416% | 1.711% | 0.234% | 28.032% | 27.623% |
| pWISE9124 | 457 | 0.539% | 0.718% | 0.112% | 23.185% | 21.996% |
| pWISE9125 | 458 | No data | No data | No data | No data | No data |
| pWISE9126 | 459 | 0.132% | 0.196% | 0.028% | 5.711% | 5.791% |
| pWISE9127 | 460 | 0.208% | 0.272% | 0.054% | 5.801% | 5.702% |
| pWISE9128 | 461 | 1.581% | 1.924% | 0.228% | 22.383% | 22.108% |
| pWISE9134 | 426 | 0.978% | 0.952% | 0.223% | 23.751% | 23.592% |
| pWISE9135 | 427 | 1.432% | 1.408% | 0.144% | 24.285% | 24.008% |

| | | Average C to T editing percent at the nucleotides numbered | | | | | |
|---|---|---|---|---|---|---|---|
| | | according to the position in the PWsp449 spacer sequence on the | | | | | |
| Protein | Protein SEQ | non-target, genomic DNA strand | | | | | |
| Plasmid | ID NO: | C.15 | C.20 | C.22 | C.30 | C.32 | C.33 |
| pWISE121 | 56 | 1.953% | 0.572% | 0.237% | 0.095% | 0.001% | 0.062% |
| pWISE1921 | 428 | 22.927% | 1.360% | 0.663% | 0.042% | 0.007% | 0.021% |
| pWISE1925 | 429 | 16.530% | 0.463% | 0.336% | 0.037% | 0.004% | 0.002% |
| pWISE4332 | 430 | 13.245% | 0.564% | 0.169% | 0.082% | 0.003% | 0.004% |
| pWISE4339 | 431 | 10.967% | 0.266% | 0.106% | 0.035% | 0.006% | 0.033% |
| pWISE6852 | 432 | 9.369% | 0.421% | 0.129% | 0.025% | 0.005% | 0.007% |
| pWISE6853 | 433 | 11.957% | 0.129% | 0.162% | 0.038% | 0.004% | 0.038% |
| pWISE9117 | 450 | No data | No data | No data | No data | No data | No data |
| pWISE9118 | 451 | 7.569% | 2.187% | 1.657% | 0.029% | 0.004% | 0.007% |
| pWISE9119 | 452 | 33.975% | 10.006% | 8.709% | 1.453% | 0.169% | 0.198% |
| pWISE9120 | 453 | 4.130% | 0.872% | 0.923% | 0.076% | 0.009% | 0.040% |
| pWISE9121 | 454 | 6.403% | 0.583% | 0.565% | 0.042% | 0.001% | 0.014% |
| pWISE9122 | 455 | 26.424% | 7.012% | 5.110% | 0.516% | 0.049% | 0.082% |
| pWISE9123 | 456 | 27.715% | 3.685% | 1.628% | 0.162% | 0.016% | 0.024% |
| pWISE9124 | 457 | 22.021% | 1.082% | 0.978% | 0.110% | 0.016% | 0.019% |
| pWISE9125 | 458 | No data | No data | No data | No data | No data | No data |
| pWISE9126 | 459 | 5.614% | 0.215% | 0.170% | 0.062% | 0.013% | 0.044% |
| pWISE9127 | 460 | 3.778% | 0.329% | 0.072% | 0.004% | 0.002% | 0.028% |
| pWISE9128 | 461 | 21.501% | 1.623% | 0.762% | 0.106% | 0.005% | 0.050% |
| pWISE9134 | 426 | 22.686% | 1.771% | 0.865% | 0.110% | 0.024% | 0.019% |
| pWISE9135 | 427 | 24.050% | 0.837% | 0.706% | 0.152% | 0.012% | 0.037% |

TABLE 11

| | | Standard Deviation of the average editing percent at the | | | | | |
|---|---|---|---|---|---|---|---|
| | | nucleotides numbered according to the position in the PWsp449 | | | | | |
| | Protein SEQ | spacer sequence on the non-target, genomic DNA strand | | | | | |
| pWISE | ID NO: | C.−5 | C.−1 | C.2 | C.10 | C.11 | C.15 |
| pWISE121 | 56 | 0.005% | 0.136% | 0.034% | 0.153% | 0.139% | 0.026% |
| pWISE1921 | 428 | 0.197% | 0.113% | 0.022% | 2.094% | 2.096% | 1.883% |
| pWISE1925 | 429 | 0.235% | 0.114% | 0.032% | 3.336% | 3.324% | 3.359% |
| pWISE4332 | 430 | 0.022% | 0.007% | 0.033% | 1.658% | 1.531% | 1.377% |
| pWISE4339 | 431 | 0.106% | 0.076% | 0.026% | 1.688% | 1.844% | 1.483% |
| pWISE6852 | 432 | 0.006% | 0.177% | 0.041% | 1.762% | 1.796% | 1.834% |
| pWISE6853 | 433 | 0.275% | 0.130% | 0.001% | 0.763% | 0.709% | 0.206% |
| pWISE9117 | 450 | No data | No data | No data | No data | No data | No data |
| pWISE9118 | 451 | 0.213% | 0.205% | 0.069% | 0.349% | 0.197% | 0.036% |
| pWISE9119 | 452 | 0.169% | 0.157% | 0.053% | 0.435% | 0.824% | 0.890% |
| pWISE9120 | 453 | 0.013% | 0.041% | 0.047% | 0.230% | 0.113% | 0.407% |
| pWISE9121 | 454 | 0.237% | 0.031% | 0.021% | 0.365% | 0.305% | 0.367% |
| pWISE9122 | 455 | 0.162% | 0.042% | 0.121% | 1.685% | 1.733% | 1.677% |
| pWISE9123 | 456 | 0.144% | 0.033% | 0.068% | 1.752% | 1.536% | 1.623% |
| pWISE9124 | 457 | 0.009% | 0.039% | 0.026% | 0.028% | 0.035% | 0.243% |
| pWISE9125 | 458 | No data | No data | No data | No data | No data | No data |
| pWISE9126 | 459 | 0.036% | 0.010% | 0.010% | 0.884% | 0.921% | 0.919% |
| pWISE9127 | 460 | 0.035% | 0.043% | 0.007% | 1.000% | 1.029% | 0.954% |
| pWISE9128 | 461 | 0.403% | 0.552% | 0.124% | 6.703% | 6.413% | 6.442% |
| pWISE9134 | 426 | 0.324% | 0.269% | 0.046% | 2.693% | 2.892% | 3.006% |
| pWISE9135 | 427 | 0.187% | 0.208% | 0.045% | 5.098% | 5.515% | 5.386% |

| | | Standard Deviation of the average editing percent at the | | | | |
|---|---|---|---|---|---|---|
| | | nucleotides numbered according to the position in the PWsp449 | | | | |
| | Protein SEQ | spacer sequence on the non-target, genomic DNA strand | | | | |
| pWISE | ID NO: | C.20 | C.22 | C.30 | C.32 | C.33 |
| pWISE121 | 56 | 0.259% | 0.093% | 0.060% | 0.002% | 0.085% |
| pWISE1921 | 428 | 0.071% | 0.083% | 0.029% | 0.003% | 0.023% |
| pWISE1925 | 429 | 0.119% | 0.107% | 0.049% | 0.003% | 0.002% |
| pWISE4332 | 430 | 0.366% | 0.021% | 0.045% | 0.002% | 0.006% |
| pWISE4339 | 431 | 0.032% | 0.063% | 0.001% | 0.006% | 0.041% |
| pWISE6852 | 432 | 0.022% | 0.010% | 0.034% | 0.002% | 0.000% |
| pWISE6853 | 433 | 0.046% | 0.220% | 0.048% | 0.006% | 0.044% |
| pWISE9117 | 450 | No data | No data | No data | No data | No data |
| pWISE9118 | 451 | 0.252% | 0.034% | 0.011% | 0.003% | 0.004% |
| pWISE9119 | 452 | 0.055% | 0.010% | 0.009% | 0.084% | 0.052% |
| pWISE9120 | 453 | 0.085% | 0.084% | 0.024% | 0.012% | 0.040% |
| pWISE9121 | 454 | 0.161% | 0.027% | 0.019% | 0.002% | 0.001% |
| pWISE9122 | 455 | 0.697% | 0.284% | 0.164% | 0.009% | 0.035% |
| pWISE9123 | 456 | 0.485% | 0.078% | 0.101% | 0.020% | 0.002% |
| pWISE9124 | 457 | 0.039% | 0.197% | 0.029% | 0.014% | 0.007% |
| pWISE9125 | 458 | No data | No data | No data | No data | No data |
| pWISE9126 | 459 | 0.029% | 0.059% | 0.001% | 0.015% | 0.011% |
| pWISE9127 | 460 | 0.005% | 0.053% | 0.000% | 0.003% | 0.009% |
| pWISE9128 | 461 | 0.501% | 0.191% | 0.023% | 0.004% | 0.054% |
| pWISE9134 | 426 | 0.442% | 0.164% | 0.075% | 0.010% | 0.022% |
| pWISE9135 | 427 | 0.145% | 0.109% | 0.071% | 0.014% | 0.004% |

TABLE 12

| | | Average G to A editing percent at the nucleotides numbered | | | | | |
|---|---|---|---|---|---|---|---|
| | | according to the position in the PWsp449 spacer sequence on the | | | | | |
| | Protein SEQ | opposite, target genomic DNA strand | | | | | |
| pWISE | ID NO: | G.−9 | G.1 | G.3 | G.4 | G.7 | G.17 |
| pWISE121 | 56 | 0.010% | 0.118% | 0.108% | 0.074% | 0.304% | 0.855% |
| pWISE1921 | 428 | 0.124% | 0.019% | 0.022% | 0.015% | 0.006% | 0.083% |
| pWISE1925 | 429 | 0.047% | 0.014% | 0.004% | 0.018% | 0.013% | 0.004% |
| pWISE4332 | 430 | 0.050% | 0.017% | 0.006% | 0.026% | 0.006% | 0.009% |
| pWISE4339 | 431 | 0.027% | 0.029% | 0.037% | 0.030% | 0.002% | 0.018% |
| pWISE6852 | 432 | 0.051% | 0.009% | 0.014% | 0.003% | 0.008% | 0.017% |
| pWISE6853 | 433 | 0.041% | 0.007% | 0.012% | 0.009% | 0.004% | 0.001% |
| pWISE9117 | 450 | No data | No data | No data | No data | No data | No data |
| pWISE9118 | 451 | 0.025% | 0.022% | 0.031% | 0.061% | 0.002% | 2.414% |
| pWISE9119 | 452 | 0.015% | 0.031% | 0.046% | 0.075% | 0.015% | 0.696% |
| pWISE9120 | 453 | 0.094% | 0.040% | 0.041% | 0.068% | 0.021% | 6.415% |
| pWISE9121 | 454 | 0.035% | 0.018% | 0.029% | 0.045% | 0.008% | 1.161% |
| pWISE9122 | 455 | 0.019% | 0.036% | 0.026% | 0.049% | 0.023% | 2.956% |
| pWISE9123 | 456 | 0.040% | 0.021% | 0.074% | 0.029% | 0.009% | 0.599% |
| pWISE9124 | 457 | 0.035% | 0.018% | 0.012% | 0.016% | 0.013% | 1.464% |
| pWISE9125 | 458 | No data | No data | No data | No data | No data | No data |
| pWISE9126 | 459 | 0.012% | 0.007% | 0.023% | 0.012% | 0.001% | 1.626% |
| pWISE9127 | 460 | 0.021% | 0.014% | 0.015% | 0.003% | 0.003% | 0.174% |
| pWISE9128 | 461 | 0.019% | 0.017% | 0.015% | 0.032% | 0.024% | 0.350% |
| pWISE9134 | 426 | 0.140% | 0.034% | 0.039% | 0.051% | 0.002% | 0.055% |
| pWISE9135 | 427 | 0.022% | 0.006% | 0.011% | 0.019% | 0.015% | 0.257% |

| | | Average G to A editing percent at the nucleotides numbered | | | | |
|---|---|---|---|---|---|---|
| | | according to the position in the PWsp449 spacer sequence on the | | | | |
| | Protein SEQ | opposite, target genomic DNA strand | | | | |
| pWISE | ID NO: | G.21 | G.24 | G.26 | G.28 | G.31 |
| pWISE121 | 56 | 0.260% | 0.324% | 0.064% | 0.047% | 0.012% |
| pWISE1921 | 428 | 0.191% | 1.681% | 2.012% | 0.030% | 0.188% |
| pWISE1925 | 429 | 0.063% | 0.573% | 0.879% | 0.002% | 0.044% |
| pWISE4332 | 430 | 0.181% | 0.768% | 0.820% | 0.040% | 0.076% |
| pWISE4339 | 431 | 0.099% | 0.481% | 0.411% | 0.075% | 0.050% |
| pWISE6852 | 432 | 0.111% | 0.557% | 0.376% | 0.014% | 0.062% |
| pWISE6853 | 433 | 0.035% | 0.395% | 0.253% | 0.092% | 0.030% |
| pWISE9117 | 450 | No data | No data | No data | No data | No data |
| pWISE9118 | 451 | 2.795% | 3.518% | 2.755% | 0.264% | 0.206% |
| pWISE9119 | 452 | 2.193% | 19.415% | 19.164% | 3.039% | 3.810% |
| pWISE9120 | 453 | 5.443% | 6.371% | 5.184% | 0.724% | 0.829% |
| pWISE9121 | 454 | 1.178% | 2.427% | 1.791% | 0.102% | 0.272% |
| pWISE9122 | 455 | 4.900% | 13.204% | 12.163% | 1.788% | 2.608% |
| pWISE9123 | 456 | 1.345% | 6.273% | 5.512% | 0.670% | 1.389% |
| pWISE9124 | 457 | 2.339% | 2.991% | 1.514% | 0.095% | 0.215% |
| pWISE9125 | 458 | No data | No data | No data | No data | No data |
| pWISE9126 | 459 | 1.027% | 1.063% | 0.567% | 0.029% | 0.053% |
| pWISE9127 | 460 | 0.155% | 0.483% | 0.338% | 0.016% | 0.062% |
| pWISE9128 | 461 | 0.569% | 3.365% | 3.377% | 0.240% | 0.656% |
| pWISE9134 | 426 | 0.201% | 2.538% | 3.027% | 0.041% | 0.207% |
| pWISE9135 | 427 | 0.424% | 4.395% | 4.906% | 0.315% | 1.174% |

TABLE 13

| | | Standard deviation of the average G to A editing percent at the | | | | | |
|---|---|---|---|---|---|---|---|
| | | nucleotides numbered according to the position in the PWsp449 | | | | | |
| | Protein SEQ | spacer sequence on the opposite, target genomic DNA strand | | | | | |
| pWISE | ID NO: | G.−9 | G.1 | G.3 | G.4 | G.7 | G.17 |
| pWISE121 | 56 | 0.007% | 0.164% | 0.108% | 0.102% | 0.194% | 0.052% |
| pWISE1921 | 428 | 0.054% | 0.020% | 0.027% | 0.016% | 0.008% | 0.016% |
| pWISE1925 | 429 | 0.004% | 0.014% | 0.001% | 0.018% | 0.010% | 0.002% |
| pWISE4332 | 430 | 0.043% | 0.019% | 0.001% | 0.034% | 0.001% | 0.006% |
| pWISE4339 | 431 | 0.003% | 0.041% | 0.046% | 0.043% | 0.003% | 0.020% |
| pWISE6852 | 432 | 0.008% | 0.008% | 0.017% | 0.002% | 0.001% | 0.019% |
| pWISE6853 | 433 | 0.058% | 0.010% | 0.008% | 0.002% | 0.000% | 0.001% |
| pWISE9117 | 450 | No data | No data | No data | No data | No data | No data |
| pWISE9118 | 451 | 0.015% | 0.028% | 0.005% | 0.007% | 0.003% | 0.019% |
| pWISE9119 | 452 | 0.002% | 0.015% | 0.003% | 0.004% | 0.007% | 0.189% |
| pWISE9120 | 453 | 0.091% | 0.031% | 0.058% | 0.046% | 0.005% | 1.054% |
| pWISE9121 | 454 | 0.019% | 0.022% | 0.019% | 0.029% | 0.008% | 0.003% |
| pWISE9122 | 455 | 0.016% | 0.005% | 0.019% | 0.031% | 0.027% | 0.195% |
| pWISE9123 | 456 | 0.021% | 0.009% | 0.027% | 0.041% | 0.012% | 0.079% |
| pWISE9124 | 457 | 0.001% | 0.018% | 0.002% | 0.001% | 0.006% | 0.130% |
| pWISE9125 | 458 | No data | No data | No data | No data | No data | No data |
| pWISE9126 | 459 | 0.003% | 0.003% | 0.008% | 0.000% | 0.001% | 0.275% |
| pWISE9127 | 460 | 0.018% | 0.013% | 0.011% | 0.001% | 0.002% | 0.054% |
| pWISE9128 | 461 | 0.021% | 0.013% | 0.017% | 0.012% | 0.023% | 0.054% |
| pWISE9134 | 426 | 0.059% | 0.004% | 0.009% | 0.020% | 0.003% | 0.009% |
| pWISE9135 | 427 | 0.010% | 0.006% | 0.001% | 0.024% | 0.012% | 0.131% |

| | | Standard deviation of the average G to A editing percent at the | | | | |
|---|---|---|---|---|---|---|
| | | nucleotides numbered according to the position in the PWsp449 | | | | |
| | Protein SEQ | spacer sequence on the opposite, target genomic DNA strand | | | | |
| pWISE | ID NO: | G.21 | G.24 | G.26 | G.28 | G.31 |
| pWISE121 | 56 | 0.051% | 0.007% | 0.072% | 0.064% | 0.009% |
| pWISE1921 | 428 | 0.040% | 0.413% | 0.253% | 0.039% | 0.047% |
| pWISE1925 | 429 | 0.077% | 0.009% | 0.038% | 0.002% | 0.042% |
| pWISE4332 | 430 | 0.026% | 0.185% | 0.263% | 0.027% | 0.007% |
| pWISE4339 | 431 | 0.021% | 0.098% | 0.043% | 0.083% | 0.023% |
| pWISE6852 | 432 | 0.027% | 0.047% | 0.014% | 0.013% | 0.039% |
| pWISE6853 | 433 | 0.015% | 0.106% | 0.033% | 0.129% | 0.031% |
| pWISE9117 | 450 | No data | No data | No data | No data | No data |
| pWISE9118 | 451 | 0.302% | 0.268% | 0.266% | 0.086% | 0.101% |
| pWISE9119 | 452 | 0.177% | 0.223% | 0.724% | 0.003% | 0.108% |
| pWISE9120 | 453 | 0.798% | 0.592% | 0.548% | 0.241% | 0.101% |
| pWISE9121 | 454 | 0.101% | 0.226% | 0.129% | 0.029% | 0.039% |
| pWISE9122 | 455 | 0.343% | 0.822% | 0.713% | 0.382% | 0.529% |
| pWISE9123 | 456 | 0.353% | 0.184% | 0.308% | 0.017% | 0.145% |
| pWISE9124 | 457 | 0.041% | 0.021% | 0.102% | 0.034% | 0.084% |
| pWISE9125 | 458 | No data | No data | No data | No data | No data |
| pWISE9126 | 459 | 0.231% | 0.188% | 0.179% | 0.004% | 0.035% |
| pWISE9127 | 460 | 0.000% | 0.116% | 0.066% | 0.002% | 0.042% |
| pWISE9128 | 461 | 0.067% | 0.740% | 0.571% | 0.003% | 0.091% |
| pWISE9134 | 426 | 0.004% | 0.117% | 0.006% | 0.012% | 0.028% |
| pWISE9135 | 427 | 0.146% | 0.925% | 1.215% | 0.027% | 0.372% |

TABLE 14

| | | Average C to T editing percent at the nucleotides numbered according | | | | | | |
|---|---|---|---|---|---|---|---|---|
| | Protein | to the position in the PWsp135 spacer sequence on the non-target, | | | | | | |
| | SEQ ID | genomic DNA strand | | | | | | |
| pWISE | NO: | C.−8 | C.−6 | C.−1 | C.3 | C.4 | C.6 | C.8 |
| pWISE121 | 56 | 0.004% | 0.082% | 0.007% | 0.032% | 0.028% | 0.093% | 0.027% |
| pWISE1921 | 428 | 0.449% | 0.002% | 2.335% | 0.055% | 0.099% | 33.274% | 32.089% |
| pWISE1925 | 429 | 0.493% | 0.000% | 1.944% | 0.005% | 0.023% | 28.748% | 27.917% |
| pWISE4332 | 430 | 0.058% | 0.002% | 1.078% | 0.003% | 0.001% | 13.589% | 13.370% |
| pWISE4339 | 431 | 0.505% | 0.013% | 2.176% | 0.037% | 0.042% | 17.310% | 11.945% |
| pWISE6852 | 432 | 0.353% | 0.000% | 0.965% | 0.002% | 0.018% | 15.624% | 15.013% |
| pWISE6853 | 433 | 0.307% | 0.004% | 1.592% | 0.038% | 0.042% | 27.356% | 26.892% |
| pWISE9117 | 450 | 0.316% | 0.013% | 2.178% | 0.028% | 0.018% | 32.296% | 26.313% |
| pWISE9118 | 451 | 0.205% | 0.006% | 1.582% | 0.014% | 0.018% | 9.416% | 2.599% |
| pWISE9119 | 452 | 0.340% | 0.004% | 1.983% | 0.043% | 0.034% | 22.773% | 17.812% |
| pWISE9120 | 453 | 0.399% | 0.031% | 1.455% | 0.034% | 0.037% | 4.755% | 1.729% |
| pWISE9121 | 454 | 0.414% | 0.019% | 1.723% | 0.054% | 0.077% | 18.202% | 14.310% |
| pWISE9122 | 455 | 0.428% | 0.005% | 3.150% | 0.036% | 0.046% | 17.129% | 6.481% |
| pWISE9123 | 456 | 0.404% | 0.000% | 2.146% | 0.074% | 0.065% | 30.831% | 28.556% |
| pWISE9124 | 457 | 0.329% | 0.000% | 1.657% | 0.021% | 0.012% | 29.966% | 20.258% |
| pWISE9125 | 458 | 0.335% | 0.014% | 2.390% | 0.013% | 0.046% | 25.072% | 16.678% |
| pWISE9126 | 459 | 0.086% | 0.008% | 0.476% | 0.005% | 0.003% | 9.905% | 4.317% |
| pWISE9127 | 460 | 0.066% | 0.003% | 0.533% | 0.015% | 0.012% | 4.287% | 0.375% |
| pWISE9128 | 461 | 0.524% | 0.000% | 2.685% | 0.056% | 0.036% | 20.135% | 14.338% |
| pWISE9134 | 426 | 0.446% | 0.018% | 2.248% | 0.034% | 0.053% | 30.029% | 29.043% |
| pWISE9135 | 427 | 0.480% | 0.018% | 2.492% | 0.053% | 0.068% | 27.522% | 18.083% |

| | | Average C to T editing percent at the nucleotides numbered according | | | | | |
|---|---|---|---|---|---|---|---|
| | | to the position in the PWsp135 spacer sequence on the non-target, | | | | | |
| | Protein SEQ | genomic DNA strand | | | | | |
| pWISE | ID NO: | C.9 | C.10 | C.11 | C.13 | C.17 | C.18 |
| pWISE121 | 56 | 0.066% | 0.062% | 0.183% | 0.110% | 0.529% | 0.497% |
| pWISE1921 | 428 | 32.913% | 33.030% | 33.154% | 33.103% | 8.980% | 9.597% |
| pWISE1925 | 429 | 28.554% | 28.591% | 28.672% | 28.621% | 4.710% | 4.742% |
| pWISE4332 | 430 | 13.499% | 13.522% | 13.549% | 13.465% | 0.984% | 1.005% |
| pWISE4339 | 431 | 15.873% | 18.932% | 21.414% | 24.483% | 5.246% | 5.865% |
| pWISE6852 | 432 | 15.417% | 15.438% | 15.468% | 15.453% | 1.108% | 0.810% |
| pWISE6853 | 433 | 27.260% | 27.248% | 27.317% | 27.187% | 2.880% | 3.198% |
| pWISE9117 | 450 | 30.307% | 31.080% | 31.396% | 32.299% | 15.909% | 19.326% |
| pWISE9118 | 451 | 5.969% | 7.855% | 9.749% | 15.186% | 0.260% | 0.250% |
| pWISE9119 | 452 | 21.323% | 22.141% | 22.744% | 24.504% | 9.434% | 10.306% |
| pWISE9120 | 453 | 2.699% | 3.216% | 3.695% | 6.311% | 0.660% | 0.855% |
| pWISE9121 | 454 | 16.297% | 17.133% | 17.846% | 19.783% | 5.145% | 5.294% |
| pWISE9122 | 455 | 14.034% | 19.647% | 24.408% | 29.916% | 9.575% | 9.993% |
| pWISE9123 | 456 | 30.055% | 30.102% | 30.445% | 30.861% | 11.225% | 12.172% |
| pWISE9124 | 457 | 27.775% | 28.622% | 28.955% | 30.110% | 3.770% | 3.909% |
| pWISE9125 | 458 | 21.677% | 23.952% | 24.566% | 25.457% | 6.897% | 6.556% |
| pWISE9126 | 459 | 7.872% | 8.717% | 9.140% | 10.044% | 0.230% | 0.211% |
| pWISE9127 | 460 | 1.626% | 2.758% | 3.639% | 6.516% | 0.141% | 0.138% |
| pWISE9128 | 461 | 21.975% | 22.372% | 22.577% | 22.783% | 4.866% | 5.772% |
| pWISE9134 | 426 | 29.709% | 29.702% | 29.879% | 29.991% | 9.456% | 9.988% |
| pWISE9135 | 427 | 24.364% | 26.319% | 26.967% | 28.052% | 8.167% | 7.647% |

| | | Average C to T editing percent at the nucleotides | | | | | |
|---|---|---|---|---|---|---|---|
| | | numbered according to the position in the PWsp135 spacer | | | | | |
| | Protein SEQ | sequence on the non-target, genomic DNA strand | | | | | |
| pWISE | ID NO: | C.19 | C.22 | C.25 | C.27 | C.29 | C.33 |
| pWISE121 | 56 | 0.364% | 0.669% | 0.030% | 0.048% | 0.102% | 0.036% |
| pWISE1921 | 428 | 12.497% | 0.162% | 0.181% | 0.312% | 0.290% | 0.163% |
| pWISE1925 | 429 | 5.591% | 0.080% | 0.161% | 0.104% | 0.183% | 0.148% |
| pWISE4332 | 430 | 2.019% | 0.084% | 0.072% | 0.084% | 0.116% | 0.026% |
| pWISE4339 | 431 | 8.595% | 1.401% | 1.333% | 1.499% | 1.569% | 1.304% |
| pWISE6852 | 432 | 1.948% | 0.075% | 0.046% | 0.054% | 0.011% | 0.072% |
| pWISE6853 | 433 | 4.081% | 0.184% | 0.138% | 0.073% | 0.192% | 0.096% |
| pWISE9117 | 450 | 26.265% | 0.544% | 0.231% | 0.163% | 0.281% | 0.203% |
| pWISE9118 | 451 | 1.418% | 0.082% | 0.203% | 0.215% | 0.073% | 0.191% |
| pWISE9119 | 452 | 13.392% | 2.260% | 1.905% | 2.309% | 2.310% | 2.053% |
| pWISE9120 | 453 | 1.251% | 0.184% | 0.318% | 0.309% | 0.263% | 0.347% |
| pWISE9121 | 454 | 6.573% | 0.172% | 0.183% | 0.191% | 0.205% | 0.168% |
| pWISE9122 | 455 | 13.863% | 1.587% | 1.614% | 1.930% | 2.198% | 2.088% |
| pWISE9123 | 456 | 18.386% | 0.243% | 0.270% | 0.374% | 0.223% | 0.412% |
| pWISE9124 | 457 | 6.291% | 0.102% | 0.089% | 0.076% | 0.106% | 0.068% |
| pWISE9125 | 458 | 6.007% | 0.276% | 0.244% | 0.283% | 0.261% | 0.267% |
| pWISE9126 | 459 | 0.326% | 0.013% | 0.045% | 0.040% | 0.043% | 0.040% |
| pWISE9127 | 460 | 0.212% | 0.044% | 0.045% | 0.067% | 0.059% | 0.042% |
| pWISE9128 | 461 | 7.406% | 0.330% | 0.245% | 0.341% | 0.367% | 0.132% |
| pWISE9134 | 426 | 12.707% | 0.289% | 0.184% | 0.185% | 0.167% | 0.098% |
| pWISE9135 | 427 | 7.159% | 0.181% | 0.261% | 0.218% | 0.260% | 0.256% |

TABLE 15

| | | Standard Deviation of the average editing percent at the nucleotides | | | | | | |
|---|---|---|---|---|---|---|---|---|
| | | numbered according to the position in the PWsp135 spacer sequence on | | | | | | |
| | Protein SEQ | DNA strand | | | | | | |
| pWISE | ID NO: | C.−8 | C.−6 | C.−1 | C.3 | C.4 | C.6 | C.8 |
| pWISE121 | 56 | 0.001% | 0.108% | 0.003% | 0.041% | 0.040% | 0.065% | 0.021% |
| pWISE1921 | 428 | 0.074% | 0.003% | 0.036% | 0.047% | 0.023% | 1.238% | 1.067% |
| pWISE1925 | 429 | 0.171% | 0.000% | 0.116% | 0.008% | 0.029% | 1.587% | 1.720% |
| pWISE4332 | 430 | 0.002% | 0.003% | 0.116% | 0.005% | 0.002% | 2.423% | 2.430% |
| pWISE4339 | 431 | 0.143% | 0.019% | 1.182% | 0.043% | 0.041% | 4.776% | 11.772% |
| pWISE6852 | 432 | 0.220% | 0.000% | 0.807% | 0.002% | 0.012% | 1.785% | 2.187% |
| pWISE6853 | 433 | No data | No data | No data | No data | No data | No data | No data |
| pWISE9117 | 450 | No data | No data | No data | No data | No data | No data | No data |
| pWISE9118 | 451 | 0.281% | 0.006% | 0.040% | 0.015% | 0.025% | 1.257% | 0.862% |
| pWISE9119 | 452 | 0.148% | 0.006% | 1.289% | 0.051% | 0.049% | 16.715% | 15.751% |
| pWISE9120 | 453 | 0.109% | 0.022% | 0.134% | 0.001% | 0.014% | 1.765% | 2.017% |
| pWISE9121 | 454 | 0.048% | 0.028% | 0.567% | 0.071% | 0.075% | 14.980% | 18.648% |
| pWISE9122 | 455 | 0.025% | 0.007% | 0.351% | 0.052% | 0.061% | 3.792% | 4.350% |
| pWISE9123 | 456 | No data | No data | No data | No data | No data | No data | No data |
| pWISE9124 | 457 | 0.351% | 0.000% | 0.482% | 0.030% | 0.013% | 1.052% | 0.356% |
| pWISE9125 | 458 | 0.181% | 0.015% | 0.128% | 0.016% | 0.041% | 0.961% | 0.502% |
| pWISE9126 | 459 | No data | No data | No data | No data | No data | No data | No data |
| pWISE9127 | 460 | No data | No data | No data | No data | No data | No data | No data |
| pWISE9128 | 461 | 0.043% | 0.000% | 0.020% | 0.019% | 0.047% | 0.826% | 0.511% |
| pWISE9134 | 426 | 0.027% | 0.022% | 0.503% | 0.048% | 0.074% | 1.078% | 1.393% |
| pWISE9135 | 427 | 0.169% | 0.001% | 0.110% | 0.004% | 0.050% | 1.443% | 0.999% |

| | | Standard Deviation of the average editing percent at the | | | | | |
|---|---|---|---|---|---|---|---|
| | | nucleotides numbered according to the position in the PWsp135 | | | | | |
| | Protein SEQ | spacer sequence on the non-target, genomic DNA strand | | | | | |
| pWISE | ID NO: | C.9 | C.10 | C.11 | C.13 | C.17 | C.18 |
| pWISE121 | 56 | 0.003% | 0.022% | 0.063% | 0.014% | 0.017% | 0.133% |
| pWISE1921 | 428 | 1.221% | 1.174% | 1.196% | 1.330% | 0.141% | 0.204% |
| pWISE1925 | 429 | 1.657% | 1.659% | 1.652% | 1.536% | 0.111% | 0.181% |
| pWISE4332 | 430 | 2.437% | 2.546% | 2.513% | 2.576% | 0.285% | 0.116% |
| pWISE4339 | 431 | 6.733% | 2.515% | 0.991% | 5.345% | 5.006% | 5.854% |
| pWISE6852 | 432 | 1.898% | 1.938% | 1.973% | 1.967% | 0.074% | 0.657% |
| pWISE6853 | 433 | No data | No data | No data | No data | No data | No data |
| pWISE9117 | 450 | No data | No data | No data | No data | No data | No data |
| pWISE9118 | 451 | 0.189% | 0.802% | 1.211% | 2.879% | 0.363% | 0.342% |
| pWISE9119 | 452 | 18.009% | 17.499% | 17.553% | 16.536% | 8.552% | 9.523% |
| pWISE9120 | 453 | 2.301% | 2.266% | 2.227% | 1.528% | 0.782% | 0.872% |
| pWISE9121 | 454 | 17.261% | 15.941% | 15.310% | 12.699% | 5.648% | 6.513% |
| pWISE9122 | 455 | 3.392% | 1.522% | 0.672% | 2.655% | 1.097% | 1.092% |
| pWISE9123 | 456 | No data | No data | No data | No data | No data | No data |
| pWISE9124 | 457 | 0.673% | 0.902% | 0.794% | 0.910% | 0.118% | 0.075% |
| pWISE9125 | 458 | 0.475% | 0.622% | 0.892% | 0.916% | 0.003% | 0.004% |
| pWISE9126 | 459 | No data | No data | No data | No data | No data | No data |
| pWISE9127 | 460 | No data | No data | No data | No data | No data | No data |
| pWISE9128 | 461 | 0.713% | 0.690% | 0.795% | 0.620% | 0.894% | 0.613% |
| pWISE9134 | 426 | 0.950% | 1.111% | 0.937% | 1.095% | 0.065% | 0.252% |
| pWISE9135 | 427 | 1.275% | 1.333% | 1.204% | 1.394% | 0.114% | 0.182% |

| | | Standard Deviation of the average editing percent at the | | | | | |
|---|---|---|---|---|---|---|---|
| | | nucleotides numbered according to the position in the PWsp135 | | | | | |
| | Protein SEQ | spacer sequence on the non-target, genomic DNA strand | | | | | |
| pWISE | ID NO: | C.19 | C.22 | C.25 | C.27 | C.29 | C.33 |
| pWISE121 | 56 | 0.188% | 0.023% | 0.040% | 0.065% | 0.064% | 0.043% |
| pWISE1921 | 428 | 0.160% | 0.004% | 0.088% | 0.112% | 0.161% | 0.033% |
| pWISE1925 | 429 | 0.288% | 0.013% | 0.060% | 0.000% | 0.009% | 0.098% |
| pWISE4332 | 430 | 0.292% | 0.051% | 0.065% | 0.048% | 0.121% | 0.003% |
| pWISE4339 | 431 | 8.805% | 1.879% | 1.667% | 2.018% | 2.112% | 1.741% |
| pWISE6852 | 432 | 1.310% | 0.102% | 0.059% | 0.076% | 0.012% | 0.092% |
| pWISE6853 | 433 | No data | No data | No data | No data | No data | No data |
| pWISE9117 | 450 | No data | No data | No data | No data | No data | No data |
| pWISE9118 | 451 | 0.222% | 0.114% | 0.076% | 0.114% | 0.103% | 0.131% |
| pWISE9119 | 452 | 12.311% | 2.064% | 1.683% | 2.184% | 2.135% | 1.832% |
| pWISE9120 | 453 | 1.057% | 0.042% | 0.113% | 0.001% | 0.004% | 0.045% |
| pWISE9121 | 454 | 8.103% | 0.170% | 0.136% | 0.153% | 0.151% | 0.075% |
| pWISE9122 | 455 | 3.246% | 0.051% | 0.122% | 0.318% | 0.502% | 0.833% |
| pWISE9123 | 456 | No data | No data | No data | No data | No data | No data |
| pWISE9124 | 457 | 0.160% | 0.007% | 0.063% | 0.041% | 0.091% | 0.041% |
| pWISE9125 | 458 | 0.390% | 0.025% | 0.132% | 0.043% | 0.167% | 0.066% |
| pWISE9126 | 459 | No data | No data | No data | No data | No data | No data |
| pWISE9127 | 460 | No data | No data | No data | No data | No data | No data |
| pWISE9128 | 461 | 0.899% | 0.162% | 0.191% | 0.052% | 0.295% | 0.050% |
| pWISE9134 | 426 | 0.159% | 0.012% | 0.055% | 0.058% | 0.066% | 0.125% |
| pWISE9135 | 427 | 0.370% | 0.004% | 0.084% | 0.054% | 0.004% | 0.158% |

TABLE 16

| | | Average G to A editing percent | | |
|---|---|---|---|---|
| | | at the nucleotides numbered | | |
| | | according to the position in the | | |
| | | PWsp135 spacer sequence on the | | |
| | Protein SEQ | opposite, target genomic DNA strand | | |
| pWISE | ID NO: | G.-4 | G.2 | G.16 |
| pWISE121 | 56 | 0.004% | 0.001% | 0.611% |
| pWISE1921 | 428 | 0.003% | 0.015% | 0.026% |
| pWISE1925 | 429 | 0.001% | 0.003% | 0.039% |
| pWISE4332 | 430 | 0.005% | 0.004% | 0.001% |
| pWISE4339 | 431 | 0.000% | 0.005% | 0.099% |
| pWISE6852 | 432 | 0.015% | 0.000% | 0.012% |
| pWISE6853 | 433 | 0.008% | 0.015% | 0.000% |
| pWISE9117 | 450 | 0.000% | 0.013% | 0.090% |
| pWISE9118 | 451 | 0.006% | 0.003% | 0.258% |
| pWISE9119 | 452 | 0.012% | 0.003% | 0.051% |
| pWISE9120 | 453 | 0.019% | 0.002% | 6.797% |
| pWISE9121 | 454 | 0.004% | 0.000% | 0.079% |
| pWISE9122 | 455 | 0.003% | 0.004% | 0.279% |
| pWISE9123 | 456 | 0.002% | 0.002% | 0.214% |
| pWISE9124 | 457 | 0.001% | 0.004% | 1.014% |
| pWISE9125 | 458 | 0.004% | 0.005% | 0.779% |
| pWISE9126 | 459 | 0.003% | 0.000% | 2.303% |
| pWISE9127 | 460 | 0.003% | 0.002% | 0.020% |
| pWISE9128 | 461 | 0.003% | 0.005% | 0.680% |
| pWISE9134 | 426 | 0.004% | 0.002% | 0.066% |
| pWISE9135 | 427 | 0.000% | 0.000% | 0.951% |

TABLE 17

| | | Standard deviation of the average G to | | |
|---|---|---|---|---|
| | | A editing percent at the nucleotides | | |
| | | numbered according to the position | | |
| | | in the PWsp135 spacer sequence on the | | |
| | Protein SEQ | opposite, target genomic DNA strand | | |
| pWISE | ID NO: | G.-4 | G.2 | G.16 |
| pWISE121 | 56 | 0.001% | 0.002% | 0.025% |
| pWISE1921 | 428 | 0.002% | 0.017% | 0.011% |
| pWISE1925 | 429 | 0.002% | 0.000% | 0.020% |
| pWISE4332 | 430 | 0.002% | 0.000% | 0.002% |
| pWISE4339 | 431 | 0.000% | 0.007% | 0.139% |
| pWISE6852 | 432 | 0.015% | 0.000% | 0.006% |
| pWISE6853 | 433 | No data | No data | No data |
| pWISE9117 | 450 | No data | No data | No data |
| pWISE9118 | 451 | 0.006% | 0.001% | 0.120% |
| pWISE9119 | 452 | 0.003% | 0.004% | 0.022% |
| pWISE9120 | 453 | 0.027% | 0.002% | 0.793% |
| pWISE9121 | 454 | 0.006% | 0.000% | 0.011% |
| pWISE9122 | 455 | 0.000% | 0.005% | 0.384% |
| pWISE9123 | 456 | No data | No data | No data |
| pWISE9124 | 457 | 0.002% | 0.002% | 0.081% |
| pWISE9125 | 458 | 0.000% | 0.004% | 0.095% |
| pWISE9126 | 459 | No data | No data | No data |
| pWISE9127 | 460 | No data | No data | No data |
| pWISE9128 | 461 | 0.001% | 0.001% | 0.026% |
| pWISE9134 | 426 | 0.005% | 0.002% | 0.037% |
| pWISE9135 | 427 | 0.000% | 0.000% | 0.094% |

TABLE 18

| | | Average C to T editing percent at the nucleotides numbered | | | | | |
|---|---|---|---|---|---|---|---|
| | Protein | according to the position in the PWsp389 spacer sequence on the | | | | | |
| | SEQ ID | non-target, genomic DNA strand | | | | | |
| pWISE | NO: | C.-5 | C.-1 | C.4 | C.6 | C.7 | C.11 |
| pWISE121 | 56 | 0.000% | 0.004% | 0.011% | 0.051% | 0.125% | 0.323% |
| pWISE1921 | 428 | 0.008% | 0.456% | 0.513% | 9.800% | 19.476% | 20.965% |
| pWISE1925 | 429 | 0.000% | 0.843% | 0.536% | 11.402% | 18.213% | 19.821% |
| pWISE4332 | 430 | 0.000% | 0.000% | 2.086% | 2.095% | 6.942% | 6.942% |
| pWISE4339 | 431 | 0.000% | 0.435% | 0.274% | 8.060% | 11.558% | 12.045% |
| pWISE6852 | 432 | 0.007% | 0.238% | 0.163% | 5.269% | 8.548% | 9.071% |
| pWISE6853 | 433 | 0.000% | 0.213% | 0.180% | 9.374% | 12.452% | 13.227% |
| pWISE9117 | 450 | 0.010% | 0.552% | 0.480% | 4.521% | 12.347% | 15.308% |
| pWISE9118 | 451 | 0.024% | 0.477% | 0.467% | 0.217% | 1.897% | 7.253% |
| pWISE9119 | 452 | 0.005% | 0.573% | 0.556% | 2.548% | 17.092% | 23.577% |
| pWISE9120 | 453 | 0.010% | 0.185% | 0.292% | 0.058% | 0.301% | 2.158% |
| pWISE9121 | 454 | 0.000% | 0.294% | 0.311% | 0.177% | 2.178% | 7.121% |
| pWISE9122 | 455 | 0.032% | 0.871% | 1.003% | 0.392% | 3.083% | 17.531% |
| pWISE9123 | 456 | 0.034% | 0.660% | 0.901% | 7.263% | 21.480% | 26.577% |
| pWISE9124 | 457 | 0.007% | 0.276% | 0.317% | 0.774% | 7.124% | 13.284% |
| pWISE9125 | 458 | 0.010% | 0.632% | 0.805% | 9.056% | 11.011% | 17.307% |
| pWISE9126 | 459 | 0.004% | 0.061% | 0.041% | 0.063% | 0.471% | 1.067% |
| pWISE9127 | 460 | 0.001% | 0.072% | 0.102% | 0.138% | 0.838% | 3.744% |
| pWISE9128 | 461 | 0.000% | 0.937% | 0.860% | 1.562% | 6.108% | 19.437% |
| pWISE9134 | 426 | 0.022% | 0.579% | 0.776% | 11.143% | 20.723% | 22.302% |
| pWISE9135 | 427 | 0.014% | 0.985% | 1.065% | 9.861% | 13.922% | 22.716% |

| | | Average C to T editing percent at the nucleotides numbered | | | | | |
|---|---|---|---|---|---|---|---|
| | Protein | according to the position in the PWsp389 spacer sequence on | | | | | |
| | SEQ ID | the non-target, genomic DNA strand | | | | | |
| pWISE | NO: | C.12 | C.16 | C.17 | C.18 | C.25 | C.26 |
| pWISE121 | 56 | 0.338% | 0.536% | 1.449% | 0.404% | 0.004% | 0.084% |
| pWISE1921 | 428 | 20.946% | 5.889% | 3.032% | 2.926% | 0.012% | 0.000% |
| pWISE1925 | 429 | 19.800% | 4.399% | 2.128% | 1.868% | 0.024% | 0.003% |
| pWISE4332 | 430 | 6.942% | 4.494% | 4.494% | 2.418% | 0.000% | 0.000% |
| pWISE4339 | 431 | 11.975% | 1.598% | 0.749% | 0.767% | 0.009% | 0.006% |
| pWISE6852 | 432 | 8.969% | 2.465% | 0.903% | 0.828% | 0.014% | 0.000% |
| pWISE6853 | 433 | 13.300% | 1.329% | 0.406% | 0.362% | 0.004% | 0.008% |
| pWISE9117 | 450 | 15.149% | 7.565% | 5.997% | 6.612% | 0.003% | 0.000% |
| pWISE9118 | 451 | 6.845% | 1.855% | 0.913% | 0.793% | 0.004% | 0.006% |
| pWISE9119 | 452 | 23.420% | 11.357% | 7.858% | 8.294% | 0.032% | 0.029% |
| pWISE9120 | 453 | 2.090% | 0.612% | 0.525% | 0.496% | 0.039% | 0.049% |
| pWISE9121 | 454 | 6.928% | 2.363% | 1.152% | 1.228% | 0.008% | 0.008% |
| pWISE9122 | 455 | 17.449% | 9.848% | 7.807% | 7.926% | 0.026% | 0.036% |
| pWISE9123 | 456 | 26.625% | 11.755% | 9.196% | 9.581% | 0.021% | 0.028% |
| pWISE9124 | 457 | 13.199% | 4.884% | 3.348% | 3.193% | 0.003% | 0.001% |
| pWISE9125 | 458 | 17.053% | 11.007% | 8.898% | 6.027% | 0.008% | 0.000% |
| pWISE9126 | 459 | 1.057% | 0.369% | 0.249% | 0.203% | 0.012% | 0.021% |
| pWISE9127 | 460 | 3.387% | 0.810% | 0.362% | 0.142% | 0.002% | 0.004% |
| pWISE9128 | 461 | 19.402% | 5.747% | 3.305% | 3.069% | 0.003% | 0.008% |
| pWISE9134 | 426 | 22.340% | 6.183% | 3.064% | 3.048% | 0.005% | 0.005% |
| pWISE9135 | 427 | 22.433% | 13.279% | 10.219% | 6.828% | 0.009% | 0.008% |

| | | Average C to T editing percent at the nucleotides | | |
|---|---|---|---|---|
| | | numbered according to the position in the PWsp389 | | |
| | Protein SEQ | spacer sequence on the non-target, genomic DNA strand | | |
| pWISE | ID NO: | C.27 | C.28 | C.30 |
| pWISE121 | 56 | 0.000% | 0.125% | 0.000% |
| pWISE1921 | 428 | 0.002% | 0.008% | 0.005% |
| pWISE1925 | 429 | 0.000% | 0.006% | 0.002% |
| pWISE4332 | 430 | 0.000% | 0.000% | 0.000% |
| pWISE4339 | 431 | 0.003% | 0.000% | 0.000% |
| pWISE6852 | 432 | 0.007% | 0.000% | 0.000% |
| pWISE6853 | 433 | 0.000% | 0.000% | 0.000% |
| pWISE9117 | 450 | 0.000% | 0.006% | 0.004% |
| pWISE9118 | 451 | 0.014% | 0.015% | 0.002% |
| pWISE9119 | 452 | 0.035% | 0.033% | 0.000% |
| pWISE9120 | 453 | 0.039% | 0.039% | 0.049% |
| pWISE9121 | 454 | 0.000% | 0.000% | 0.017% |
| pWISE9122 | 455 | 0.019% | 0.019% | 0.004% |
| pWISE9123 | 456 | 0.069% | 0.069% | 0.000% |
| pWISE9124 | 457 | 0.018% | 0.014% | 0.003% |
| pWISE9125 | 458 | 0.038% | 0.046% | 0.000% |
| pWISE9126 | 459 | 0.000% | 0.009% | 0.003% |
| pWISE9127 | 460 | 0.005% | 0.001% | 0.004% |
| pWISE9128 | 461 | 0.000% | 0.013% | 0.000% |
| pWISE9134 | 426 | 0.005% | 0.005% | 0.005% |
| pWISE9135 | 427 | 0.003% | 0.003% | 0.000% |

TABLE 19

| | | Standard Deviation of the average editing percent at the | | | | | |
|---|---|---|---|---|---|---|---|
| | | nucleotides numbered according to the position in the PWsp389 | | | | | |
| | Protein SEQ | spacer sequence on the non-target, genomic DNA strand | | | | | |
| pWISE | ID NO: | C.−5 | C.−1 | C.4 | C.6 | C.7 | C.11 |
| pWISE121 | 56 | No data | No data | No data | No data | No data | No data |
| pWISE1921 | 428 | 0.011% | 0.080% | 0.148% | 0.737% | 0.675% | 0.756% |
| pWISE1925 | 429 | 0.000% | 0.369% | 0.001% | 0.084% | 0.696% | 1.043% |
| pWISE4332 | 430 | No data | No data | No data | No data | No data | No data |
| pWISE4339 | 431 | No data | No data | No data | No data | No data | No data |
| pWISE6852 | 432 | No data | No data | No data | No data | No data | No data |
| pWISE6853 | 433 | 0.000% | 0.091% | 0.161% | 0.426% | 0.408% | 0.341% |
| pWISE9117 | 450 | 0.002% | 0.011% | 0.074% | 0.240% | 1.162% | 1.404% |
| pWISE9118 | 451 | 0.014% | 0.001% | 0.036% | 0.029% | 0.013% | 0.002% |
| pWISE9119 | 452 | 0.007% | 0.120% | 0.177% | 0.300% | 1.510% | 0.775% |
| pWISE9120 | 453 | No data | No data | No data | No data | No data | No data |
| pWISE9121 | 454 | No data | No data | No data | No data | No data | No data |
| pWISE9122 | 455 | 0.045% | 0.043% | 0.055% | 0.005% | 0.301% | 2.519% |
| pWISE9123 | 456 | No data | No data | No data | No data | No data | No data |
| pWISE9124 | 457 | 0.008% | 0.003% | 0.028% | 0.033% | 0.538% | 0.444% |
| pWISE9125 | 458 | 0.014% | 0.097% | 0.067% | 0.804% | 0.756% | 1.033% |
| pWISE9126 | 459 | 0.006% | 0.001% | 0.029% | 0.023% | 0.215% | 0.192% |
| pWISE9127 | 460 | 0.001% | 0.037% | 0.025% | 0.026% | 0.055% | 0.194% |
| pWISE9128 | 461 | 0.000% | 0.078% | 0.263% | 0.318% | 0.004% | 0.689% |
| pWISE9134 | 426 | No data | No data | No data | No data | No data | No data |
| pWISE9135 | 427 | 0.010% | 0.050% | 0.065% | 0.240% | 0.059% | 0.984% |
| | | Standard Deviation of the average editing percent at the | | | | | |
| | | nucleotides numbered according to the position in the PWsp389 | | | | | |
| | Protein SEQ | spacer sequence on the non-target, genomic DNA strand | | | | | |
| pWISE | ID NO: | C.12 | C.16 | C.17 | C.18 | C.25 | C.26 |
| pWISE121 | 56 | No data | No data | No data | No data | No data | No data |
| pWISE1921 | 428 | 0.624% | 0.062% | 0.095% | 0.255% | 0.016% | 0.000% |
| pWISE1925 | 429 | 1.003% | 0.146% | 0.365% | 0.218% | 0.024% | 0.005% |
| pWISE4332 | 430 | No data | No data | No data | No data | No data | No data |
| pWISE4339 | 431 | No data | No data | No data | No data | No data | No data |
| pWISE6852 | 432 | No data | No data | No data | No data | No data | No data |
| pWISE6853 | 433 | 0.285% | 0.189% | 0.244% | 0.072% | 0.006% | 0.000% |
| pWISE9117 | 450 | 1.499% | 1.089% | 0.807% | 0.861% | 0.004% | 0.000% |
| pWISE9118 | 451 | 0.051% | 0.271% | 0.033% | 0.028% | 0.005% | 0.002% |
| pWISE9119 | 452 | 0.892% | 0.129% | 0.138% | 0.557% | 0.038% | 0.021% |
| pWISE9120 | 453 | No data | No data | No data | No data | No data | No data |
| pWISE9121 | 454 | No data | No data | No data | No data | No data | No data |
| pWISE9122 | 455 | 2.503% | 1.873% | 0.988% | 1.246% | 0.015% | 0.029% |
| pWISE9123 | 456 | No data | No data | No data | No data | No data | No data |
| pWISE9124 | 457 | 0.519% | 0.663% | 0.419% | 0.299% | 0.005% | 0.001% |
| pWISE9125 | 458 | 1.169% | 0.697% | 0.796% | 0.795% | 0.002% | 0.000% |
| pWISE9126 | 459 | 0.169% | 0.174% | 0.107% | 0.098% | 0.008% | 0.017% |
| pWISE9127 | 460 | 0.195% | 0.071% | 0.035% | 0.026% | 0.003% | 0.005% |
| pWISE9128 | 461 | 0.712% | 0.438% | 0.123% | 0.174% | 0.004% | 0.002% |
| pWISE9134 | 426 | No data | No data | No data | No data | No data | No data |
| pWISE9135 | 427 | 0.932% | 0.240% | 0.136% | 0.160% | 0.009% | 0.002% |

| | | Standard Deviation of the average editing percent at the | | |
|---|---|---|---|---|
| | | nucleotides numbered according to the position in the PWsp389 | | |
| | Protein SEQ | spacer sequence on the non-target, genomic DNA strand | | |
| pWISE | ID NO: | C.27 | C.28 | C.30 |
| pWISE121 | 56 | No data | No data | No data |
| pWISE1921 | 428 | 0.003% | 0.011% | 0.007% |
| pWISE1925 | 429 | 0.000% | 0.003% | 0.002% |
| pWISE4332 | 430 | No data | No data | No data |
| pWISE4339 | 431 | No data | No data | No data |
| pWISE6852 | 432 | No data | No data | No data |
| pWISE6853 | 433 | 0.000% | 0.000% | 0.000% |
| pWISE9117 | 450 | 0.000% | 0.008% | 0.006% |
| pWISE9118 | 451 | 0.009% | 0.022% | 0.002% |
| pWISE9119 | 452 | 0.023% | 0.026% | 0.000% |
| pWISE9120 | 453 | No data | No data | No data |
| pWISE9121 | 454 | No data | No data | No data |
| pWISE9122 | 455 | 0.016% | 0.016% | 0.006% |
| pWISE9123 | 456 | No data | No data | No data |
| pWISE9124 | 457 | 0.011% | 0.016% | 0.004% |
| pWISE9125 | 458 | 0.054% | 0.028% | 0.000% |
| pWISE9126 | 459 | 0.000% | 0.012% | 0.005% |
| pWISE9127 | 460 | 0.003% | 0.001% | 0.004% |
| pWISE9128 | 461 | 0.000% | 0.009% | 0.000% |
| pWISE9134 | 426 | No data | No data | No data |
| pWISE9135 | 427 | 0.004% | 0.000% | 0.000% |

TABLE 20
numbered according to the position in the PWsp389 spacer

| | | Average G to A editing percent at the nucleotides | | | | |
|---|---|---|---|---|---|---|
| | | numbered according to the position in the PWsp389 spacer | | | | |
| | Protein SEQ | sequence on the opposite, target genomic DNA strand | | | | |
| pWISE | ID NO: | G.−9 | G.−8 | G.−7 | G.−6 | G.2 |
| pWISE121 | 56 | 0.004% | 0.000% | 0.000% | 0.011% | 0.154% |
| pWISE1921 | 428 | 0.054% | 0.005% | 0.005% | 0.000% | 0.000% |
| pWISE1925 | 429 | 0.030% | 0.005% | 0.002% | 0.007% | 0.022% |
| pWISE4332 | 430 | 0.000% | 0.000% | 0.000% | 0.000% | 0.000% |
| pWISE4339 | 431 | 0.003% | 0.003% | 0.000% | 0.003% | 0.009% |
| pWISE6852 | 432 | 0.068% | 0.000% | 0.007% | 0.007% | 0.068% |
| pWISE6853 | 433 | 0.004% | 0.004% | 0.000% | 0.008% | 0.000% |
| pWISE9117 | 450 | 0.038% | 0.034% | 0.003% | 0.000% | 0.000% |
| pWISE9118 | 451 | 0.078% | 0.053% | 0.001% | 0.000% | 0.008% |
| pWISE9119 | 452 | 0.039% | 0.006% | 0.002% | 0.013% | 0.002% |
| pWISE9120 | 453 | 0.000% | 0.000% | 0.000% | 0.000% | 0.000% |
| pWISE9121 | 454 | 0.008% | 0.008% | 0.000% | 0.000% | 0.000% |
| pWISE9122 | 455 | 0.006% | 0.011% | 0.002% | 0.005% | 0.018% |
| pWISE9123 | 456 | 0.021% | 0.007% | 0.000% | 0.000% | 0.007% |
| pWISE9124 | 457 | 0.007% | 0.029% | 0.014% | 0.004% | 0.006% |
| pWISE9125 | 458 | 0.000% | 0.003% | 0.000% | 0.000% | 0.005% |
| pWISE9126 | 459 | 0.004% | 0.000% | 0.000% | 0.000% | 0.000% |
| pWISE9127 | 460 | 0.002% | 0.006% | 0.001% | 0.001% | 0.004% |
| pWISE9128 | 461 | 0.016% | 0.000% | 0.000% | 0.005% | 0.013% |
| pWISE9134 | 426 | 0.060% | 0.000% | 0.005% | 0.000% | 0.000% |
| pWISE9135 | 427 | 0.023% | 0.005% | 0.008% | 0.003% | 0.005% |
| | | Average G to A editing percent at the nucleotides | | | | |
| | | numbered according to the position in the PWsp389 spacer | | | | |
| | Protein SEQ | sequence on the opposite, target genomic DNA strand | | | | |
| pWISE | ID NO: | G.14 | G.21 | G.23 | G.24 | G.32 |
| pWISE121 | 56 | 1.244% | 0.205% | 0.561% | 0.495% | 0.007% |
| pWISE1921 | 428 | 0.059% | 0.016% | 0.032% | 0.033% | 0.138% |
| pWISE1925 | 429 | 0.045% | 0.014% | 0.000% | 0.002% | 0.071% |
| pWISE4332 | 430 | 0.010% | 0.000% | 0.000% | 0.000% | 0.010% |
| pWISE4339 | 431 | 0.021% | 0.006% | 0.003% | 0.000% | 0.079% |
| pWISE6852 | 432 | 0.014% | 0.007% | 0.007% | 0.007% | 0.081% |
| pWISE6853 | 433 | 0.021% | 0.000% | 0.004% | 0.000% | 0.063% |
| pWISE9117 | 450 | 0.156% | 0.008% | 0.046% | 0.094% | 0.233% |
| pWISE9118 | 451 | 0.064% | 0.036% | 0.021% | 0.014% | 0.090% |
| pWISE9119 | 452 | 0.065% | 0.076% | 0.200% | 0.126% | 0.448% |
| pWISE9120 | 453 | 1.264% | 0.301% | 0.146% | 0.146% | 0.117% |
| pWISE9121 | 454 | 0.101% | 0.000% | 0.000% | 0.000% | 0.000% |
| pWISE9122 | 455 | 0.245% | 0.067% | 0.286% | 0.387% | 0.255% |
| pWISE9123 | 456 | 0.392% | 0.144% | 1.231% | 1.052% | 0.413% |
| pWISE9124 | 457 | 0.128% | 0.169% | 0.153% | 0.086% | 0.052% |
| pWISE9125 | 458 | 0.470% | 0.024% | 0.013% | 0.054% | 0.346% |
| pWISE9126 | 459 | 0.216% | 0.079% | 0.032% | 0.012% | 0.007% |
| pWISE9127 | 460 | 0.005% | 0.023% | 0.027% | 0.021% | 0.027% |
| pWISE9128 | 461 | 0.041% | 0.005% | 0.058% | 0.058% | 0.181% |
| pWISE9134 | 426 | 0.005% | 0.005% | 0.005% | 0.005% | 0.109% |
| pWISE9135 | 427 | 0.394% | 0.038% | 0.150% | 0.116% | 0.630% |

TABLE 21

| | | Standard deviation of the average G to A editing percent at the | | | | |
|---|---|---|---|---|---|---|
| | | nucleotides numbered according to the position in the PWsp389 | | | | |
| | Protein SEQ | spacer sequence on the opposite, target genomic DNA strand | | | | |
| pWISE | ID NO: | G.−9 | G.−8 | G.−7 | G.−6 | G.2 |
| pWISE121 | 56 | No data | No data | No data | No data | No data |
| pWISE1921 | 428 | 0.003% | 0.007% | 0.007% | 0.000% | 0.000% |
| pWISE1925 | 429 | 0.038% | 0.002% | 0.003% | 0.001% | 0.031% |
| pWISE4332 | 430 | No data | No data | No data | No data | No data |
| pWISE4339 | 431 | No data | No data | No data | No data | No data |
| pWISE6852 | 432 | No data | No data | No data | No data | No data |
| pWISE6853 | 433 | 0.006% | 0.006% | 0.000% | 0.000% | 0.000% |
| pWISE9117 | 450 | 0.018% | 0.024% | 0.004% | 0.000% | 0.000% |
| pWISE9118 | 451 | 0.029% | 0.055% | 0.001% | 0.000% | 0.002% |
| pWISE9119 | 452 | 0.013% | 0.002% | 0.003% | 0.012% | 0.003% |
| pWISE9120 | 453 | No data | No data | No data | No data | No data |
| pWISE9121 | 454 | No data | No data | No data | No data | No data |
| pWISE9122 | 455 | 0.003% | 0.004% | 0.002% | 0.007% | 0.026% |
| pWISE9123 | 456 | No data | No data | No data | No data | No data |
| pWISE9124 | 457 | 0.009% | 0.013% | 0.010% | 0.003% | 0.000% |
| pWISE9125 | 458 | 0.000% | 0.005% | 0.000% | 0.000% | 0.007% |
| pWISE9126 | 459 | 0.006% | 0.000% | 0.000% | 0.000% | 0.000% |
| pWISE9127 | 460 | 0.003% | 0.001% | 0.002% | 0.002% | 0.005% |
| pWISE9128 | 461 | 0.005% | 0.000% | 0.000% | 0.007% | 0.009% |
| pWISE9134 | 426 | No data | No data | No data | No data | No data |
| pWISE9135 | 427 | 0.029% | 0.002% | 0.002% | 0.000% | 0.002% |
| | | Standard deviation of the average G to A editing percent at the | | | | |
| | | nucleotides numbered according to the position in the PWsp389 | | | | |
| | Protein SEQ | spacer sequence on the opposite, target genomic DNA strand | | | | |
| pWISE | ID NO: | G.14 | G.21 | G.23 | G.24 | G.32 |
| pWISE121 | 56 | No data | No data | No data | No data | No data |
| pWISE1921 | 428 | 0.061% | 0.023% | 0.034% | 0.046% | 0.002% |
| pWISE1925 | 429 | 0.012% | 0.015% | 0.000% | 0.003% | 0.086% |
| pWISE4332 | 430 | No data | No data | No data | No data | No data |
| pWISE4339 | 431 | No data | No data | No data | No data | No data |
| pWISE6852 | 432 | No data | No data | No data | No data | No data |
| pWISE6853 | 433 | 0.029% | 0.000% | 0.006% | 0.000% | 0.016% |
| pWISE9117 | 450 | 0.076% | 0.012% | 0.041% | 0.069% | 0.046% |
| pWISE9118 | 451 | 0.068% | 0.021% | 0.019% | 0.020% | 0.001% |
| pWISE9119 | 452 | 0.024% | 0.014% | 0.137% | 0.052% | 0.058% |
| pWISE9120 | 453 | No data | No data | No data | No data | No data |
| pWISE9121 | 454 | No data | No data | No data | No data | No data |
| pWISE9122 | 455 | 0.134% | 0.028% | 0.013% | 0.145% | 0.053% |
| pWISE9123 | 456 | No data | No data | No data | No data | No data |
| pWISE9124 | 457 | 0.088% | 0.056% | 0.029% | 0.023% | 0.016% |
| pWISE9125 | 458 | 0.072% | 0.021% | 0.019% | 0.036% | 0.141% |
| pWISE9126 | 459 | 0.033% | 0.001% | 0.017% | 0.008% | 0.009% |
| pWISE9127 | 460 | 0.002% | 0.031% | 0.002% | 0.017% | 0.035% |
| pWISE9128 | 461 | 0.058% | 0.007% | 0.055% | 0.082% | 0.004% |
| pWISE9134 | 426 | No data | No data | No data | No data | No data |
| pWISE9135 | 427 | 0.085% | 0.005% | 0.062% | 0.068% | 0.181% |

TABLE 22

| | |
|---|---|
| | Average C to T editing percent at the nucleotides numbered |
| | according to the position in the PWsp390 spacer sequence on |
| Protein SEQ | the non-target, genomic DNA strand |

| pWISE | ID NO: | C.−5 | C.2 | C.6 | C.7 | C.8 | C.9 |
|---|---|---|---|---|---|---|---|
| pWISE121 | 56 | 0.001% | 0.036% | 0.204% | 0.243% | 0.271% | 0.306% |
| pWISE1921 | 428 | No data | No data | No data | No data | No data | No data |
| pWISE1925 | 429 | 0.004% | 4.734% | 16.811% | 16.945% | 17.111% | 17.252% |
| pWISE4332 | 430 | 0.007% | 1.615% | 9.902% | 10.126% | 10.478% | 10.624% |
| pWISE4339 | 431 | 0.021% | 1.945% | 12.224% | 12.230% | 12.411% | 12.516% |
| pWISE6852 | 432 | 0.006% | 1.154% | 6.962% | 7.048% | 7.260% | 7.323% |
| pWISE6853 | 433 | 0.006% | 1.719% | 12.179% | 12.324% | 12.571% | 12.862% |
| pWISE9117 | 450 | 0.041% | 1.451% | 10.661% | 11.872% | 12.949% | 13.410% |
| pWISE9118 | 451 | 0.004% | 1.054% | 1.660% | 2.057% | 3.233% | 4.731% |
| pWISE9119 | 452 | 0.025% | 2.798% | 14.296% | 16.976% | 18.713% | 19.812% |
| pWISE9120 | 453 | 0.046% | 0.381% | 0.494% | 0.702% | 0.894% | 1.114% |
| pWISE9121 | 454 | 0.056% | 1.364% | 2.252% | 2.827% | 4.559% | 6.308% |
| pWISE9122 | 455 | 0.016% | 2.888% | 4.090% | 5.096% | 7.686% | 9.968% |
| pWISE9123 | 456 | 0.035% | 1.986% | 13.883% | 15.149% | 16.342% | 17.234% |
| pWISE9124 | 457 | 0.049% | 1.177% | 3.785% | 4.339% | 6.071% | 7.191% |
| pWISE9125 | 458 | 0.025% | 2.081% | 15.070% | 15.595% | 17.056% | 17.938% |
| pWISE9126 | 459 | 0.000% | 0.532% | 0.662% | 0.713% | 1.069% | 1.196% |
| pWISE9127 | 460 | 0.021% | 0.468% | 1.118% | 1.168% | 2.348% | 3.537% |
| pWISE9128 | 461 | 0.008% | 2.151% | 7.752% | 8.531% | 11.355% | 14.796% |
| pWISE9134 | 426 | 0.020% | 4.185% | 16.492% | 16.768% | 17.044% | 17.304% |
| pWISE9135 | 427 | 0.061% | 2.445% | 15.598% | 16.287% | 17.347% | 18.365% |

| | | Average C to T editing percent at the nucleotides numbered | | | | | |
|---|---|---|---|---|---|---|---|
| | | according to the position in the PWsp390 spacer sequence on | | | | | |
| | Protein SEQ | the non-target, genomic DNA strand | | | | | |
| pWISE | ID NO: | C.11 | C.12 | C.14 | C.15 | C.16 | C.17 |
| pWISE121 | 56 | 0.308% | 0.392% | 0.187% | 0.728% | 1.621% | 2.842% |
| pWISE1921 | 428 | No data | No data | No data | No data | No data | No data |
| pWISE1925 | 429 | 17.241% | 17.406% | 8.709% | 9.728% | 9.726% | 9.821% |
| pWISE4332 | 430 | 10.649% | 10.694% | 6.360% | 6.625% | 6.376% | 6.485% |
| pWISE4339 | 431 | 12.478% | 12.483% | 8.800% | 9.120% | 8.912% | 8.841% |
| pWISE6852 | 432 | 7.427% | 7.392% | 4.040% | 4.316% | 4.333% | 4.436% |
| pWISE6853 | 433 | 12.750% | 12.862% | 8.214% | 8.590% | 8.483% | 8.209% |
| pWISE9117 | 450 | 13.765% | 13.761% | 3.804% | 5.090% | 5.741% | 7.314% |
| pWISE9118 | 451 | 9.524% | 9.034% | 0.662% | 1.272% | 1.622% | 1.975% |
| pWISE9119 | 452 | 20.612% | 20.307% | 8.860% | 11.277% | 11.756% | 12.877% |
| pWISE9120 | 453 | 1.990% | 1.966% | 0.322% | 0.637% | 0.731% | 0.770% |
| pWISE9121 | 454 | 12.786% | 12.213% | 0.915% | 1.715% | 2.034% | 2.295% |
| pWISE9122 | 455 | 16.937% | 17.006% | 6.783% | 9.797% | 10.570% | 11.929% |
| pWISE9123 | 456 | 17.516% | 17.518% | 7.876% | 9.803% | 10.296% | 10.554% |
| pWISE9124 | 457 | 8.179% | 8.052% | 2.610% | 4.134% | 4.586% | 5.049% |
| pWISE9125 | 458 | 19.331% | 19.180% | 7.894% | 9.511% | 10.417% | 10.657% |
| pWISE9126 | 459 | 1.681% | 1.681% | 0.317% | 0.662% | 0.724% | 0.738% |
| pWISE9127 | 460 | 7.514% | 7.037% | 0.309% | 0.619% | 0.850% | 1.043% |
| pWISE9128 | 461 | 15.344% | 15.376% | 5.060% | 5.483% | 5.811% | 6.444% |
| pWISE9134 | 426 | 17.281% | 17.332% | 7.595% | 8.535% | 8.609% | 8.941% |
| pWISE9135 | 427 | 19.656% | 19.504% | 6.609% | 8.847% | 10.648% | 10.740% |

| | | Average C to T editing percent at the nucleotides numbered | | | |
|---|---|---|---|---|---|
| | | according to the position in the PWsp390 spacer sequence on | | | |
| | Protein SEQ | the non-target, genomic DNA strand | | | |
| pWISE | ID NO: | C.19 | C.27 | C.28 | C.30 |
| pWISE121 | 56 | 1.681% | 0.001% | 0.000% | 0.071% |
| pWISE1921 | 428 | No data | No data | No data | No data |
| pWISE1925 | 429 | 3.939% | 0.014% | 0.035% | 0.002% |
| pWISE4332 | 430 | 1.635% | 0.000% | 0.005% | 0.000% |
| pWISE4339 | 431 | 2.099% | 0.000% | 0.000% | 0.004% |
| pWISE6852 | 432 | 1.429% | 0.006% | 0.000% | 0.000% |
| pWISE6853 | 433 | 2.441% | 0.011% | 0.011% | 0.006% |
| pWISE9117 | 450 | 5.321% | 0.007% | 0.011% | 0.035% |
| pWISE9118 | 451 | 0.982% | 0.021% | 0.025% | 0.004% |
| pWISE9119 | 452 | 7.808% | 0.018% | 0.014% | 0.027% |
| pWISE9120 | 453 | 0.854% | 0.056% | 0.049% | 0.009% |
| pWISE9121 | 454 | 0.872% | 0.000% | 0.006% | 0.000% |
| pWISE9122 | 455 | 7.986% | 0.036% | 0.020% | 0.003% |
| pWISE9123 | 456 | 6.218% | 0.016% | 0.024% | 0.014% |
| pWISE9124 | 457 | 2.675% | 0.008% | 0.016% | 0.013% |
| pWISE9125 | 458 | 3.721% | 0.004% | 0.004% | 0.004% |
| pWISE9126 | 459 | 0.680% | 0.000% | 0.000% | 0.008% |
| pWISE9127 | 460 | 0.364% | 0.002% | 0.000% | 0.000% |
| pWISE9128 | 461 | 2.416% | 0.020% | 0.016% | 0.008% |
| pWISE9134 | 426 | 3.120% | 0.008% | 0.037% | 0.000% |
| pWISE9135 | 427 | 5.677% | 0.006% | 0.030% | 0.000% |

TABLE 23

| | | Standard Deviation of the average editing percent at the | | | | | |
|---|---|---|---|---|---|---|---|
| | | nucleotides numbered according to the position in the PWsp390 | | | | | |
| | Protein SEQ | spacer sequence on the non-target, genomic DNA | | | | | |
| pWISE | ID NO: | C.−5 | C.2 | C.6 | C.7 | C.8 | C.9 |
| pWISE121 | 56 | No data | No data | No data | No data | No data | No data |
| pWISE1921 | 428 | No data | No data | No data | No data | No data | No data |
| pWISE1925 | 429 | 0.005% | 1.077% | 3.060% | 3.185% | 3.182% | 3.036% |
| pWISE4332 | 430 | 0.010% | 0.200% | 0.307% | 0.105% | 0.257% | 0.225% |
| pWISE4339 | 431 | 0.029% | 0.581% | 4.052% | 4.019% | 3.920% | 3.864% |
| pWISE6852 | 432 | No data | No data | No data | No data | No data | No data |
| pWISE6853 | 433 | No data | No data | No data | No data | No data | No data |
| pWISE9117 | 450 | 0.029% | 0.246% | 1.315% | 1.272% | 1.409% | 1.542% |
| pWISE9118 | 451 | 0.005% | 0.194% | 0.494% | 0.625% | 0.699% | 1.102% |
| pWISE9119 | 452 | 0.013% | 0.243% | 1.642% | 2.207% | 2.162% | 2.340% |
| pWISE9120 | 453 | 0.054% | 0.307% | 0.113% | 0.177% | 0.316% | 0.252% |
| pWISE9121 | 454 | 0.011% | 0.070% | 0.273% | 0.126% | 0.035% | 0.162% |
| pWISE9122 | 455 | 0.013% | 0.775% | 0.777% | 0.927% | 1.415% | 2.114% |
| pWISE9123 | 456 | 0.036% | 0.645% | 2.107% | 1.502% | 1.891% | 1.714% |
| pWISE9124 | 457 | 0.070% | 1.665% | 5.302% | 6.098% | 8.522% | 10.106% |
| pWISE9125 | 458 | 0.036% | 0.561% | 3.364% | 3.608% | 4.404% | 4.059% |
| pWISE9126 | 459 | 0.000% | 0.691% | 0.703% | 0.631% | 0.790% | 0.624% |
| pWISE9127 | 460 | 0.009% | 0.052% | 0.393% | 0.292% | 0.449% | 0.364% |
| pWISE9128 | 461 | 0.012% | 0.231% | 0.437% | 0.512% | 0.324% | 0.267% |
| pWISE9134 | 426 | 0.028% | 0.342% | 1.549% | 1.538% | 1.499% | 1.424% |
| pWISE9135 | 427 | 0.052% | 0.195% | 1.083% | 1.180% | 1.258% | 1.027% |

| | | Standard Deviation of the average editing percent at the | | | | | |
|---|---|---|---|---|---|---|---|
| | | nucleotides numbered according to the position in the PWsp390 | | | | | |
| | Protein SEQ | spacer sequence on the non-target, genomic DNA | | | | | |
| pWISE | ID NO: | C.11 | C.12 | C.14 | C.15 | C.16 | C.17 |
| pWISE121 | 56 | No data | No data | No data | No data | No data | No data |
| pWISE1921 | 428 | No data | No data | No data | No data | No data | No data |
| pWISE1925 | 429 | 3.064% | 3.114% | 2.169% | 2.252% | 2.163% | 2.319% |
| pWISE4332 | 430 | 0.101% | 0.125% | 0.758% | 0.973% | 0.448% | 0.629% |
| pWISE4339 | 431 | 3.885% | 3.818% | 3.164% | 3.477% | 3.289% | 2.889% |
| pWISE6852 | 432 | No data | No data | No data | No data | No data | No data |
| pWISE6853 | 433 | No data | No data | No data | No data | No data | No data |
| pWISE9117 | 450 | 1.797% | 1.705% | 0.779% | 0.954% | 0.996% | 1.255% |
| pWISE9118 | 451 | 0.978% | 0.885% | 0.004% | 0.032% | 0.094% | 0.472% |
| pWISE9119 | 452 | 2.413% | 2.310% | 1.219% | 1.622% | 1.354% | 1.236% |
| pWISE9120 | 453 | 0.354% | 0.320% | 0.135% | 0.184% | 0.162% | 0.150% |
| pWISE9121 | 454 | 1.081% | 0.999% | 0.159% | 0.115% | 0.159% | 0.082% |
| pWISE9122 | 455 | 4.434% | 4.445% | 1.720% | 2.239% | 2.319% | 2.600% |
| pWISE9123 | 456 | 1.446% | 1.443% | 0.636% | 0.994% | 1.467% | 1.832% |
| pWISE9124 | 457 | 11.490% | 11.311% | 3.692% | 5.847% | 6.473% | 7.128% |
| pWISE9125 | 458 | 3.820% | 4.046% | 2.077% | 2.700% | 2.260% | 1.981% |
| pWISE9126 | 459 | 0.953% | 0.953% | 0.346% | 0.703% | 0.628% | 0.596% |
| pWISE9127 | 460 | 0.632% | 0.340% | 0.036% | 0.112% | 0.090% | 0.153% |
| pWISE9128 | 461 | 0.374% | 0.502% | 0.323% | 0.143% | 0.061% | 0.488% |
| pWISE9134 | 426 | 1.352% | 1.384% | 0.284% | 0.366% | 0.309% | 0.484% |
| pWISE9135 | 427 | 1.182% | 1.295% | 1.011% | 1.241% | 1.609% | 1.257% |

| | | Standard Deviation of the average editing percent at the | | | |
|---|---|---|---|---|---|
| | | nucleotides numbered according to the position in the PWsp390 | | | |
| | Protein SEQ | spacer sequence on the non-target, genomic DNA strand | | | |
| pWISE | ID NO: | C.19 | C.27 | C.28 | C.30 |
| pWISE121 | 56 | No data | No data | No data | No data |
| pWISE1921 | 428 | No data | No data | No data | No data |
| pWISE1925 | 429 | 0.804% | 0.013% | 0.017% | 0.003% |
| pWISE4332 | 430 | 0.013% | 0.000% | 0.007% | 0.000% |
| pWISE4339 | 431 | 0.863% | 0.000% | 0.000% | 0.005% |
| pWISE6852 | 432 | No data | No data | No data | No data |
| pWISE6853 | 433 | No data | No data | No data | No data |
| pWISE9117 | 450 | 1.020% | 0.010% | 0.004% | 0.000% |
| pWISE9118 | 451 | 0.182% | 0.030% | 0.025% | 0.005% |
| pWISE9119 | 452 | 1.433% | 0.025% | 0.000% | 0.020% |
| pWISE9120 | 453 | 0.082% | 0.057% | 0.059% | 0.013% |
| pWISE9121 | 454 | 0.001% | 0.000% | 0.001% | 0.000% |
| pWISE9122 | 455 | 1.751% | 0.051% | 0.008% | 0.005% |
| pWISE9123 | 456 | 0.496% | 0.016% | 0.035% | 0.019% |
| pWISE9124 | 457 | 3.783% | 0.011% | 0.022% | 0.018% |
| pWISE9125 | 458 | 0.356% | 0.006% | 0.006% | 0.006% |
| pWISE9126 | 459 | 0.677% | 0.000% | 0.000% | 0.001% |
| pWISE9127 | 460 | 0.095% | 0.003% | 0.000% | 0.000% |
| pWISE9128 | 461 | 0.095% | 0.020% | 0.014% | 0.012% |
| pWISE9134 | 426 | 0.096% | 0.002% | 0.052% | 0.000% |
| pWISE9135 | 427 | 0.803% | 0.000% | 0.017% | 0.000% |

TABLE 24

| | | Average G to A editing percent at the nucleotides | | | | |
|---|---|---|---|---|---|---|
| | | numbered according to the position in the PWsp390 spacer | | | | |
| | Protein SEQ | sequence on the opposite, target genomic DNA strand | | | | |
| pWISE | ID NO: | G.−9 | G.−8 | G.4 | G.21 | G.23 |
| pWISE121 | 56 | 0.007% | 0.001% | 0.006% | 0.258% | 0.927% |
| pWISE1921 | 428 | No data | No data | No data | No data | No data |
| pWISE1925 | 429 | 0.027% | 0.025% | 0.149% | 0.019% | 0.099% |
| pWISE4332 | 430 | 0.000% | 0.052% | 0.168% | 0.002% | 0.036% |
| pWISE4339 | 431 | 0.000% | 0.000% | 0.080% | 0.034% | 0.069% |
| pWISE6852 | 432 | 0.006% | 0.000% | 0.121% | 0.011% | 0.000% |
| pWISE6853 | 433 | 0.067% | 0.045% | 0.101% | 0.028% | 0.000% |
| pWISE9117 | 450 | 0.026% | 0.044% | 0.046% | 0.052% | 0.058% |
| pWISE9118 | 451 | 0.016% | 0.000% | 0.128% | 0.040% | 0.109% |
| pWISE9119 | 452 | 0.002% | 0.010% | 0.006% | 0.018% | 0.435% |
| pWISE9120 | 453 | 0.008% | 0.004% | 0.077% | 0.762% | 0.688% |
| pWISE9121 | 454 | 0.050% | 0.071% | 0.081% | 0.034% | 0.180% |
| pWISE9122 | 455 | 0.003% | 0.006% | 0.035% | 0.077% | 0.509% |
| pWISE9123 | 456 | 0.019% | 0.000% | 0.019% | 0.014% | 0.100% |
| pWISE9124 | 457 | 0.021% | 0.010% | 0.010% | 0.153% | 0.355% |
| pWISE9125 | 458 | 0.029% | 0.000% | 0.029% | 0.008% | 0.034% |
| pWISE9126 | 459 | 0.000% | 0.000% | 0.022% | 0.079% | 0.050% |
| pWISE9127 | 460 | 0.008% | 0.008% | 0.004% | 0.004% | 0.093% |
| pWISE9128 | 461 | 0.006% | 0.003% | 0.008% | 0.030% | 0.046% |
| pWISE9134 | 426 | 0.026% | 0.026% | 0.028% | 0.047% | 0.086% |
| pWISE9135 | 427 | 0.000% | 0.000% | 0.015% | 0.036% | 0.152% |

| | | Average G to A editing percent at the nucleotides | | | |
|---|---|---|---|---|---|
| | | numbered according to the position in the PWsp390 spacer | | | |
| | Protein SEQ | sequence on the opposite, target genomic DNA strand | | | |
| pWISE | ID NO: | G.24 | G.25 | G.26 | G.33 |
| pWISE121 | 56 | 0.187% | 0.090% | 0.071% | 0.073% |
| pWISE1921 | 428 | No data | No data | No data | No data |
| pWISE1925 | 429 | 0.064% | 0.023% | 0.023% | 0.262% |
| pWISE4332 | 430 | 0.009% | 0.000% | 0.002% | 0.085% |
| pWISE4339 | 431 | 0.089% | 0.004% | 0.000% | 0.146% |
| pWISE6852 | 432 | 0.000% | 0.006% | 0.006% | 0.034% |
| pWISE6853 | 433 | 0.022% | 0.000% | 0.006% | 0.050% |
| pWISE9117 | 450 | 0.021% | 0.024% | 0.024% | 0.387% |
| pWISE9118 | 451 | 0.049% | 0.033% | 0.015% | 0.029% |
| pWISE9119 | 452 | 0.322% | 0.216% | 0.180% | 0.639% |
| pWISE9120 | 453 | 0.449% | 0.319% | 0.240% | 0.083% |
| pWISE9121 | 454 | 0.228% | 0.009% | 0.014% | 0.069% |
| pWISE9122 | 455 | 0.478% | 0.231% | 0.151% | 0.398% |
| pWISE9123 | 456 | 0.106% | 0.129% | 0.105% | 0.529% |
| pWISE9124 | 457 | 0.326% | 0.186% | 0.127% | 0.196% |
| pWISE9125 | 458 | 0.055% | 0.017% | 0.013% | 0.503% |
| pWISE9126 | 459 | 0.032% | 0.007% | 0.012% | 0.004% |
| pWISE9127 | 460 | 0.091% | 0.067% | 0.062% | 0.140% |
| pWISE9128 | 461 | 0.041% | 0.004% | 0.015% | 0.170% |
| pWISE9134 | 426 | 0.089% | 0.027% | 0.042% | 0.116% |
| pWISE9135 | 427 | 0.155% | 0.143% | 0.121% | 0.440% |

TABLE 25

| | | Standard deviation of the average G to A editing percent at the | | | | |
|---|---|---|---|---|---|---|
| | | nucleotides numbered according to the position in the PWsp390 | | | | |
| | Protein | spacer sequence on the opposite, target genomic DNA strand | | | | |
| pWISE | SEQ ID NO: | G.-9 | G.-8 | G.4 | G.21 | G.23 |
| pWISE121 | 56 | No data | No data | No data | No data | No data |
| pWISE1921 | 428 | No data | No data | No data | No data | No data |
| pWISE1925 | 429 | 0.026% | 0.029% | 0.048% | 0.027% | 0.011% |
| pWISE4332 | 430 | 0.000% | 0.074% | 0.131% | 0.003% | 0.050% |
| pWISE4339 | 431 | 0.000% | 0.000% | 0.103% | 0.048% | 0.086% |
| pWISE6852 | 432 | No data | No data | No data | No data | No data |
| pWISE6853 | 433 | No data | No data | No data | No data | No data |
| pWISE9117 | 450 | 0.037% | 0.062% | 0.046% | 0.074% | 0.042% |
| pWISE9118 | 451 | 0.002% | 0.000% | 0.036% | 0.057% | 0.032% |
| pWISE9119 | 452 | 0.002% | 0.005% | 0.002% | 0.016% | 0.095% |
| pWISE9120 | 453 | 0.011% | 0.006% | 0.057% | 0.104% | 0.042% |
| pWISE9121 | 454 | 0.042% | 0.071% | 0.008% | 0.009% | 0.022% |
| pWISE9122 | 455 | 0.004% | 0.001% | 0.030% | 0.022% | 0.150% |
| pWISE9123 | 456 | 0.020% | 0.000% | 0.020% | 0.019% | 0.135% |
| pWISE9124 | 457 | 0.029% | 0.015% | 0.001% | 0.216% | 0.464% |
| pWISE9125 | 458 | 0.042% | 0.000% | 0.030% | 0.012% | 0.048% |
| pWISE9126 | 459 | 0.000% | 0.000% | 0.031% | 0.112% | 0.071% |
| pWISE9127 | 460 | 0.001% | 0.001% | 0.005% | 0.006% | 0.036% |
| pWISE9128 | 461 | 0.009% | 0.004% | 0.012% | 0.042% | 0.030% |
| pWISE9134 | 426 | 0.017% | 0.017% | 0.001% | 0.000% | 0.026% |
| pWISE9135 | 427 | 0.000% | 0.000% | 0.022% | 0.026% | 0.111% |

| | | Standard deviation of the average G to A editing percent at the | | | |
|---|---|---|---|---|---|
| | | nucleotides numbered according to the position in the PWsp390 | | | |
| | Protein | spacer sequence on the opposite, target genomic DNA strand | | | |
| pWISE | SEQ ID NO: | G.24 | G.25 | G.26 | G.33 |
| pWISE121 | 56 | No data | No data | No data | No data |
| pWISE1921 | 428 | No data | No data | No data | No data |
| pWISE1925 | 429 | 0.060% | 0.032% | 0.032% | 0.050% |
| pWISE4332 | 430 | 0.013% | 0.000% | 0.003% | 0.106% |
| pWISE4339 | 431 | 0.035% | 0.005% | 0.000% | 0.152% |
| pWISE6852 | 432 | No data | No data | No data | No data |
| pWISE6853 | 433 | No data | No data | No data | No data |
| pWISE9117 | 450 | 0.029% | 0.034% | 0.034% | 0.052% |
| pWISE9118 | 451 | 0.003% | 0.016% | 0.021% | 0.041% |
| pWISE9119 | 452 | 0.018% | 0.045% | 0.067% | 0.001% |
| pWISE9120 | 453 | 0.105% | 0.144% | 0.091% | 0.049% |
| pWISE9121 | 454 | 0.002% | 0.012% | 0.020% | 0.057% |
| pWISE9122 | 455 | 0.049% | 0.030% | 0.076% | 0.032% |
| pWISE9123 | 456 | 0.150% | 0.021% | 0.056% | 0.149% |
| pWISE9124 | 457 | 0.461% | 0.263% | 0.179% | 0.264% |
| pWISE9125 | 458 | 0.077% | 0.012% | 0.006% | 0.094% |
| pWISE9126 | 459 | 0.046% | 0.010% | 0.004% | 0.005% |
| pWISE9127 | 460 | 0.040% | 0.063% | 0.018% | 0.030% |
| pWISE9128 | 461 | 0.011% | 0.006% | 0.003% | 0.059% |
| pWISE9134 | 426 | 0.022% | 0.029% | 0.021% | 0.044% |
| pWISE9135 | 427 | 0.081% | 0.116% | 0.077% | 0.029% |

### Example 5

[0283] EnAsCas12a circular permutants according to some embodiments of the present invention were tested. A glycine-serine linker was used to connect the native N- and C-termini of EnAsCas12a (SEQ ID NO:298). The glycine-serine linker had either 10 amino acids and a sequence of (GSS)ₙG (SEQ ID NO:36), wherein n is 3, or 16 amino acids and a sequence of (GSS)ₙG (SEQ ID NO:36), wherein n is 5. The circular permutants and control are listed in Table 26 and the targets are provided in Table 27.

TABLE 26
Tested EnAsCas12a constructs

| | Vector SEQ | DNA SEQ | | Protein |
|---|---|---|---|---|
| pWISE | ID NO: | ID NO: | Description | SEQ ID NO: |
| pWISE121 | 285 | 949 | EnAsCas12a | 298 |
| | | | nuclease(control) | |
| pWISE8345 | 286 | 327 | CP13_AsCas12a | 299 |
| pWISE8346 | 287 | 328 | CP14_AsCas12a | 300 |
| pWISE8347 | 288 | 329 | CP15_AsCas12a | 301 |
| pWISE8348 | 289 | 330 | CP16_AsCas12a | 302 |
| pWISE8349 | 290 | 331 | CP17_AsCas12a | 303 |
| pWISE8350 | 291 | 332 | CP18_AsCas12a | 304 |
| pWISE8351 | 292 | 333 | CP19_AsCas12a | 305 |
| pWISE8352 | 293 | 334 | CP20_AsCas12a | 306 |
| pWISE8353 | 294 | 335 | CP21_AsCas12a | 307 |
| pWISE8354 | 295 | 336 | CP22_AsCas12a | 308 |
| pWISE8355 | 296 | 337 | CP23_AsCas12a | 309 |
| pWISE8356 | 297 | 338 | CP24_AsCas12a | 310 |

TABLE 27
Targets

| Target | Target | | Spacer | | Vector |
|---|---|---|---|---|---|
| Nucleic | SEQ ID | | SEQ | | SEQ |
| Acid | NO: | Spacer | ID NO: | pWISE | ID NO: |
| human DNMT1 | 272 | PWsp1956 | 804 | pWISE5986 | 814 |
| human FANCF | 273 | PWsp1959 | 805 | pWISE5989 | 815 |
| human RNF2 | 274 | PWsp1960 | 806 | pWISE5990 | 816 |

[0284] The circular permutants and control were tested for their ability to generate INDELS at three different sites across two target nucleic acids (SEQ ID NOs: 273-274) in HEK293T cells using three spacers (SEQ ID NOs: 804-806). Three biological replicates and two technical replicates were tested. HEK293T cells were seeded into 48-well collagen-coated plates (Corning) in the absence of an antibiotic using DMEM media. At 70-80% confluency, cells were transfected with 1.5 μL of LTX (ThermoFisher Scientific) using 500 ng of the control or circular permutant plasmid and 500 ng of guide RNA plasmid according to manufacturer's protocol. After 3 days, the cells were lysed with a crude extraction method using TritonX buffer. Each control or circular permutant was scored based on the indel placement percentage in the FANCF and RNF2 genes using the guide RNAs. The results are shown in FIG. 12. As seen in FIG. 12, several EnAsCas12a circular permutants worked well in achieving high INDEL percentages.

### Example 6

[0285] Circular permutants according to some embodiments were tested in soy by optimizing the codon usage, promoter sequence, terminator sequence, and nuclear localization sequences for expression in soy. The circular permutants and control are listed in Table 28 and the targets are listed in Table 29.

TABLE 28
Constructs tested in soy

| | Vector | DNA | Description of | Protein |
|---|---|---|---|---|
| | SEQ | SEQ | soy optimized | SEQ |
| pWISE | ID NO: | ID NO: | construct | ID NO: |
| pWISE3380 | 734 | 246 | LbCas12a (control) | 56 |
| pWISE9517 | 728 | 248 | CP02-LbCas12a | 235 |
| pWISE9519 | 729 | 250 | CP04-LbCas12a | 237 |
| pWISE9521 | 730 | 252 | CP06-LbCas12a | 239 |
| pWISE9523 | 731 | 254 | CP08-LbCas12a | 241 |
| pWISE9525 | 732 | 256 | CP10-LbCas12a | 243 |
| pWISE9529 | 733 | 258 | CP12-LbCas12a | 245 |

TABLE 29
Targets

| Target Nucleic | Target SEQ ID | | Spacer SEQ ID |
|---|---|---|---|
| Acid | NO: | Spacer | NO: |
| Soy AHK4 | 840 | PWsp1243 | 807 |
| Locus906 | | | |
| Soy AHK4 | 841 | PWsp2567 | 808 |
| Locus215 | | | |

[0286] The circular permutants and control were tested for their ability to generate INDELS at two sites in the AHK4 gene (SEQ ID NOs: 840-841) in soy plants using two spacers (SEQ ID NOs: 807-808). 30-40 soy plants were recovered for each combination of locus and circular permutant. Each control or circular permutant was scored based on indel placement percentage in the AHK4 gene using the guide RNAs. The results are provided in FIG. 13. As seen in FIG. 13, several of the circular permutants that were optimized for rapid soy achieved high INDEL percentages and some had activity comparable to or better than LbCas 12a in rapid soy.

### Example 7

[0287] Additional circular permutants of LbCas12a other than those described in Example 1 were tested. The circular permutants and control (LbCas12a; SEQ ID NO:56) are listed in Table 30.

TABLE 30
Tested constructs.

| | Vector SEQ | DNA SEQ | Protein SEQ |
|---|---|---|---|
| pWISE | ID NO: | ID NO: | ID NO: |
| pWISE121 | 259 | 246 | 56 |
| pWISE8346 | 261 | 248 | 235 |
| pWISE10270 | 585 | 561 | 537 |
| pWISE10271 | 586 | 562 | 538 |
| pWISE10272 | 587 | 563 | 539 |
| pWISE10273 | 588 | 564 | 540 |
| pWISE8348 | 263 | 250 | 237 |
| pWISE10274 | 589 | 565 | 541 |
| pWISE10275 | 590 | 566 | 542 |
| pWISE10276 | 591 | 567 | 543 |
| pWISE10277 | 592 | 568 | 544 |
| pWISE8350 | 265 | 252 | 239 |
| pWISE10278 | 593 | 569 | 545 |
| pWISE10279 | 594 | 570 | 546 |
| pWISE10280 | 595 | 571 | 547 |
| pWISE10281 | 596 | 572 | 548 |
| pWISE8351 | 266 | 253 | 240 |
| pWISE10282 | 597 | 573 | 549 |
| pWISE10283 | 598 | 574 | 550 |
| pWISE10284 | 599 | 575 | 551 |
| pWISE10285 | 600 | 576 | 552 |
| pWISE8354 | 269 | 256 | 243 |
| pWISE10286 | 601 | 577 | 553 |
| pWISE10287 | 602 | 578 | 554 |
| pWISE10288 | 603 | 579 | 555 |
| pWISE10289 | 604 | 580 | 556 |
| pWISE8356 | 271 | 258 | 245 |
| pWISE10290 | 605 | 581 | 557 |
| pWISE10291 | 606 | 582 | 558 |
| pWISE10292 | 607 | 583 | 559 |
| pWISE10293 | 608 | 584 | 560 |

[0288] The circular permutants and control were tested for their ability to generate INDELS in the DNMT1, FANCF, and RNF2 genes (SEQ ID NOs: 272-274) in HEK293T cells using the spacers according to SEQ ID NOs: 275-277. Two technical replicates were tested. HEK293T cells were seeded into 48-well collagen-coated plates (Corning) in the absence of an antibiotic using DMEM media. At 70-80% confluency, cells were transfected with 1.5 μL of LTX (ThermoFisher Scientific) using 500 ng of the control or circular permutant plasmid and 500 ng of guide RNA plasmid according to manufacturer's protocol. After 3 days, the cells were lysed with a crude extraction method using TritonX buffer. Each control or circular permutant was scored based on the precise base pair editing and indel placement percentage in the DNMT1, FANCF, and RNF2 genes using the guide RNAs. Results are provided in FIGS. 14-19 and demonstrate that each of the circular permutants had measurable INDEL activity.

### Example 8

[0289] Arginine substitution variants of the soy optimized circular permutants described in Example 6 were tested in soy. The arginine mutations were analogous to a D156R mutation in LbCas12a. These circular permutants and the control are listed in Table 31. The arginine mutations are numbered according to the protein sequence listed in the fourth column of Table 31.

TABLE 31
Tested constructs.

| | Vector | DNA | Description of | Protein |
|---|---|---|---|---|
| | SEQ | SEQ | soy optimized | SEQ |
| pWISE | ID NO: | ID NO: | construct | ID NO: |
| pWISE9528 | 755 | 748 | LbCas12a + | 741 |
| | | | D156R (control) | |
| pWISE9516 | 749 | 742 | CP02 + D71R | 735 |
| pWISE9518 | 750 | 743 | CP04 + D1107R | 736 |
| pWISE9520 | 751 | 744 | CP06 + D243R | 737 |
| pWISE9522 | 752 | 745 | CP08 + D882R | 738 |
| pWISE9524 | 753 | 746 | CP10 + D957R | 739 |
| pWISE9526 | 754 | 747 | CP12 + D282R | 740 |

[0290] The circular permutants and control were tested for their ability to generate INDELS at two sites in the AHK4 gene (SEQ ID NOs: 840-841) in rapid soy plants using one spacer (SEQ ID NO: 807). 30-40 soy plants were transformed for each combination of locus and variant soy optimized circular permutant. Each control or circular permutant was scored based on indel placement percentage in the AHK4 gene using the guide RNAs. The results are provided in FIGS. 20 and 21 with FIG. 21 providing a comparison to the constructs described in Example 6. As seen in FIGS. 20 and 21, several of the circular permutants achieved high INDEL percentages and some had activity comparable to or better than LbCas12a and LbCas12a+D156R in rapid soy. For the majority of the circular permutants, the mutation had a similar effect to that seen for LbCas12a D156R relative to wild-type LbCas12a.

### Example 9

[0291] Circular permutants of a soy optimized engineered nuclease were tested in soy. These circular permutants (SEQ ID NOs: 390 and 757-760) and controls (SEQ ID NOs: 56 and 761) are listed in Table 32.

TABLE 32
Tested constructs.

| | Vector SEQ | DNA SEQ | Protein SEQ |
|---|---|---|---|
| pWISE | ID NO: | ID NO: | ID NO: |
| pWISE3380 | 734 | 246 | 56 |
| pWISE6345 | 773 | 767 | 761 |
| pWISE10428 | 768 | 402 | 390 |
| pWISE10429 | 769 | 763 | 757 |
| pWISE10430 | 770 | 764 | 758 |
| pWISE10431 | 771 | 765 | 759 |
| pWISE10432 | 772 | 766 | 760 |

[0292] The circular permutants and controls were tested for their ability to generate INDELS at two sites in the AHK4 gene (SEQ ID NOs: 840-841) in rapid soy plants using one spacer (SEQ ID NO:807). 30-40 soy plants were transformed for each combination of locus and variant soy optimized circular permutant. Each control or circular permutant was scored based on indel placement percentage in the AHK4 gene using the guide RNAs. The results are provided in FIG. 22. Several of the circular permutants achieved high average INDEL percentages similar to LbCas12a (SEQ ID NO:56) and outperformed the soy optimized engineered nuclease (SEQ ID NO:761).

### Example 10

[0293] Circular permutants of an enzymatically inactive LbCas12a (dLbCas12a (SEQ ID NO: 59)) were tested for cytosine base editing by fusing a UGI to the C-terminus of the circular permutant and a cytosine deaminase to the N-terminus of the circular permutant with a linker between the circular permutant and cytosine deaminase to provide a fusion protein. The tested linkers between the circular permutant and cytosine deaminase included a GS-XTEN-GS linker (SEQ ID NO:30); an XTEN linker (SEQ ID NO:29); a six amino acid glycine serine (6X-GS) linker of (SGS)ₙ wherein n is 2 (SEQ ID NO:869); an eight amino acid glycine-serine (8X-GS) linker of (SGGS)ₙ wherein n is 2 (SEQ ID NO:870); and a twelve amino acid glycine-serine (12X-GS) linker of (SGGS)ₙ wherein n is 3 (SEQ ID NO:870). The fusion proteins (SEQ ID NOs: 456 and 624-628)—and control (SEQ ID NO:56) re listed in Table 33 and the targets are provided in Table 34.

TABLE 33
Tested constructs.

| | Vector SEQ | DNA SEQ | Protein SEQ |
|---|---|---|---|
| pWISE | ID NO: | ID NO: | ID NO: |
| pWISE121 | 259 | 246 | 56 |
| pWISE9123 | 480 | 468 | 456 |
| pWISE10643 | 686 | 655 | 624 |
| pWISE10644 | 687 | 656 | 625 |
| pWISE10645 | 688 | 657 | 626 |
| pWISE10646 | 689 | 658 | 627 |
| pWISE10647 | 690 | 659 | 628 |

TABLE 34
Targets

| Target | Target | | Spacer | | Vector |
|---|---|---|---|---|---|
| Nucleic | SEQ | | SEQ | | SEQ |
| Acid | ID NO: | Spacer | ID NO: | pWISE | ID NO: |
| human FANCF | 273 | PWsp132 | 799 | pWISE878 | 809 |
| human FANCF | 273 | PWsp449 | 276 | pWISE878 | 279 |
| human AAVS1 | 863 | PWsp390 | 802 | pWISE5986 | 812 |
| human RUNX1 | 864 | PWsp135 | 800 | pWISE5989 | 810 |

[0294] The fusion proteins and control were tested for their ability to perform base editing at five different sites in three target nucleic acids (SEQ ID NOs: 273, 863, and 864) in HEK293T cells using four spacers (SEQ ID NOs: 276, 799, 800, and 802). A single biological replicate and two technical replicates were tested. HEK293T cells were seeded into 48-well collagen-coated plates (Corning) in the absence of an antibiotic using DMEM media. At 70-80% confluency, cells were transfected with 1.5 μL of LTX (ThermoFisher Scientific) using 500 ng of the control or fusion protein plasmid and 500 ng of guide RNA plasmid according to manufacturer's protocol. After 3 days, the cells were lysed with a crude extraction method using TritonX buffer. Each control or fusion protein was scored based on the precise base pair editing in the FANCF, RUNX1, and AAVS1 genes using the guide RNAs (SEQ ID NOs: 276 and 799-802). Low, background levels of INDEL formation were seen for the fusion proteins, which was expected from using a dead LbCas12a. The results are provided in Tables 35-54. The values in Tables 35-54 that are below 0.1% are considered to be in the noise of the instrument (below the limit of detection) and are not indicative of editing. Values that are between 0.1% and 0.5% indicate that editing is present in the experiment at the specified location, but the assay is not sensitive enough to accurately quantify the amount of base editing. As seen in Tables 35-54, the fusion proteins provided efficient C to T editing over a wide editing window and changing the length and/or type of the linker between the cytosine deaminase and the circular permutant did not significantly modify the editing window or efficiency at positions shown to be highly edited with the control. In addition, the fusion proteins containing shorter linkers were found to have improved C to T editing towards the 3′ end of the spacer (e.g., at about the last 5-7 nucleotides of the spacer sequence).

TABLE 35

| | | Average C to T editing percent at the nucleotides numbered | | | | | | |
|---|---|---|---|---|---|---|---|---|
| | | according to the position in the PWsp132 spacer sequence on the | | | | | | |
| | Protein | non-target, genomic DNA strand | | | | | | |
| pWISE | SEQ ID NO: | C.-7 | C.-6 | C.-4 | C.-1 | C.2 | C.3 | C.11 |
| pWISE121 | 56 | 0.039% | 0.052% | 0.028% | 0.043% | 0.097% | 0.093% | 0.277% |
| pWISE9123 | 456 | 0.163% | 0.095% | 0.022% | 0.623% | 0.011% | 0.067% | 18.926% |
| pWISE10643 | 624 | 0.266% | 0.148% | 0.019% | 0.843% | 0.062% | 0.085% | 29.592% |
| pWISE10644 | 625 | 0.253% | 0.101% | 0.019% | 0.627% | 0.032% | 0.095% | 27.603% |
| pWISE10645 | 626 | 0.131% | 0.080% | 0.004% | 0.611% | 0.044% | 0.032% | 19.961% |
| pWISE10646 | 627 | 0.195% | 0.083% | 0.042% | 0.727% | 0.074% | 0.162% | 28.278% |
| pWISE10647 | 628 | 0.095% | 0.075% | 0.024% | 0.517% | 0.071% | 0.077% | 19.680% |

| | | Average C to T editing percent at the nucleotides numbered | | | | | |
|---|---|---|---|---|---|---|---|
| | | according to the position in the PWsp132 spacer sequence on the | | | | | |
| | Protein | non-target, genomic DNA strand | | | | | |
| pWISE | SEQ ID NO: | C.14 | C.17 | C.19 | C.21 | C.24 | C.28 |
| pWISE121 | 56 | 1.076% | 0.870% | 0.687% | 0.477% | 0.153% | 0.176% |
| pWISE9123 | 456 | 17.483% | 2.140% | 14.776% | 10.536% | 0.067% | 0.067% |
| pWISE10643 | 624 | 28.137% | 3.954% | 23.827% | 16.232% | 0.039% | 0.000% |
| pWISE10644 | 625 | 26.456% | 4.167% | 23.170% | 16.952% | 0.025% | 0.019% |
| pWISE10645 | 626 | 19.542% | 3.876% | 18.300% | 13.597% | 0.135% | 0.021% |
| pWISE10646 | 627 | 28.197% | 5.506% | 26.825% | 20.603% | 0.193% | 0.135% |
| pWISE10647 | 628 | 19.619% | 4.468% | 19.085% | 15.061% | 0.306% | 0.224% |

TABLE 36

| | | Standard Deviation of the average editing percent at the | | | | | | |
|---|---|---|---|---|---|---|---|---|
| | | nucleotides numbered according to the position in the PWsp132 | | | | | | |
| | Protein | spacer sequence on the non-target, genomic DNA strand | | | | | | |
| pWISE | SEQ ID NO: | C.-7 | C.-6 | C.-4 | C.-1 | C.2 | C.3 | C.11 |
| pWISE121 | 56 | 0.050% | 0.025% | 0.009% | 0.006% | 0.082% | 0.003% | 0.090% |
| pWISE9123 | 456 | No data | No data | No data | No data | No data | No data | No data |
| pWISE10643 | 624 | 0.007% | 0.104% | 0.016% | 0.096% | 0.034% | 0.046% | 0.346% |
| pWISE10644 | 625 | No data | No data | No data | No data | No data | No data | No data |
| pWISE10645 | 626 | 0.052% | 0.041% | 0.006% | 0.096% | 0.027% | 0.009% | 2.321% |
| pWISE10646 | 627 | 0.088% | 0.019% | 0.009% | 0.062% | 0.065% | 0.101% | 4.114% |
| pWISE10647 | 628 | 0.044% | 0.073% | 0.023% | 0.231% | 0.005% | 0.038% | 12.047% |

| | | Standard Deviation of the average editing percent at the | | | | | |
|---|---|---|---|---|---|---|---|
| | | nucleotides numbered according to the position in the PWsp132 | | | | | |
| | Protein | spacer sequence on the non-target, genomic DNA strand | | | | | |
| pWISE | SEQ ID NO: | C.14 | C.17 | C.19 | C.21 | C.24 | C.28 |
| pWISE121 | 56 | 0.130% | 0.481% | 0.258% | 0.094% | 0.003% | 0.121% |
| pWISE9123 | 456 | No data | No data | No data | No data | No data | No data |
| pWISE10643 | 624 | 0.455% | 0.450% | 0.190% | 0.857% | 0.023% | 0.000% |
| pWISE10644 | 625 | No data | No data | No data | No data | No data | No data |
| pWISE10645 | 626 | 2.262% | 0.363% | 2.534% | 1.382% | 0.131% | 0.012% |
| pWISE10646 | 627 | 3.968% | 0.479% | 3.774% | 2.106% | 0.102% | 0.145% |
| pWISE10647 | 628 | 12.044% | 2.759% | 11.764% | 9.300% | 0.270% | 0.219% |

TABLE 37

| | | Average G to A editing percent at the nucleotides numbered | | | | |
|---|---|---|---|---|---|---|
| | | according to the position in the PWsp132 spacer sequence on the | | | | |
| | Protein | opposite, target genomic DNA strand | | | | |
| pWISE | SEQ ID NO: | G.-5 | G.6 | G.7 | G.9 | G.12 |
| pWISE121 | 56 | 0.053% | 0.094% | 0.091% | 0.210% | 0.189% |
| pWISE9123 | 456 | 0.011% | 0.000% | 0.011% | 0.275% | 0.326% |
| pWISE10643 | 624 | 0.019% | 0.007% | 0.062% | 0.161% | 0.092% |
| pWISE10644 | 625 | 0.019% | 0.025% | 0.038% | 0.184% | 0.101% |
| pWISE10645 | 626 | 0.013% | 0.021% | 0.039% | 0.147% | 0.122% |
| pWISE10646 | 627 | 0.008% | 0.027% | 0.058% | 0.257% | 0.134% |
| pWISE10647 | 628 | 0.009% | 0.029% | 0.058% | 0.307% | 0.475% |
| | | Average G to A editing percent at the nucleotides numbered | | | | |
| | | according to the position in the PWsp132 spacer sequence on the | | | | |
| | Protein | opposite, target genomic DNA strand | | | | |
| pWISE | SEQ ID NO: | G.13 | G.15 | G.23 | G.25 | G.30 |
| pWISE121 | 56 | 0.282% | 0.462% | 0.899% | 0.299% | 0.113% |
| pWISE9123 | 456 | 0.337% | 0.854% | 1.179% | 1.196% | 4.150% |
| pWISE10643 | 624 | 0.043% | 0.704% | 1.113% | 2.039% | 7.594% |
| pWISE10644 | 625 | 0.044% | 0.709% | 1.089% | 2.242% | 7.181% |
| pWISE10645 | 626 | 0.096% | 0.727% | 1.246% | 2.223% | 4.849% |
| pWISE10646 | 627 | 0.110% | 1.106% | 1.910% | 3.507% | 7.690% |
| pWISE10647 | 628 | 0.464% | 1.130% | 1.526% | 2.811% | 5.804% |

TABLE 38

| | | Standard deviation of the average G to A editing percent at the | | | | |
|---|---|---|---|---|---|---|
| | | nucleotides numbered according to the position in the PWsp132 | | | | |
| | Protein | spacer sequence on the opposite, target genomic DNA strand | | | | |
| pWISE | SEQ ID NO: | G.-5 | G.6 | G.7 | G.9 | G.12 |
| pWISE121 | 56 | 0.075% | 0.078% | 0.074% | 0.102% | 0.026% |
| pWISE9123 | 456 | No data | No data | No data | No data | No data |
| pWISE10643 | 624 | 0.016% | 0.001% | 0.034% | 0.069% | 0.078% |
| pWISE10644 | 625 | No data | No data | No data | No data | No data |
| pWISE10645 | 626 | 0.018% | 0.012% | 0.008% | 0.006% | 0.065% |
| pWISE10646 | 627 | 0.001% | 0.008% | 0.036% | 0.001% | 0.008% |
| pWISE10647 | 628 | 0.012% | 0.017% | 0.001% | 0.173% | 0.305% |
| | | Standard deviation of the average G to A editing percent at the | | | | |
| | | nucleotides numbered according to the position in the PWsp132 | | | | |
| | Protein | spacer sequence on the opposite, target genomic DNA strand | | | | |
| pWISE | SEQ ID NO: | G.13 | G.15 | G.23 | G.25 | G.30 |
| pWISE121 | 56 | 0.052% | 0.055% | 0.291% | 0.014% | 0.077% |
| pWISE9123 | 456 | No data | No data | No data | No data | No data |
| pWISE10643 | 624 | 0.018% | 0.266% | 0.105% | 0.475% | 0.545% |
| pWISE10644 | 625 | No data | No data | No data | No data | No data |
| pWISE10645 | 626 | 0.001% | 0.133% | 0.249% | 0.611% | 1.151% |
| pWISE10646 | 627 | 0.031% | 0.025% | 0.216% | 0.364% | 0.954% |
| pWISE10647 | 628 | 0.273% | 0.187% | 0.647% | 1.725% | 3.185% |

TABLE 39

| | | Average C to T editing percent at the nucleotides numbered | | | | | |
|---|---|---|---|---|---|---|---|
| | | according to the position in the PWsp449 spacer sequence on the | | | | | |
| | Protein | non-target, genomic DNA strand | | | | | |
| pWISE | SEQ ID NO: | C.-5 | C.-1 | C.2 | C.10 | C.11 | C.15 |
| pWISE121 | 56 | 0.095% | 0.158% | 0.123% | 0.401% | 0.431% | 2.083% |
| pWISE9123 | 456 | 1.400% | 1.976% | 0.215% | 32.361% | 31.901% | 31.984% |
| pWISE10643 | 624 | 1.672% | 2.237% | 0.297% | 38.859% | 38.221% | 38.715% |
| pWISE10644 | 625 | 1.296% | 1.994% | 0.326% | 35.125% | 34.600% | 34.817% |
| pWISE10645 | 626 | 1.343% | 2.371% | 0.369% | 38.229% | 37.569% | 38.221% |
| pWISE10646 | 627 | 1.075% | 2.088% | 0.349% | 35.195% | 34.944% | 35.296% |
| pWISE10647 | 628 | 1.198% | 2.470% | 0.348% | 41.096% | 40.766% | 41.317% |

| | | Average C to T editing percent at the nucleotides numbered | | | | |
|---|---|---|---|---|---|---|
| | | according to the position in the PWsp449 spacer sequence on the | | | | |
| | Protein | non-target, genomic DNA strand | | | | |
| pWISE | SEQ ID NO: | C.20 | C.22 | C.30 | C.32 | C.33 |
| pWISE121 | 56 | 0.505% | 1.066% | 1.515% | 1.047% | 1.095% |
| pWISE9123 | 456 | 4.524% | 1.672% | 0.216% | 0.064% | 0.047% |
| pWISE10643 | 624 | 6.493% | 2.701% | 0.361% | 0.048% | 0.050% |
| pWISE10644 | 625 | 5.222% | 1.890% | 0.306% | 0.057% | 0.080% |
| pWISE10645 | 626 | 7.171% | 3.732% | 0.543% | 0.068% | 0.098% |
| pWISE10646 | 627 | 6.277% | 3.662% | 0.500% | 0.056% | 0.091% |
| pWISE10647 | 628 | 7.456% | 4.823% | 0.794% | 0.162% | 0.207% |

TABLE 40

| | | Standard Deviation of the average editing percent at the | | | | | |
|---|---|---|---|---|---|---|---|
| | | nucleotides numbered according to the position in the PWsp449 | | | | | |
| | Protein | spacer sequence on the non-target, genomic DNA strand | | | | | |
| pWISE | SEQ ID NO: | C.-5 | C.-1 | C.2 | C.10 | C.11 | C.15 |
| pWISE121 | 56 | 0.067% | 0.050% | 0.037% | 0.011% | 0.017% | 0.001% |
| pWISE9123 | 456 | 0.029% | 0.157% | 0.013% | 1.234% | 1.451% | 1.429% |
| pWISE10643 | 624 | 0.156% | 0.078% | 0.033% | 2.566% | 2.362% | 2.577% |
| pWISE10644 | 625 | 0.049% | 0.195% | 0.012% | 1.883% | 1.646% | 1.715% |
| pWISE10645 | 626 | 0.069% | 0.248% | 0.058% | 0.739% | 0.543% | 0.412% |
| pWISE10646 | 627 | 0.177% | 0.166% | 0.033% | 2.131% | 2.060% | 2.098% |
| pWISE10647 | 628 | 0.180% | 0.218% | 0.105% | 1.145% | 1.220% | 1.075% |

| | | Standard Deviation of the average editing percent at the | | | | |
|---|---|---|---|---|---|---|
| | | nucleotides numbered according to the position in the PWsp449 | | | | |
| | Protein | spacer sequence on the non-target, genomic DNA strand | | | | |
| pWISE | SEQ ID NO: | C.20 | C.22 | C.30 | C.32 | C.33 |
| pWISE121 | 56 | 0.035% | 0.223% | 0.938% | 0.690% | 0.714% |
| pWISE9123 | 456 | 0.318% | 0.139% | 0.010% | 0.002% | 0.042% |
| pWISE10643 | 624 | 0.431% | 0.270% | 0.225% | 0.052% | 0.048% |
| pWISE10644 | 625 | 0.231% | 0.136% | 0.131% | 0.014% | 0.013% |
| pWISE10645 | 626 | 0.081% | 0.220% | 0.266% | 0.028% | 0.000% |
| pWISE10646 | 627 | 0.309% | 0.016% | 0.048% | 0.010% | 0.022% |
| pWISE10647 | 628 | 0.012% | 0.339% | 0.033% | 0.014% | 0.022% |

TABLE 41

| | | Average G to A editing percent at the nucleotides numbered | | | | | |
|---|---|---|---|---|---|---|---|
| | | according to the position in the PWsp449 spacer sequence on the | | | | | |
| | Protein | opposite, target genomic DNA strand | | | | | |
| pWISE | SEQ ID NO: | G.-9 | G.1 | G.3 | G.4 | G.7 | G.17 |
| pWISE121 | 56 | 0.048% | 0.105% | 0.144% | 0.133% | 0.178% | 0.670% |
| pWISE9123 | 456 | 0.068% | 0.021% | 0.036% | 0.064% | 0.019% | 0.682% |
| pWISE10643 | 624 | 0.016% | 0.016% | 0.022% | 0.034% | 0.005% | 1.130% |
| pWISE10644 | 625 | 0.026% | 0.034% | 0.033% | 0.049% | 0.010% | 0.921% |
| pWISE10645 | 626 | 0.010% | 0.008% | 0.020% | 0.031% | 0.015% | 1.235% |
| pWISE10646 | 627 | 0.035% | 0.035% | 0.047% | 0.042% | 0.026% | 1.278% |
| pWISE10647 | 628 | 0.011% | 0.032% | 0.046% | 0.066% | 0.038% | 1.642% |

| | | Average G to A editing percent at the nucleotides numbered | | | | |
|---|---|---|---|---|---|---|
| | | according to the position in the PWsp449 spacer sequence on the | | | | |
| | Protein | opposite, target genomic DNA strand | | | | |
| pWISE | SEQ ID NO: | G.21 | G.24 | G.26 | G.28 | G.31 |
| pWISE121 | 56 | 0.425% | 0.732% | 0.656% | 0.146% | 0.194% |
| pWISE9123 | 456 | 1.387% | 7.126% | 6.427% | 0.711% | 1.559% |
| pWISE10643 | 624 | 2.098% | 10.400% | 9.246% | 1.087% | 2.132% |
| pWISE10644 | 625 | 2.210% | 9.591% | 8.436% | 1.185% | 2.234% |
| pWISE10645 | 626 | 2.959% | 13.013% | 11.749% | 2.111% | 3.075% |
| pWISE10646 | 627 | 2.993% | 11.783% | 10.963% | 1.986% | 2.821% |
| pWISE10647 | 628 | 4.148% | 15.842% | 14.591% | 3.042% | 4.037% |

TABLE 42

| | | Standard deviation of the average G to A editing percent at the | | | | | |
|---|---|---|---|---|---|---|---|
| | | nucleotides numbered according to the position in the PWsp449 | | | | | |
| | Protein | spacer sequence on the opposite, target genomic DNA strand | | | | | |
| pWISE | SEQ ID NO: | G.-9 | G.1 | G.3 | G.4 | G.7 | G.17 |
| pWISE121 | 56 | 0.024% | 0.042% | 0.018% | 0.021% | 0.018% | 0.152% |
| pWISE9123 | 456 | 0.043% | 0.017% | 0.027% | 0.028% | 0.020% | 0.137% |
| pWISE10643 | 624 | 0.007% | 0.015% | 0.008% | 0.033% | 0.008% | 0.088% |
| pWISE10644 | 625 | 0.037% | 0.026% | 0.017% | 0.004% | 0.008% | 0.045% |
| pWISE10645 | 626 | 0.015% | 0.002% | 0.021% | 0.016% | 0.021% | 0.251% |
| pWISE10646 | 627 | 0.034% | 0.019% | 0.018% | 0.029% | 0.016% | 0.020% |
| pWISE10647 | 628 | 0.003% | 0.039% | 0.046% | 0.018% | 0.011% | 0.093% |

| | | Standard deviation of the average G to A editing percent at the | | | | |
|---|---|---|---|---|---|---|
| | | nucleotides numbered according to the position in the PWsp449 | | | | |
| | Protein | spacer sequence on the opposite, target genomic DNA strand | | | | |
| pWISE | SEQ ID NO: | G.21 | G.24 | G.26 | G.28 | G.31 |
| pWISE121 | 56 | 0.144% | 0.201% | 0.297% | 0.083% | 0.045% |
| pWISE9123 | 456 | 0.061% | 0.422% | 0.566% | 0.083% | 0.033% |
| pWISE10643 | 624 | 0.134% | 0.774% | 0.628% | 0.087% | 0.435% |
| pWISE10644 | 625 | 0.028% | 0.419% | 0.469% | 0.081% | 0.123% |
| pWISE10645 | 626 | 0.564% | 0.378% | 0.411% | 0.232% | 0.158% |
| pWISE10646 | 627 | 0.055% | 0.029% | 0.044% | 0.170% | 0.080% |
| pWISE10647 | 628 | 0.130% | 0.097% | 0.086% | 0.202% | 0.008% |

TABLE 43

| | | Average C to T editing percent at the nucleotides numbered | | | | | | |
|---|---|---|---|---|---|---|---|---|
| | | according to the position in the PWsp135 spacer sequence on the | | | | | | |
| | Protein | non-target, genomic DNA strand | | | | | | |
| pWISE | SEQ ID NO: | C.-8 | C.-6 | C.-1 | C.3 | C.4 | C.6 | C.8 |
| pWISE121 | 56 | 0.012% | 0.011% | 0.054% | 0.017% | 0.030% | 0.342% | 0.327% |
| pWISE9123 | 456 | 0.234% | 0.009% | 1.556% | 0.027% | 0.064% | 16.533% | 15.417% |
| pWISE10643 | 624 | 0.244% | 0.002% | 1.736% | 0.017% | 0.041% | 21.563% | 20.357% |
| pWISE10644 | 625 | 0.287% | 0.008% | 2.409% | 0.039% | 0.047% | 27.834% | 26.754% |
| pWISE10645 | 626 | 0.211% | 0.026% | 2.402% | 0.059% | 0.088% | 29.354% | 28.047% |
| pWISE10646 | 627 | 0.304% | 0.014% | 2.513% | 0.122% | 0.127% | 30.168% | 29.065% |
| pWISE10647 | 628 | 0.254% | 0.005% | 2.280% | 0.082% | 0.073% | 30.279% | 29.132% |

| | | Average C to T editing percent at the nucleotides numbered | | | | | |
|---|---|---|---|---|---|---|---|
| | | according to the position in the PWsp135 spacer sequence on the | | | | | |
| | Protein | non-target, genomic DNA strand | | | | | |
| pWISE | SEQ ID NO: | C.9 | C.10 | C.11 | C.13 | C.17 | C.18 |
| pWISE121 | 56 | 0.368% | 0.359% | 0.352% | 0.382% | 0.512% | 0.540% |
| pWISE9123 | 456 | 16.268% | 16.358% | 16.514% | 16.635% | 5.964% | 6.610% |
| pWISE10643 | 624 | 21.206% | 21.283% | 21.423% | 21.650% | 8.925% | 10.127% |
| pWISE10644 | 625 | 27.616% | 27.715% | 27.786% | 27.959% | 13.392% | 14.599% |
| pWISE10645 | 626 | 29.037% | 29.233% | 29.436% | 29.733% | 19.309% | 20.354% |
| pWISE10646 | 627 | 30.163% | 30.294% | 30.483% | 30.583% | 21.660% | 22.612% |
| pWISE10647 | 628 | 30.141% | 30.210% | 30.396% | 30.585% | 22.017% | 22.833% |

| | | Average C to T editing percent at the nucleotides numbered | | | | | |
|---|---|---|---|---|---|---|---|
| | | according to the position in the PWsp135 spacer sequence on the | | | | | |
| | Protein | non-target, genomic DNA strand | | | | | |
| pWISE | SEQ ID NO: | C.19 | C.22 | C.25 | C.27 | C.29 | C.33 |
| pWISE121 | 56 | 0.501% | 0.378% | 0.115% | 0.085% | 0.123% | 0.057% |
| pWISE9123 | 456 | 9.843% | 0.173% | 0.198% | 0.225% | 0.201% | 0.226% |
| pWISE10643 | 624 | 14.063% | 0.349% | 0.253% | 0.324% | 0.352% | 0.265% |
| pWISE10644 | 625 | 19.052% | 0.465% | 0.398% | 0.439% | 0.403% | 0.339% |
| pWISE10645 | 626 | 23.992% | 1.459% | 1.081% | 1.189% | 1.207% | 0.972% |
| pWISE10646 | 627 | 25.918% | 1.725% | 1.205% | 1.383% | 1.321% | 1.103% |
| pWISE10647 | 628 | 26.311% | 1.921% | 1.331% | 1.408% | 1.379% | 1.111% |

TABLE 44

| | | Standard Deviation of the average editing percent at the nucleotides | | | | | | |
|---|---|---|---|---|---|---|---|---|
| | | numbered according to the position in the PWsp135 spacer sequence on | | | | | | |
| | Protein SEQ | the non-target, genomic DNA strand | | | | | | |
| pWISE | ID NO: | C.-8 | C.-6 | C.-1 | C.3 | C.4 | C.6 | C.8 |
| pWISE121 | 56 | 0.002% | 0.015% | 0.064% | 0.011% | 0.014% | 0.411% | 0.437% |
| pWISE9123 | 456 | 0.098% | 0.009% | 1.050% | 0.024% | 0.069% | 12.400% | 11.665% |
| pWISE10643 | 624 | 0.037% | 0.002% | 0.347% | 0.005% | 0.010% | 5.778% | 5.450% |
| pWISE10644 | 625 | 0.051% | 0.001% | 0.050% | 0.010% | 0.007% | 2.156% | 2.039% |
| pWISE10645 | 626 | No data | No data | No data | No data | No data | No data | No data |
| pWISE10646 | 627 | 0.057% | 0.014% | 0.043% | 0.032% | 0.025% | 0.711% | 0.374% |
| pWISE10647 | 628 | 0.048% | 0.008% | 0.275% | 0.046% | 0.015% | 0.860% | 1.143% |

| | |
|---|---|
| | Standard Deviation of the average editing percent at the nucleotides |
| | numbered according to the position in the PWsp135 spacer |
| Protein SEQ | sequence on the non-target, genomic DNA strand |

| pWISE | ID NO: | C.9 | C.10 | C.11 | C.13 | C.17 | C.18 |
|---|---|---|---|---|---|---|---|
| pWISE121 | 56 | 0.454% | 0.441% | 0.409% | 0.435% | 0.456% | 0.378% |
| pWISE9123 | 456 | 12.240% | 12.293% | 12.418% | 12.446% | 4.241% | 4.813% |
| pWISE10643 | 624 | 5.658% | 5.695% | 5.663% | 5.699% | 2.346% | 2.455% |
| pWISE10644 | 625 | 2.220% | 2.196% | 2.172% | 2.152% | 1.202% | 1.207% |
| pWISE10645 | 626 | No data | No data | No data | No data | No data | No data |
| pWISE10646 | 627 | 0.790% | 0.722% | 0.755% | 0.909% | 0.658% | 0.810% |
| pWISE10647 | 628 | 1.016% | 0.928% | 0.918% | 0.829% | 0.644% | 0.549% |

| | |
|---|---|
| | Standard Deviation of the average editing percent at the nucleotides |
| | numbered according to the position in the PWsp135 spacer |
| Protein SEQ | sequence on the non-target, genomic DNA strand |

| pWISE | ID NO: | C.19 | C.22 | C.25 | C.27 | C.29 | C.33 |
|---|---|---|---|---|---|---|---|
| pWISE121 | 56 | 0.467% | 0.079% | 0.073% | 0.021% | 0.076% | 0.056% |
| pWISE9123 | 456 | 7.183% | 0.087% | 0.136% | 0.110% | 0.162% | 0.122% |
| pWISE10643 | 624 | 3.867% | 0.123% | 0.126% | 0.173% | 0.153% | 0.099% |
| pWISE10644 | 625 | 1.510% | 0.085% | 0.064% | 0.029% | 0.037% | 0.023% |
| pWISE10645 | 626 | No data | No data | No data | No data | No data | No data |
| pWISE10646 | 627 | 0.704% | 0.106% | 0.183% | 0.007% | 0.006% | 0.095% |
| pWISE10647 | 628 | 1.205% | 0.083% | 0.184% | 0.067% | 0.047% | 0.180% |

TABLE 45

| | | Average G to A editing percent at the nucleotides | | |
|---|---|---|---|---|
| | | numbered according to the position in the PWsp135 spacer | | |
| | Protein SEQ | sequence on the opposite, target genomic DNA strand | | |
| pWISE | ID NO: | G.-4 | G.2 | G.16 |
| pWISE121 | 56 | 0.003% | 0.028% | 0.546% |
| pWISE9123 | 456 | 0.001% | 0.006% | 0.109% |
| pWISE10643 | 624 | 0.009% | 0.004% | 0.199% |
| pWISE10644 | 625 | 0.006% | 0.014% | 0.172% |
| pWISE10645 | 626 | 0.006% | 0.000% | 0.517% |
| pWISE10646 | 627 | 0.002% | 0.007% | 0.510% |
| pWISE10647 | 628 | 0.003% | 0.008% | 0.657% |

TABLE 46

| | | Standard deviation of the average G to A editing percent at the | | |
|---|---|---|---|---|
| | | nucleotides numbered according to the position in the PWsp135 | | |
| | Protein SEQ | spacer sequence on the opposite, target genomic DNA strand | | |
| pWISE | ID NO: | G.-4 | G.2 | G.16 |
| pWISE121 | 56 | 0.005% | 0.002% | 0.290% |
| pWISE9123 | 456 | 0.002% | 0.001% | 0.085% |
| pWISE10643 | 624 | 0.002% | 0.006% | 0.003% |
| pWISE10644 | 625 | 0.001% | 0.004% | 0.051% |
| pWISE10645 | 626 | No data | No data | No data |
| pWISE10646 | 627 | 0.002% | 0.010% | 0.060% |
| pWISE10647 | 628 | 0.004% | 0.007% | 0.111% |

TABLE 47

| | | Average C to T editing percent at the nucleotides numbered | | | | |
|---|---|---|---|---|---|---|
| | | according to the position in the PWsp389 spacer sequence on | | | | |
| | Protein SEQ | the non-target, genomic DNA strand | | | | |
| pWISE | ID NO: | C.-5 | C.-1 | C.4 | C.6 | C.7 |
| pWISE121 | 56 | 0.000% | 0.070% | 0.068% | 0.094% | 0.270% |
| pWISE9123 | 456 | 0.006% | 0.834% | 0.897% | 6.149% | 21.236% |
| pWISE10643 | 624 | 0.027% | 0.713% | 0.970% | 7.783% | 25.729% |
| pWISE10644 | 625 | 0.010% | 0.738% | 1.080% | 8.182% | 25.666% |
| pWISE10645 | 626 | 0.040% | 1.246% | 1.452% | 7.392% | 30.506% |
| pWISE10646 | 627 | 0.022% | 0.914% | 1.349% | 5.465% | 31.416% |
| pWISE10647 | 628 | 0.008% | 1.057% | 1.285% | 4.425% | 30.272% |

| | | Average C to T editing percent at the nucleotides numbered | | | | |
|---|---|---|---|---|---|---|
| | | according to the position in the PWsp389 spacer sequence on | | | | |
| | Protein SEQ | the non-target, genomic DNA strand | | | | |
| pWISE | ID NO: | C.11 | C.12 | C.16 | C.17 | C.18 |
| pWISE121 | 56 | 0.168% | 0.254% | 0.726% | 0.805% | 0.793% |
| pWISE9123 | 456 | 27.208% | 27.249% | 11.176% | 8.338% | 8.484% |
| pWISE10643 | 624 | 30.862% | 31.021% | 15.051% | 11.834% | 11.892% |
| pWISE10644 | 625 | 29.986% | 30.157% | 17.982% | 15.163% | 14.980% |
| pWISE10645 | 626 | 36.301% | 36.625% | 27.609% | 25.063% | 24.404% |
| pWISE10646 | 627 | 37.283% | 37.658% | 29.920% | 27.394% | 26.508% |
| pWISE10647 | 628 | 35.584% | 36.017% | 29.926% | 27.729% | 26.942% |
| | | Average C to T editing percent at the nucleotides numbered | | | | |
| | | according to the position in the PWsp389 spacer sequence on | | | | |
| | Protein SEQ | the non-target, genomic DNA strand | | | | |
| pWISE | ID NO: | C.25 | C.26 | C.27 | C.28 | C.30 |
| pWISE121 | 56 | 0.052% | 0.120% | 0.087% | 0.175% | 0.082% |
| pWISE9123 | 456 | 0.039% | 0.026% | 0.040% | 0.046% | 0.023% |
| pWISE10643 | 624 | 0.021% | 0.037% | 0.072% | 0.076% | 0.050% |
| pWISE10644 | 625 | 0.058% | 0.061% | 0.110% | 0.111% | 0.052% |
| pWISE10645 | 626 | 0.209% | 0.229% | 0.380% | 0.393% | 0.192% |
| pWISE10646 | 627 | 0.194% | 0.200% | 0.397% | 0.363% | 0.140% |
| pWISE10647 | 628 | 0.219% | 0.208% | 0.393% | 0.401% | 0.132% |

TABLE 48

| | | Standard Deviation of the average editing percent at the | | | | |
|---|---|---|---|---|---|---|
| | | nucleotides numbered according to the position in the PWsp389 | | | | |
| | Protein SEQ | spacer sequence on the non-target, genomic DNA strand | | | | |
| pWISE | ID NO: | C.-5 | C.-1 | C.4 | C.6 | C.7 |
| pWISE121 | 56 | 0.000% | 0.077% | 0.005% | 0.012% | 0.004% |
| pWISE9123 | 456 | 0.008% | 0.235% | 0.032% | 0.179% | 0.060% |
| pWISE10643 | 624 | 0.013% | 0.227% | 0.030% | 0.375% | 0.041% |
| pWISE10644 | 625 | 0.003% | 0.052% | 0.193% | 0.995% | 1.587% |
| pWISE10645 | 626 | 0.039% | 0.026% | 0.017% | 0.089% | 0.371% |
| pWISE10646 | 627 | 0.031% | 0.172% | 0.143% | 0.088% | 0.140% |
| pWISE10647 | 628 | 0.002% | 0.001% | 0.012% | 0.274% | 0.571% |
| | | Standard Deviation of the average editing percent at the | | | | |
| | | nucleotides numbered according to the position in the PWsp389 | | | | |
| | Protein SEQ | spacer sequence on the non-target, genomic DNA strand | | | | |
| pWISE | ID NO: | C.11 | C.12 | C.16 | C.17 | C.18 |
| pWISE121 | 56 | 0.040% | 0.101% | 0.050% | 0.043% | 0.083% |
| pWISE9123 | 456 | 0.040% | 0.050% | 0.170% | 0.138% | 0.045% |
| pWISE10643 | 624 | 0.075% | 0.150% | 0.002% | 0.359% | 0.227% |
| pWISE10644 | 625 | 1.207% | 1.313% | 1.135% | 1.335% | 1.398% |
| pWISE10645 | 626 | 0.600% | 0.475% | 0.381% | 0.427% | 0.726% |
| pWISE10646 | 627 | 0.038% | 0.029% | 0.138% | 0.336% | 0.437% |
| pWISE10647 | 628 | 1.054% | 1.034% | 0.768% | 0.695% | 0.618% |
| | | Standard Deviation of the average editing percent at the | | | | |
| | | nucleotides numbered according to the position in the PWsp389 | | | | |
| | Protein SEQ | spacer sequence on the non-target, genomic DNA strand | | | | |
| pWISE | ID NO: | C.25 | C.26 | C.27 | C.28 | C.30 |
| pWISE121 | 56 | 0.028% | 0.012% | 0.029% | 0.078% | 0.028% |
| pWISE9123 | 456 | 0.026% | 0.029% | 0.041% | 0.057% | 0.025% |
| pWISE10643 | 624 | 0.020% | 0.022% | 0.022% | 0.058% | 0.021% |
| pWISE10644 | 625 | 0.028% | 0.032% | 0.090% | 0.081% | 0.062% |
| pWISE10645 | 626 | 0.004% | 0.004% | 0.095% | 0.078% | 0.012% |
| pWISE10646 | 627 | 0.066% | 0.065% | 0.032% | 0.057% | 0.032% |
| pWISE10647 | 628 | 0.011% | 0.008% | 0.043% | 0.018% | 0.014% |

TABLE 49

| | | Average G to A editing percent at the nucleotides numbered | | | | |
|---|---|---|---|---|---|---|
| | | according to the position in the PWsp389 spacer sequence on the | | | | |
| | Protein SEQ | opposite, target genomic DNA strand | | | | |
| pWISE | ID NO: | G.-9 | G.-8 | G.-7 | G.-6 | G.2 |
| pWISE121 | 56 | 0.008% | 0.033% | 0.022% | 0.023% | 0.094% |
| pWISE9123 | 456 | 0.071% | 0.008% | 0.008% | 0.003% | 0.008% |
| pWISE10643 | 624 | 0.064% | 0.009% | 0.010% | 0.025% | 0.022% |
| pWISE10644 | 625 | 0.013% | 0.003% | 0.010% | 0.016% | 0.000% |
| pWISE10645 | 626 | 0.033% | 0.002% | 0.002% | 0.015% | 0.005% |
| pWISE10646 | 627 | 0.015% | 0.000% | 0.000% | 0.006% | 0.008% |
| pWISE10647 | 628 | 0.044% | 0.016% | 0.003% | 0.003% | 0.005% |
| | | Average G to A editing percent at the nucleotides numbered | | | | |
| | | according to the position in the PWsp389 spacer sequence on the | | | | |
| | Protein SEQ | opposite, target genomic DNA strand | | | | |
| pWISE | ID NO: | G.14 | G.21 | G.23 | G.24 | G.32 |
| pWISE121 | 56 | 0.491% | 0.310% | 0.243% | 0.248% | 0.358% |
| pWISE9123 | 456 | 0.278% | 0.229% | 1.639% | 1.345% | 0.227% |
| pWISE10643 | 624 | 0.601% | 0.230% | 2.273% | 1.943% | 0.277% |
| pWISE10644 | 625 | 0.651% | 0.425% | 3.452% | 2.995% | 0.421% |
| pWISE10645 | 626 | 0.887% | 0.696% | 7.875% | 7.992% | 0.501% |
| pWISE10646 | 627 | 1.158% | 0.667% | 9.351% | 9.530% | 0.566% |
| pWISE10647 | 628 | 1.353% | 0.790% | 10.882% | 11.041% | 0.536% |

TABLE 50

| | | Standard deviation of the average G to A editing percent at the | | | | |
|---|---|---|---|---|---|---|
| | | nucleotides numbered according to the position in the PWsp389 | | | | |
| | Protein SEQ | spacer sequence on the opposite, target genomic DNA strand | | | | |
| pWISE | ID NO: | G.-9 | G.-8 | G.-7 | G.-6 | G.2 |
| pWISE121 | 56 | 0.011% | 0.015% | 0.001% | 0.013% | 0.019% |
| pWISE9123 | 456 | 0.035% | 0.003% | 0.004% | 0.004% | 0.004% |
| pWISE10643 | 624 | 0.010% | 0.003% | 0.006% | 0.006% | 0.011% |
| pWISE10644 | 625 | 0.007% | 0.004% | 0.003% | 0.012% | 0.000% |
| pWISE10645 | 626 | 0.002% | 0.003% | 0.003% | 0.013% | 0.007% |
| pWISE10646 | 627 | 0.021% | 0.000% | 0.000% | 0.001% | 0.012% |
| pWISE10647 | 628 | 0.029% | 0.023% | 0.005% | 0.005% | 0.007% |
| | | Standard deviation of the average G to A editing percent at the | | | | |
| | | nucleotides numbered according to the position in the PWsp389 | | | | |
| | Protein SEQ | spacer sequence on the opposite, target genomic DNA strand | | | | |
| pWISE | ID NO: | G.14 | G.21 | G.23 | G.24 | G.32 |
| pWISE121 | 56 | 0.002% | 0.092% | 0.047% | 0.081% | 0.074% |
| pWISE9123 | 456 | 0.094% | 0.107% | 0.176% | 0.179% | 0.061% |
| pWISE10643 | 624 | 0.112% | 0.115% | 0.212% | 0.209% | 0.031% |
| pWISE10644 | 625 | 0.023% | 0.102% | 0.577% | 0.626% | 0.002% |
| pWISE10645 | 626 | 0.056% | 0.167% | 0.108% | 0.255% | 0.150% |
| pWISE10646 | 627 | 0.346% | 0.001% | 0.853% | 1.067% | 0.063% |
| pWISE10647 | 628 | 0.111% | 0.239% | 0.075% | 0.090% | 0.034% |

TABLE 51

| | | Average C to T editing percent at the nucleotides numbered | | | | |
|---|---|---|---|---|---|---|
| | | according to the position in the PWsp390 spacer sequence on the | | | | |
| | Protein SEQ | non-target, genomic DNA strand | | | | |
| pWISE | ID NO: | C.-5 | C.2 | C.6 | C.7 | C.8 |
| pWISE121 | 56 | 0.008% | 0.040% | 0.048% | 0.079% | 0.063% |
| pWISE9123 | 456 | 0.043% | 2.125% | 16.387% | 17.060% | 18.221% |
| pWISE10643 | 624 | 0.013% | 2.497% | 20.555% | 21.406% | 22.889% |
| pWISE10644 | 625 | 0.021% | 3.107% | 23.432% | 24.235% | 25.764% |
| pWISE10645 | 626 | 0.039% | 4.129% | 24.324% | 26.202% | 28.604% |
| pWISE10646 | 627 | 0.019% | 3.839% | 23.946% | 26.784% | 29.869% |
| pWISE10647 | 628 | 0.038% | 3.506% | 22.643% | 26.039% | 29.620% |

| | | Average C to T editing percent at the nucleotides numbered | | | | |
|---|---|---|---|---|---|---|
| | | according to the position in the PWsp390 spacer sequence on | | | | |
| | Protein SEQ | the non-target, genomic DNA strand | | | | |
| pWISE | ID NO: | C.9 | C.11 | C.12 | C.14 | C.15 |
| pWISE121 | 56 | 0.079% | 0.103% | 0.143% | 0.254% | 0.531% |
| pWISE9123 | 456 | 18.939% | 19.166% | 19.204% | 9.327% | 11.582% |
| pWISE10643 | 624 | 23.621% | 23.776% | 23.698% | 14.265% | 16.642% |
| pWISE10644 | 625 | 26.395% | 26.496% | 26.499% | 18.960% | 21.075% |
| pWISE10645 | 626 | 29.522% | 29.674% | 29.709% | 23.030% | 25.752% |
| pWISE10646 | 627 | 30.631% | 30.793% | 30.841% | 25.672% | 27.864% |
| pWISE10647 | 628 | 30.324% | 30.456% | 30.474% | 25.511% | 27.839% |

| | | Average C to T editing percent at the nucleotides numbered according | | | | | |
|---|---|---|---|---|---|---|---|
| | | to the position in the PWsp390 spacer sequence on the non-target, | | | | | |
| | Protein SEQ | genomic DNA strand | | | | | |
| pWISE | ID NO: | C.16 | C.17 | C.19 | C.27 | C.28 | C.30 |
| pWISE121 | 56 | 1.428% | 3.824% | 1.475% | 0.159% | 0.151% | 0.008% |
| pWISE9123 | 456 | 12.384% | 12.723% | 7.551% | 0.019% | 0.040% | 0.011% |
| pWISE10643 | 624 | 17.310% | 17.746% | 9.845% | 0.019% | 0.030% | 0.029% |
| pWISE10644 | 625 | 21.633% | 21.838% | 11.311% | 0.034% | 0.031% | 0.028% |
| pWISE10645 | 626 | 26.111% | 26.337% | 13.150% | 0.059% | 0.078% | 0.020% |
| pWISE10646 | 627 | 28.139% | 28.158% | 13.430% | 0.072% | 0.119% | 0.042% |
| pWISE10647 | 628 | 28.147% | 28.259% | 12.442% | 0.130% | 0.161% | 0.091% |

TABLE 52

| | | Standard Deviation of the average editing percent at the | | | | |
|---|---|---|---|---|---|---|
| | | nucleotides numbered according to the position in the PWsp390 | | | | |
| | Protein SEQ | spacer sequence on the non-target, genomic DNA strand | | | | |
| pWISE | ID NO: | C.-5 | C.2 | C.6 | C.7 | C.8 |
| pWISE121 | 56 | No data | No data | No data | No data | No data |
| pWISE9123 | 456 | 0.002% | 1.173% | 9.154% | 9.487% | 10.206% |
| pWISE10643 | 624 | 0.007% | 1.127% | 9.924% | 10.450% | 11.200% |
| pWISE10644 | 625 | 0.022% | 0.090% | 0.551% | 0.566% | 1.128% |
| pWISE10645 | 626 | 0.056% | 0.439% | 1.920% | 2.056% | 2.079% |
| pWISE10646 | 627 | 0.006% | 0.224% | 0.594% | 0.857% | 0.630% |
| pWISE10647 | 628 | 0.025% | 0.760% | 1.077% | 1.039% | 1.047% |

| | | Standard Deviation of the average editing percent at the | | | | |
|---|---|---|---|---|---|---|
| | | nucleotides numbered according to the position in the PWsp390 | | | | |
| | Protein SEQ | spacer sequence on the non-target, genomic DNA strand | | | | |
| pWISE | ID NO: | C.9 | C.11 | C.12 | C.14 | C.15 |
| pWISE121 | 56 | No data | No data | No data | No data | No data |
| pWISE9123 | 456 | 10.685% | 10.749% | 10.873% | 5.486% | 6.549% |
| pWISE10643 | 624 | 11.618% | 11.767% | 11.682% | 6.806% | 7.940% |
| pWISE10644 | 625 | 1.410% | 1.369% | 1.232% | 0.291% | 0.591% |
| pWISE10645 | 626 | 1.898% | 1.950% | 1.867% | 1.962% | 2.056% |
| pWISE10646 | 627 | 0.633% | 0.727% | 0.703% | 0.875% | 0.885% |
| pWISE10647 | 628 | 1.123% | 1.035% | 1.069% | 1.508% | 1.402% |

| | | Standard Deviation of the average editing percent at the nucleotides | | | | | |
|---|---|---|---|---|---|---|---|
| | | numbered according to the position in the PWsp390 spacer sequence on | | | | | |
| | Protein SEQ | the non-target, genomic DNA strand | | | | | |
| pWISE | ID NO: | C.16 | C.17 | C.19 | C.27 | C.28 | C.30 |
| pWISE121 | 56 | No data | No data | No data | No data | No data | No data |
| pWISE9123 | 456 | 6.855% | 7.160% | 4.258% | 0.015% | 0.014% | 0.016% |
| pWISE10643 | 624 | 8.276% | 8.408% | 4.985% | 0.019% | 0.016% | 0.040% |
| pWISE10644 | 625 | 0.473% | 0.641% | 0.345% | 0.033% | 0.028% | 0.032% |
| pWISE10645 | 626 | 1.928% | 1.809% | 1.322% | 0.006% | 0.034% | 0.028% |
| pWISE10646 | 627 | 0.819% | 0.836% | 0.337% | 0.060% | 0.007% | 0.038% |
| pWISE10647 | 628 | 1.423% | 1.512% | 0.617% | 0.025% | 0.029% | 0.059% |

TABLE 53

| | | Average G to A editing percent at the nucleotides numbered | | | | |
|---|---|---|---|---|---|---|
| | | according to the position in the PWsp390 spacer sequence on the | | | | |
| | Protein SEQ | opposite, target genomic DNA strand | | | | |
| pWISE | ID NO: | G.-9 | G.-8 | G.4 | G.21 | G.23 |
| pWISE121 | 56 | 0.008% | 0.000% | 0.008% | 0.635% | 1.015% |
| pWISE9123 | 456 | 0.008% | 0.000% | 0.027% | 0.056% | 0.238% |
| pWISE10643 | 624 | 0.003% | 0.006% | 0.014% | 0.073% | 0.349% |
| pWISE10644 | 625 | 0.037% | 0.000% | 0.019% | 0.064% | 0.438% |
| pWISE10645 | 626 | 0.015% | 0.000% | 0.055% | 0.031% | 0.897% |
| pWISE10646 | 627 | 0.011% | 0.000% | 0.004% | 0.198% | 1.031% |
| pWISE10647 | 628 | 0.011% | 0.000% | 0.028% | 0.168% | 1.369% |

| | | Average G to A editing percent at the nucleotides | | | |
|---|---|---|---|---|---|
| | | numbered according to the position in the PWsp390 spacer | | | |
| | Protein SEQ | sequence on the opposite, target genomic DNA strand | | | |
| pWISE | ID NO: | G.24 | G.25 | G.26 | G.33 |
| pWISE121 | 56 | 0.206% | 0.294% | 0.087% | 0.103% |
| pWISE9123 | 456 | 0.277% | 0.177% | 0.071% | 0.411% |
| pWISE10643 | 624 | 0.376% | 0.271% | 0.153% | 0.510% |
| pWISE10644 | 625 | 0.474% | 0.305% | 0.244% | 0.502% |
| pWISE10645 | 626 | 0.853% | 0.583% | 0.439% | 0.692% |
| pWISE10646 | 627 | 1.093% | 0.747% | 0.540% | 0.937% |
| pWISE10647 | 628 | 1.625% | 1.176% | 0.829% | 1.299% |

TABLE 54

| | | Standard deviation of the average G to A editing percent at the | | | | |
|---|---|---|---|---|---|---|
| | | nucleotides numbered according to the position in the PWsp390 | | | | |
| | Protein SEQ | spacer on the opposite, target genomic DNA strand | | | | |
| pWISE | ID NO: | G.-9 | G.-8 | G.4 | G.21 | G.23 |
| pWISE121 | 56 | No data | No data | No data | No data | No data |
| pWISE9123 | 456 | 0.001% | 0.000% | 0.003% | 0.067% | 0.185% |
| pWISE10643 | 624 | 0.004% | 0.009% | 0.003% | 0.024% | 0.186% |
| pWISE10644 | 625 | 0.002% | 0.000% | 0.004% | 0.012% | 0.182% |
| pWISE10645 | 626 | 0.022% | 0.000% | 0.032% | 0.033% | 0.140% |
| pWISE10646 | 627 | 0.006% | 0.000% | 0.005% | 0.001% | 0.237% |
| pWISE10647 | 628 | 0.005% | 0.000% | 0.030% | 0.040% | 0.158% |

| | | Standard deviation of the average G to A editing percent at the | | | |
|---|---|---|---|---|---|
| | | nucleotides numbered according to the position in the PWsp390 | | | |
| | Protein SEQ | spacer sequence on the opposite, target genomic DNA strand | | | |
| pWISE | ID NO: | G.24 | G.25 | G.26 | G.33 |
| pWISE121 | 56 | No data | No data | No data | No data |
| pWISE9123 | 456 | 0.182% | 0.052% | 0.066% | 0.359% |
| pWISE10643 | 624 | 0.171% | 0.066% | 0.084% | 0.236% |
| pWISE10644 | 625 | 0.100% | 0.105% | 0.002% | 0.033% |
| pWISE10645 | 626 | 0.078% | 0.003% | 0.084% | 0.107% |
| pWISE10646 | 627 | 0.304% | 0.257% | 0.115% | 0.008% |
| pWISE10647 | 628 | 0.184% | 0.093% | 0.161% | 0.039% |

### Example 11

[0295] Circular permutants of an enzymatically inactive LbCas12a (dLbCas12a (SEQ ID NO: 59)) or Cas12a comprising a R1138A mutation (nCas12a), which is a non-target strand catalytic nickase mutation, were fused to a cytosine deaminase at the N-terminus of the circular permutant using a linker and a UGI was fused to the C-terminus of the circular permutant to provide a fusion protein. These fusion proteins were tested both for C to T base editing on the target strand and G to A editing on the non-target strand. The tested linkers between the cytosine deaminase and circular permutant included a GS-XTEN-GS linker (SEQ ID NO:30); an XTEN linker (SEQ ID NO:29); a four amino acid glycine-serine (4XGS) linker of SGGS (SEQ ID NO:26); a six amino acid glycine serine (6XGS) linker of (SGS)ₙ wherein n is 2 (SEQ ID NO:869); an eight amino acid glycine-serine (8XGS) linker of (SGGS)ₙ wherein n is 2 (SEQ ID NO:870); and a twelve amino acid glycine-serine (12XGS) linker of (SGGS)ₙ wherein n is 3. The fusion proteins are listed in Table 55 and the targets are listed in Table 56.

TABLE 55
Tested constructs.

| | Vector SEQ | DNA SEQ | Protein SEQ |
|---|---|---|---|
| pWISE | ID NO: | ID NO: | ID NO: |
| pWISE9120 | 477 | 465 | 453 |
| pWISE10648 | 691 | 660 | 629 |
| pWISE10649 | 692 | 661 | 630 |
| pWISE10650 | 693 | 662 | 631 |
| pWISE10651 | 694 | 663 | 632 |
| pWISE10652 | 695 | 664 | 633 |
| pWISE10658 | 701 | 670 | 639 |
| pWISE10653 | 696 | 665 | 634 |
| pWISE10654 | 697 | 666 | 635 |
| pWISE10655 | 698 | 667 | 636 |
| pWISE10656 | 699 | 668 | 637 |
| pWISE10657 | 700 | 669 | 638 |

TABLE 56
Targets

| Target Nucleic | Target SEQ | | Spacer SEQ | | Vector SEQ |
|---|---|---|---|---|---|
| Acid | ID NO: | Spacer | ID NO: | pWISE | ID NO: |
| human FANCF | 273 | PWsp132 | 799 | pWISE878 | 809 |
| human FANCF | 273 | PWsp449 | 276 | pWISE878 | 279 |
| human AAVS1 | 863 | PWsp389 | 801 | pWISE5986 | 811 |
| human AAVS1 | 863 | PWsp390 | 802 | pWISE5986 | 812 |
| human RUNX1 | 864 | PWsp135 | 800 | pWISE5989 | 810 |
| human RUNX1 | 864 | PWsp133 | 873 | pWISE254 | 878 |
| human TRAC | 871 | PWsp3627 | 874 | pWISE10674 | 879 |
| human TRAC | 871 | PWsp3628 | 875 | pWISE10675 | 880 |
| human AAVS1 | 273 | PWsp3629 | 876 | pWISE10676 | 881 |
| human HEK2 | 872 | PWsp3630 | 877 | pWISE10677 | 882 |

[0296] The fusion proteins were tested for their ability to perform base editing on both the target and non-target strands at ten different sites in five target nucleic acids (SEQ ID NOs: 273, 863, 864, 871, and 872) in HEK293T cells using ten spacers (SEQ ID NOs: 276, 799-802, and 873-877). A single biological replicate and two technical replicates or three biological replicates and two technical replicates were tested. HEK293T cells were seeded into 48-well collagen-coated plates (Corning) in the absence of an antibiotic using DMEM media. At 70-80% confluency, cells were transfected with 1.5 L of LTX (ThermoFisher Scientific) using 500 ng of the fusion protein plasmid and 500 ng of guide RNA plasmid according to manufacturer's protocol. After 3 days, the cells were lysed with a crude extraction method using TritonX buffer. Each fusion protein was scored based on the precise base pair editing in the FANCF, RUNX1, AAVS1, TRAC, and HEK2 genes using the guide RNAs (SEQ ID NOs: 276, 799-802, and 873-877). Low, background levels of INDEL formation were seen, which was expected. The INDEL percentages for fusion proteins including a circular permutant comprising an inactivating mutation (SEQ ID NOs: 453 and 629-633) or a catalytic nickase mutation (SEQ ID NOs: 634-639) are shown in FIG. 23. For the tested constructs, an increase in INDEL percentage was observed for the fusion proteins that included a circular permutant having a catalytic nickase mutation (SEQ ID NOs: 634-639) compared to the fusion proteins including a circular permutant having an inactivating mutation (SEQ ID NOs: 629-633). The results for the tested fusion proteins are provided in Tables 57-96. The values in Tables 57-96 that are below 0.1% are considered to be in the noise of the instrument (below the limit of detection) and are not indicative of editing. Values that are between 0.1% and 0.5% indicate that editing is present in the experiment at the specified location, but the assay is not sensitive enough to accurately quantify the amount of base editing. As seen in Tables 57-96, fusion proteins showed both efficient target and non-target strand base editing. Specifically, fusion proteins including a circular permutant of dLbCas 12a had an efficiency of up to about 10% and fusion proteins including a circular permutant of nCas 12a had an efficiency of up to about 25%. The window of editing appears to be particularly beneficial between about positions 9-23 of the target spacer sequence. Similar to what was shown in Example 10, the shorter linkers were found to have improved editing towards the 3′ end of the spacer for both the target and non-target strand editing.

TABLE 57

| | | Average C to T editing percent at the nucleotides numbered | | | | | | |
|---|---|---|---|---|---|---|---|---|
| | | according to the position in the PWsp132 spacer sequence on the | | | | | | |
| | Protein SEQ | non-target, genomic DNA strand | | | | | | |
| pWISE | ID NO: | C.-7 | C.-6 | C.-4 | C.-1 | C.2 | C.3 | C.11 |
| pWISE121 | 56 | 0.039% | 0.052% | 0.028% | 0.043% | 0.097% | 0.093% | 0.277% |
| pWISE9120 | 453 | 0.131% | 0.074% | 0.006% | 0.308% | 0.006% | 0.051% | 1.108% |
| pWISE10648 | 629 | 0.172% | 0.159% | 0.030% | 0.275% | 0.035% | 0.045% | 0.611% |
| pWISE10649 | 630 | 0.179% | 0.118% | 0.000% | 0.269% | 0.022% | 0.030% | 0.451% |
| pWISE10650 | 631 | 0.280% | 0.225% | 0.061% | 0.409% | 0.010% | 0.052% | 0.648% |
| pWISE10651 | 632 | 0.302% | 0.203% | 0.044% | 0.541% | 0.049% | 0.091% | 0.591% |
| pWISE10652 | 633 | 0.073% | 0.058% | 0.011% | 0.186% | 0.010% | 0.026% | 0.494% |
| pWISE10658 | 639 | 0.213% | 0.179% | 0.044% | 0.362% | 0.071% | 0.114% | 1.434% |
| pWISE10653 | 634 | 0.140% | 0.122% | 0.043% | 0.341% | 0.064% | 0.068% | 0.720% |
| pWISE10654 | 635 | 0.185% | 0.138% | 0.057% | 0.425% | 0.054% | 0.132% | 0.944% |
| pWISE10655 | 636 | 0.135% | 0.076% | 0.038% | 0.306% | 0.018% | 0.053% | 0.712% |
| pWISE10656 | 637 | 0.208% | 0.132% | 0.036% | 0.331% | 0.069% | 0.079% | 0.660% |
| pWISE10657 | 638 | 0.124% | 0.084% | 0.006% | 0.238% | 0.006% | 0.016% | 0.556% |

| | | Average C to T editing percent at the nucleotides numbered | | | | | |
|---|---|---|---|---|---|---|---|
| | | according to the position in the PWsp132 spacer sequence on the | | | | | |
| | Protein SEQ | non-target, genomic DNA strand | | | | | |
| pWISE | ID NO: | C.14 | C.17 | C.19 | C.21 | C.24 | C.28 |
| pWISE121 | 56 | 1.076% | 0.870% | 0.687% | 0.477% | 0.153% | 0.176% |
| pWISE9120 | 453 | 0.720% | 0.251% | 2.011% | 2.102% | 0.794% | 0.326% |
| pWISE10648 | 629 | 0.373% | 0.091% | 1.242% | 1.252% | 0.550% | 0.020% |
| pWISE10649 | 630 | 0.495% | 0.209% | 3.356% | 3.622% | 1.946% | 0.289% |
| pWISE10650 | 631 | 0.657% | 0.189% | 4.384% | 4.777% | 2.522% | 0.380% |
| pWISE10651 | 632 | 0.651% | 0.199% | 4.697% | 4.967% | 2.608% | 0.356% |
| pWISE10652 | 633 | 0.459% | 0.073% | 3.167% | 3.481% | 2.003% | 0.280% |
| pWISE10658 | 639 | 0.722% | 0.281% | 3.091% | 3.705% | 0.998% | 0.069% |
| pWISE10653 | 634 | 0.429% | 0.159% | 1.826% | 1.882% | 0.703% | 0.068% |
| pWISE10654 | 635 | 0.639% | 0.464% | 4.466% | 5.076% | 2.270% | 0.301% |
| pWISE10655 | 636 | 0.575% | 0.186% | 4.885% | 5.470% | 2.219% | 0.267% |
| pWISE10656 | 637 | 0.706% | 0.208% | 4.496% | 5.168% | 2.199% | 0.299% |
| pWISE10657 | 638 | 0.513% | 0.051% | 4.023% | 4.924% | 1.510% | 0.182% |

TABLE 58

| | | Standard Deviation of the average editing percent at the nucleotides | | | | | | |
|---|---|---|---|---|---|---|---|---|
| | | numbered according to the position in the PWsp132 spacer sequence | | | | | | |
| | Protein SEQ | on the non-target, genomic DNA strand | | | | | | |
| pWISE | ID NO: | C.-7 | C.-6 | C.-4 | C.-1 | C.2 | C.3 | C.11 |
| pWISE121 | 56 | 0.050% | 0.025% | 0.009% | 0.006% | 0.082% | 0.003% | 0.090% |
| pWISE9120 | 453 | No data | No data | No data | No data | No data | No data | No data |
| pWISE10648 | 629 | 0.012% | 0.016% | 0.000% | 0.007% | 0.007% | 0.001% | 0.070% |
| pWISE10649 | 630 | No data | No data | No data | No data | No data | No data | No data |
| pWISE10650 | 631 | 0.012% | 0.013% | 0.041% | 0.035% | 0.001% | 0.028% | 0.089% |
| pWISE10651 | 632 | 0.036% | 0.092% | 0.049% | 0.116% | 0.055% | 0.087% | 0.001% |
| pWISE10652 | 633 | 0.050% | 0.020% | 0.007% | 0.111% | 0.015% | 0.037% | 0.064% |
| pWISE10658 | 639 | 0.057% | 0.029% | 0.035% | 0.031% | 0.019% | 0.033% | 0.206% |
| pWISE10653 | 634 | 0.027% | 0.002% | 0.027% | 0.040% | 0.018% | 0.017% | 0.089% |
| pWISE10654 | 635 | 0.060% | 0.063% | 0.074% | 0.050% | 0.027% | 0.089% | 0.218% |
| pWISE10655 | 636 | 0.011% | 0.015% | 0.038% | 0.072% | 0.009% | 0.026% | 0.111% |
| pWISE10656 | 637 | 0.034% | 0.008% | 0.002% | 0.014% | 0.090% | 0.090% | 0.182% |
| pWISE10657 | 638 | 0.067% | 0.032% | 0.008% | 0.034% | 0.008% | 0.006% | 0.037% |

| | | Standard Deviation of the average editing percent at the nucleotides | | | | | |
|---|---|---|---|---|---|---|---|
| | | numbered according to the position in the PWsp132 spacer | | | | | |
| | Protein SEQ | sequence on the non-target, genomic DNA strand | | | | | |
| pWISE | ID NO: | C.14 | C.17 | C.19 | C.21 | C.24 | C.28 |
| pWISE121 | 56 | 0.130% | 0.481% | 0.258% | 0.094% | 0.003% | 0.121% |
| pWISE9120 | 453 | No data | No data | No data | No data | No data | No data |
| pWISE10648 | 629 | 0.073% | 0.034% | 0.097% | 0.061% | 0.042% | 0.000% |
| pWISE10649 | 630 | No data | No data | No data | No data | No data | No data |
| pWISE10650 | 631 | 0.101% | 0.017% | 0.306% | 0.240% | 0.469% | 0.073% |
| pWISE10651 | 632 | 0.020% | 0.046% | 0.029% | 0.091% | 0.110% | 0.034% |
| pWISE10652 | 633 | 0.121% | 0.103% | 0.321% | 0.309% | 0.069% | 0.007% |
| pWISE10658 | 639 | 0.053% | 0.134% | 0.162% | 0.367% | 0.052% | 0.044% |
| pWISE10653 | 634 | 0.091% | 0.065% | 0.274% | 0.200% | 0.050% | 0.005% |
| pWISE10654 | 635 | 0.051% | 0.005% | 0.163% | 0.081% | 0.203% | 0.028% |
| pWISE10655 | 636 | 0.074% | 0.062% | 0.318% | 0.373% | 0.030% | 0.085% |
| pWISE10656 | 637 | 0.180% | 0.167% | 1.135% | 1.379% | 0.714% | 0.184% |
| pWISE10657 | 638 | 0.016% | 0.014% | 0.014% | 0.143% | 0.328% | 0.034% |

TABLE 59

| | | Average G to A editing percent at the nucleotides numbered | | | | |
|---|---|---|---|---|---|---|
| | | according to the position in the PWsp132 spacer sequence on the | | | | |
| | Protein SEQ | opposite, target genomic DNA strand | | | | |
| pWISE | ID NO: | G.-5 | G.6 | G.7 | G.9 | G.12 |
| pWISE121 | 56 | 0.053% | 0.094% | 0.091% | 0.210% | 0.189% |
| pWISE9120 | 453 | 0.023% | 0.080% | 0.131% | 2.016% | 5.724% |
| pWISE10648 | 629 | 0.013% | 0.078% | 0.124% | 1.258% | 5.045% |
| pWISE10649 | 630 | 0.000% | 0.047% | 0.118% | 1.006% | 6.560% |
| pWISE10650 | 631 | 0.008% | 0.074% | 0.165% | 1.198% | 6.271% |
| pWISE10651 | 632 | 0.017% | 0.103% | 0.205% | 1.063% | 4.607% |
| pWISE10652 | 633 | 0.000% | 0.095% | 0.163% | 0.363% | 1.474% |
| pWISE10658 | 639 | 0.006% | 0.100% | 0.239% | 3.398% | 11.948% |
| pWISE10653 | 634 | 0.018% | 0.061% | 0.103% | 1.484% | 8.508% |
| pWISE10654 | 635 | 0.034% | 0.061% | 0.147% | 1.771% | 8.709% |
| pWISE10655 | 636 | 0.020% | 0.102% | 0.216% | 2.025% | 8.551% |
| pWISE10656 | 637 | 0.033% | 0.117% | 0.222% | 1.748% | 5.471% |
| pWISE10657 | 638 | 0.000% | 0.056% | 0.282% | 1.063% | 2.384% |

| | | Average G to A editing percent at the nucleotides numbered | | | | |
|---|---|---|---|---|---|---|
| | | according to the position in the PWsp132 spacer sequence on the | | | | |
| | Protein SEQ | opposite, target genomic DNA strand | | | | |
| pWISE | ID NO: | G.13 | G.15 | G.23 | G.25 | G.30 |
| pWISE121 | 56 | 0.282% | 0.462% | 0.899% | 0.299% | 0.113% |
| pWISE9120 | 453 | 5.547% | 7.409% | 2.285% | 0.765% | 2.016% |
| pWISE10648 | 629 | 4.807% | 6.238% | 2.183% | 0.770% | 1.476% |
| pWISE10649 | 630 | 6.379% | 9.240% | 4.353% | 1.643% | 3.276% |
| pWISE10650 | 631 | 6.577% | 9.906% | 5.875% | 2.173% | 3.961% |
| pWISE10651 | 632 | 5.432% | 10.521% | 5.881% | 2.171% | 4.274% |
| pWISE10652 | 633 | 2.019% | 7.001% | 5.017% | 2.129% | 3.116% |
| pWISE10658 | 639 | 11.329% | 15.258% | 3.875% | 1.277% | 3.300% |
| pWISE10653 | 634 | 8.251% | 10.985% | 2.802% | 0.922% | 2.407% |
| pWISE10654 | 635 | 8.183% | 12.532% | 5.417% | 1.888% | 4.190% |
| pWISE10655 | 636 | 8.506% | 14.415% | 6.372% | 2.480% | 5.135% |
| pWISE10656 | 637 | 5.970% | 12.706% | 6.151% | 2.501% | 4.557% |
| pWISE10657 | 638 | 3.250% | 13.476% | 6.261% | 2.242% | 5.242% |

TABLE 60

| | | Standard deviation of the average G to A editing percent at the | | | | |
|---|---|---|---|---|---|---|
| | | nucleotides numbered according to the position in the PWsp132 | | | | |
| | Protein SEQ | spacer sequence on the opposite, target genomic DNA strand | | | | |
| pWISE | ID NO: | G.-5 | G.6 | G.7 | G.9 | G.12 |
| pWISE121 | 56 | 0.075% | 0.078% | 0.074% | 0.102% | 0.026% |
| pWISE9120 | 453 | No data | No data | No data | No data | No data |
| pWISE10648 | 629 | 0.018% | 0.019% | 0.009% | 0.075% | 0.281% |
| pWISE10649 | 630 | No data | No data | No data | No data | No data |
| pWISE10650 | 631 | 0.002% | 0.028% | 0.027% | 0.087% | 0.414% |
| pWISE10651 | 632 | 0.003% | 0.083% | 0.011% | 0.136% | 0.007% |
| pWISE10652 | 633 | 0.000% | 0.009% | 0.047% | 0.058% | 0.019% |
| pWISE10658 | 639 | 0.002% | 0.022% | 0.053% | 0.020% | 0.035% |
| pWISE10653 | 634 | 0.003% | 0.001% | 0.021% | 0.161% | 0.102% |
| pWISE10654 | 635 | 0.008% | 0.040% | 0.070% | 0.324% | 0.265% |
| pWISE10655 | 636 | 0.004% | 0.006% | 0.005% | 0.220% | 0.712% |
| pWISE10656 | 637 | 0.002% | 0.016% | 0.021% | 0.047% | 0.364% |
| pWISE10657 | 638 | 0.000% | 0.007% | 0.075% | 0.024% | 0.211% |
| | | Standard deviation of the average G to A editing percent at the | | | | |
| | | nucleotides numbered according to the position in the PWsp132 | | | | |
| | Protein SEQ | spacer sequence on the opposite, target genomic DNA strand | | | | |
| pWISE | ID NO: | G.13 | G.15 | G.23 | G.25 | G.30 |
| pWISE121 | 56 | 0.052% | 0.055% | 0.291% | 0.014% | 0.077% |
| pWISE9120 | 453 | No data | No data | No data | No data | No data |
| pWISE10648 | 629 | 0.250% | 0.477% | 0.231% | 0.078% | 0.176% |
| pWISE10649 | 630 | No data | No data | No data | No data | No data |
| pWISE10650 | 631 | 0.346% | 0.467% | 0.239% | 0.027% | 0.030% |
| pWISE10651 | 632 | 0.103% | 0.090% | 0.183% | 0.043% | 0.164% |
| pWISE10652 | 633 | 0.083% | 0.056% | 0.613% | 0.454% | 0.312% |
| pWISE10658 | 639 | 0.016% | 0.065% | 0.144% | 0.005% | 0.234% |
| pWISE10653 | 634 | 0.210% | 0.069% | 0.041% | 0.163% | 0.037% |
| pWISE10654 | 635 | 0.064% | 0.244% | 0.253% | 0.002% | 0.274% |
| pWISE10655 | 636 | 0.558% | 0.755% | 0.567% | 0.106% | 0.249% |
| pWISE10656 | 637 | 0.251% | 1.415% | 1.042% | 0.621% | 0.909% |
| pWISE10657 | 638 | 0.034% | 0.695% | 0.226% | 0.095% | 0.327% |

TABLE 61

| | | Average C to T editing percent at the nucleotides numbered | | | | | |
|---|---|---|---|---|---|---|---|
| | | according to the position in the PWsp449 spacer sequence on the | | | | | |
| | Protein SEQ | non-target, genomic DNA strand | | | | | |
| pWISE | ID NO: | C.-5 | C.-1 | C.2 | C.10 | C.11 | C.15 |
| pWISE121 | 56 | 0.095% | 0.158% | 0.123% | 0.401% | 0.431% | 2.083% |
| pWISE9120 | 453 | 0.333% | 0.491% | 0.138% | 4.611% | 4.642% | 3.777% |
| pWISE10648 | 629 | 0.204% | 0.214% | 0.074% | 1.536% | 1.513% | 1.659% |
| pWISE10649 | 630 | 0.234% | 0.235% | 0.097% | 1.368% | 1.244% | 1.649% |
| pWISE10650 | 631 | 0.316% | 0.420% | 0.111% | 2.774% | 2.600% | 3.411% |
| pWISE10651 | 632 | 0.308% | 0.327% | 0.080% | 2.629% | 2.437% | 3.317% |
| pWISE10652 | 633 | 0.245% | 0.337% | 0.076% | 2.137% | 1.855% | 2.639% |
| pWISE10658 | 639 | 0.578% | 0.833% | 0.287% | 7.718% | 7.601% | 4.955% |
| pWISE10653 | 634 | 0.348% | 0.345% | 0.138% | 3.499% | 3.361% | 2.385% |
| pWISE10654 | 635 | 0.417% | 0.628% | 0.253% | 4.403% | 3.868% | 3.202% |
| pWISE10655 | 636 | 0.463% | 0.646% | 0.254% | 4.931% | 4.539% | 4.151% |
| pWISE10656 | 637 | 0.394% | 0.563% | 0.148% | 4.459% | 4.095% | 4.047% |
| pWISE10657 | 638 | 0.316% | 0.526% | 0.155% | 4.514% | 3.949% | 4.070% |

| | | Average C to T editing percent at the nucleotides numbered | | | | |
|---|---|---|---|---|---|---|
| | | according to the position in the PWsp449 spacer sequence on the | | | | |
| | Protein SEQ | non-target, genomic DNA strand | | | | |
| pWISE | ID NO: | C.20 | C.22 | C.30 | C.32 | C.33 |
| pWISE121 | 56 | 0.505% | 1.066% | 1.515% | 1.047% | 1.095% |
| pWISE9120 | 453 | 0.890% | 1.111% | 0.128% | 0.015% | 0.026% |
| pWISE10648 | 629 | 0.522% | 0.628% | 0.148% | 0.059% | 0.064% |
| pWISE10649 | 630 | 0.779% | 0.840% | 0.101% | 0.030% | 0.028% |
| pWISE10650 | 631 | 1.906% | 2.081% | 0.212% | 0.055% | 0.066% |
| pWISE10651 | 632 | 1.726% | 1.713% | 0.225% | 0.012% | 0.019% |
| pWISE10652 | 633 | 1.735% | 1.671% | 0.167% | 0.008% | 0.020% |
| pWISE10658 | 639 | 1.169% | 1.357% | 0.142% | 0.015% | 0.004% |
| pWISE10653 | 634 | 0.722% | 0.830% | 0.113% | 0.002% | 0.007% |
| pWISE10654 | 635 | 1.552% | 1.744% | 0.192% | 0.028% | 0.023% |
| pWISE10655 | 636 | 1.630% | 1.907% | 0.157% | 0.014% | 0.036% |
| pWISE10656 | 637 | 2.020% | 2.107% | 0.214% | 0.006% | 0.027% |
| pWISE10657 | 638 | 1.879% | 2.018% | 0.171% | 0.031% | 0.027% |

TABLE 62

| | | Standard Deviation of the average editing percent at the | | | | | |
|---|---|---|---|---|---|---|---|
| | | nucleotides numbered according to the position in the PWsp449 | | | | | |
| | Protein SEQ | spacer sequence on the non-target, genomic DNA strand | | | | | |
| pWISE | ID NO: | C.-5 | C.-1 | C.2 | C.10 | C.11 | C.15 |
| pWISE121 | 56 | 0.067% | 0.050% | 0.037% | 0.011% | 0.017% | 0.001% |
| pWISE9120 | 453 | No data | No data | No data | No data | No data | No data |
| pWISE10648 | 629 | 0.086% | 0.114% | 0.062% | 0.358% | 0.369% | 0.288% |
| pWISE10649 | 630 | 0.057% | 0.091% | 0.024% | 0.033% | 0.083% | 0.100% |
| pWISE10650 | 631 | 0.037% | 0.011% | 0.083% | 0.109% | 0.215% | 0.378% |
| pWISE10651 | 632 | 0.040% | 0.052% | 0.011% | 0.864% | 0.724% | 0.877% |
| pWISE10652 | 633 | 0.019% | 0.019% | 0.040% | 0.082% | 0.010% | 0.126% |
| pWISE10658 | 639 | 0.024% | 0.100% | 0.054% | 0.877% | 0.857% | 0.413% |
| pWISE10653 | 634 | 0.156% | 0.098% | 0.052% | 0.657% | 0.605% | 0.443% |
| pWISE10654 | 635 | No data | No data | No data | No data | No data | No data |
| pWISE10655 | 636 | 0.151% | 0.192% | 0.098% | 0.353% | 0.241% | 0.441% |
| pWISE10656 | 637 | 0.057% | 0.003% | 0.013% | 0.165% | 0.075% | 0.022% |
| pWISE10657 | 638 | 0.140% | 0.122% | 0.036% | 0.675% | 0.444% | 0.492% |

| | | Standard Deviation of the average editing percent at the | | | | |
|---|---|---|---|---|---|---|
| | | nucleotides numbered according to the position in the PWsp449 | | | | |
| | Protein SEQ | spacer sequence on the non-target, genomic DNA strand | | | | |
| pWISE | ID NO: | C.20 | C.22 | C.30 | C.32 | C.33 |
| pWISE121 | 56 | 0.035% | 0.223% | 0.938% | 0.690% | 0.714% |
| pWISE9120 | 453 | No data | No data | No data | No data | No data |
| pWISE10648 | 629 | 0.193% | 0.223% | 0.153% | 0.062% | 0.035% |
| pWISE10649 | 630 | 0.010% | 0.117% | 0.030% | 0.018% | 0.008% |
| pWISE10650 | 631 | 0.194% | 0.219% | 0.005% | 0.045% | 0.021% |
| pWISE10651 | 632 | 0.501% | 0.344% | 0.048% | 0.002% | 0.012% |
| pWISE10652 | 633 | 0.069% | 0.052% | 0.048% | 0.005% | 0.004% |
| pWISE10658 | 639 | 0.115% | 0.139% | 0.006% | 0.006% | 0.005% |
| pWISE10653 | 634 | 0.033% | 0.098% | 0.011% | 0.003% | 0.003% |
| pWISE10654 | 635 | No data | No data | No data | No data | No data |
| pWISE10655 | 636 | 0.075% | 0.255% | 0.012% | 0.011% | 0.051% |
| pWISE10656 | 637 | 0.013% | 0.152% | 0.046% | 0.009% | 0.014% |
| pWISE10657 | 638 | 0.134% | 0.003% | 0.091% | 0.004% | 0.008% |

TABLE 63

| | | Average G to A editing percent at the nucleotides numbered | | | | | |
|---|---|---|---|---|---|---|---|
| | | according to the position in the PWsp449 spacer sequence | | | | | |
| | Protein | on the opposite, target genomic DNA strand | | | | | |
| pWISE | SEQ ID NO: | G.-9 | G.1 | G.3 | G.4 | G.7 | G.17 |
| pWISE121 | 56 | 0.048% | 0.105% | 0.144% | 0.133% | 0.178% | 0.670% |
| pWISE9120 | 453 | 0.005% | 0.061% | 0.056% | 0.123% | 0.015% | 5.788% |
| pWISE10648 | 629 | 0.002% | 0.037% | 0.094% | 0.094% | 0.022% | 3.324% |
| pWISE10649 | 630 | 0.008% | 0.029% | 0.032% | 0.057% | 0.013% | 4.321% |
| pWISE10650 | 631 | 0.016% | 0.010% | 0.033% | 0.097% | 0.028% | 7.663% |
| pWISE10651 | 632 | 0.014% | 0.005% | 0.037% | 0.084% | 0.009% | 7.590% |
| pWISE10652 | 633 | 0.012% | 0.057% | 0.094% | 0.107% | 0.036% | 6.836% |
| pWISE10658 | 639 | 0.021% | 0.043% | 0.039% | 0.051% | 0.014% | 10.694% |
| pWISE10653 | 634 | 0.035% | 0.041% | 0.056% | 0.058% | 0.027% | 7.636% |
| pWISE10654 | 635 | 0.019% | 0.000% | 0.070% | 0.103% | 0.005% | 10.854% |
| pWISE10655 | 636 | 0.022% | 0.039% | 0.050% | 0.064% | 0.014% | 12.072% |
| pWISE10656 | 637 | 0.021% | 0.022% | 0.042% | 0.058% | 0.016% | 11.537% |
| pWISE10657 | 638 | 0.016% | 0.037% | 0.072% | 0.089% | 0.016% | 11.411% |

| | | Average G to A editing percent at the nucleotides numbered | | | | |
|---|---|---|---|---|---|---|
| | | according to the position in the PWsp449 spacer sequence | | | | |
| | Protein | on the opposite, target genomic DNA strand | | | | |
| pWISE | SEQ ID NO: | G.21 | G.24 | G.26 | G.28 | G.31 |
| pWISE121 | 56 | 0.425% | 0.732% | 0.656% | 0.146% | 0.194% |
| pWISE9120 | 453 | 4.637% | 5.737% | 4.330% | 0.517% | 0.512% |
| pWISE10648 | 629 | 2.675% | 3.271% | 2.485% | 0.392% | 0.395% |
| pWISE10649 | 630 | 3.838% | 4.557% | 3.560% | 0.613% | 0.542% |
| pWISE10650 | 631 | 7.215% | 8.293% | 6.719% | 1.160% | 0.975% |
| pWISE10651 | 632 | 7.273% | 8.207% | 6.554% | 1.527% | 1.221% |
| pWISE10652 | 633 | 6.741% | 7.520% | 6.055% | 1.546% | 1.293% |
| pWISE10658 | 639 | 7.782% | 9.590% | 7.451% | 0.889% | 0.838% |
| pWISE10653 | 634 | 5.570% | 6.517% | 4.768% | 0.623% | 0.491% |
| pWISE10654 | 635 | 9.209% | 10.512% | 7.994% | 1.238% | 0.952% |
| pWISE10655 | 636 | 10.655% | 11.870% | 9.214% | 1.592% | 1.320% |
| pWISE10656 | 637 | 10.228% | 11.666% | 9.072% | 1.626% | 1.455% |
| pWISE10657 | 638 | 10.249% | 11.805% | 9.203% | 1.686% | 1.228% |

TABLE 64

| | | Standard deviation of the average G to A editing percent at the | | | | | |
|---|---|---|---|---|---|---|---|
| | | nucleotides numbered according to the position in the PWsp449 | | | | | |
| | Protein | spacer sequence on the opposite, target genomic DNA strand | | | | | |
| pWISE | SEQ ID NO: | G.-9 | G.1 | G.3 | G.4 | G.7 | G.17 |
| pWISE121 | 56 | 0.024% | 0.042% | 0.018% | 0.021% | 0.018% | 0.152% |
| pWISE9120 | 453 | No data | No data | No data | No data | No data | No data |
| pWISE10648 | 629 | 0.004% | 0.003% | 0.035% | 0.042% | 0.010% | 0.234% |
| pWISE10649 | 630 | 0.005% | 0.001% | 0.003% | 0.015% | 0.018% | 0.931% |
| pWISE10650 | 631 | 0.002% | 0.006% | 0.006% | 0.018% | 0.007% | 1.232% |
| pWISE10651 | 632 | 0.006% | 0.000% | 0.038% | 0.009% | 0.006% | 1.423% |
| pWISE10652 | 633 | 0.008% | 0.007% | 0.059% | 0.028% | 0.042% | 0.854% |
| pWISE10658 | 639 | 0.009% | 0.008% | 0.009% | 0.018% | 0.019% | 2.101% |
| pWISE10653 | 634 | 0.006% | 0.017% | 0.032% | 0.035% | 0.024% | 1.647% |
| pWISE10654 | 635 | No data | No data | No data | No data | No data | No data |
| pWISE10655 | 636 | 0.013% | 0.011% | 0.044% | 0.030% | 0.011% | 1.303% |
| pWISE10656 | 637 | 0.007% | 0.013% | 0.029% | 0.016% | 0.001% | 1.100% |
| pWISE10657 | 638 | 0.010% | 0.013% | 0.023% | 0.040% | 0.010% | 1.823% |

| | | Standard deviation of the average G to A editing percent at the | | | | |
|---|---|---|---|---|---|---|
| | | nucleotides numbered according to the position in the PWsp449 | | | | |
| | Protein | spacer sequence on the opposite, target genomic DNA strand | | | | |
| pWISE | SEQ ID NO: | G.21 | G.24 | G.26 | G.28 | G.31 |
| pWISE121 | 56 | 0.144% | 0.201% | 0.297% | 0.083% | 0.045% |
| pWISE9120 | 453 | No data | No data | No data | No data | No data |
| pWISE10648 | 629 | 0.220% | 0.454% | 0.454% | 0.015% | 0.100% |
| pWISE10649 | 630 | 0.844% | 1.031% | 0.814% | 0.182% | 0.074% |
| pWISE10650 | 631 | 1.016% | 1.311% | 0.767% | 0.099% | 0.097% |
| pWISE10651 | 632 | 1.209% | 1.490% | 1.466% | 0.132% | 0.139% |
| pWISE10652 | 633 | 0.548% | 0.748% | 0.397% | 0.067% | 0.173% |
| pWISE10658 | 639 | 1.395% | 1.580% | 1.440% | 0.133% | 0.183% |
| pWISE10653 | 634 | 1.457% | 1.543% | 1.096% | 0.230% | 0.010% |
| pWISE10654 | 635 | No data | No data | No data | No data | No data |
| pWISE10655 | 636 | 1.497% | 1.660% | 1.492% | 0.279% | 0.033% |
| pWISE10656 | 637 | 1.011% | 1.437% | 1.161% | 0.227% | 0.037% |
| pWISE10657 | 638 | 1.854% | 1.870% | 1.597% | 0.396% | 0.272% |

TABLE 65

| | | Average C to T editing percent at the nucleotides numbered | | | | | | |
|---|---|---|---|---|---|---|---|---|
| | | according to the position in the PWsp135 spacer sequence | | | | | | |
| | Protein | on the non-target, genomic DNA strand | | | | | | |
| pWISE | SEQ ID NO: | C.-8 | C.-6 | C.-1 | C.3 | C.4 | C.6 | C.8 |
| pWISE121 | 56 | 0.012% | 0.011% | 0.054% | 0.017% | 0.030% | 0.342% | 0.327% |
| pWISE9120 | 453 | 0.073% | 0.003% | 0.441% | 0.009% | 0.007% | 2.246% | 0.283% |
| pWISE10648 | 629 | 0.104% | 0.005% | 0.441% | 0.021% | 0.006% | 1.364% | 0.058% |
| pWISE10649 | 630 | 0.180% | 0.004% | 0.629% | 0.019% | 0.006% | 1.385% | 0.045% |
| pWISE10650 | 631 | 0.213% | 0.013% | 0.706% | 0.008% | 0.026% | 1.618% | 0.072% |
| pWISE10651 | 632 | 0.214% | 0.001% | 0.694% | 0.014% | 0.015% | 1.580% | 0.068% |
| pWISE10652 | 633 | 0.180% | 0.016% | 0.633% | 0.029% | 0.002% | 1.190% | 0.102% |
| pWISE10658 | 639 | 0.215% | 0.015% | 0.912% | 0.006% | 0.011% | 3.424% | 0.166% |
| pWISE10653 | 634 | 0.214% | 0.013% | 0.673% | 0.010% | 0.034% | 2.026% | 0.076% |
| pWISE10654 | 635 | 0.116% | 0.006% | 0.619% | 0.006% | 0.012% | 1.734% | 0.083% |
| pWISE10655 | 636 | 0.134% | 0.007% | 0.633% | 0.007% | 0.010% | 1.883% | 0.067% |
| pWISE10656 | 637 | 0.192% | 0.000% | 0.644% | 0.023% | 0.026% | 2.051% | 0.096% |
| pWISE10657 | 638 | 0.160% | 0.016% | 0.639% | 0.018% | 0.012% | 1.781% | 0.037% |

| | | Average C to T editing percent at the nucleotides numbered | | | | | |
|---|---|---|---|---|---|---|---|
| | | according to the position in the PWsp135 spacer sequence | | | | | |
| | Protein | on the non-target, genomic DNA strand | | | | | |
| pWISE | SEQ ID NO: | C.9 | C.10 | C.11 | C.13 | C.17 | C.18 |
| pWISE121 | 56 | 0.368% | 0.359% | 0.352% | 0.382% | 0.512% | 0.540% |
| pWISE9120 | 453 | 0.540% | 1.085% | 1.322% | 3.764% | 0.217% | 0.374% |
| pWISE10648 | 629 | 0.227% | 0.465% | 0.687% | 2.623% | 0.061% | 0.302% |
| pWISE10649 | 630 | 0.221% | 0.453% | 0.633% | 3.790% | 0.337% | 1.053% |
| pWISE10650 | 631 | 0.288% | 0.529% | 0.714% | 3.783% | 0.382% | 1.100% |
| pWISE10651 | 632 | 0.224% | 0.394% | 0.607% | 4.165% | 0.375% | 1.402% |
| pWISE10652 | 633 | 0.208% | 0.433% | 0.659% | 2.821% | 0.275% | 0.925% |
| pWISE10658 | 639 | 0.860% | 1.776% | 2.233% | 6.015% | 0.146% | 0.386% |
| pWISE10653 | 634 | 0.414% | 0.751% | 1.028% | 4.129% | 0.169% | 0.760% |
| pWISE10654 | 635 | 0.271% | 0.558% | 0.713% | 3.967% | 0.438% | 1.411% |
| pWISE10655 | 636 | 0.214% | 0.506% | 0.684% | 5.548% | 0.754% | 2.321% |
| pWISE10656 | 637 | 0.254% | 0.551% | 0.807% | 5.158% | 0.485% | 1.716% |
| pWISE10657 | 638 | 0.242% | 0.446% | 0.664% | 5.200% | 0.269% | 1.160% |
| | | Average C to T editing percent at the nucleotides numbered | | | | | |
| | | according to the position in the PWsp135 spacer sequence | | | | | |
| | Protein | on the non-target, genomic DNA strand | | | | | |
| pWISE | SEQ ID NO: | C.19 | C.22 | C.25 | C.27 | C.29 | C.33 |
| pWISE121 | 56 | 0.501% | 0.378% | 0.115% | 0.085% | 0.123% | 0.057% |
| pWISE9120 | 453 | 0.909% | 0.172% | 0.273% | 0.260% | 0.248% | 0.246% |
| pWISE10648 | 629 | 0.625% | 0.222% | 0.282% | 0.261% | 0.277% | 0.235% |
| pWISE10649 | 630 | 1.766% | 1.032% | 0.795% | 0.964% | 1.013% | 0.978% |
| pWISE10650 | 631 | 1.725% | 1.211% | 1.049% | 1.275% | 1.301% | 1.220% |
| pWISE10651 | 632 | 2.292% | 1.701% | 1.484% | 1.628% | 1.595% | 1.569% |
| pWISE10652 | 633 | 1.513% | 1.196% | 0.887% | 1.194% | 1.195% | 1.201% |
| pWISE10658 | 639 | 1.025% | 0.404% | 0.451% | 0.402% | 0.492% | 0.417% |
| pWISE10653 | 634 | 1.484% | 0.538% | 0.494% | 0.593% | 0.597% | 0.540% |
| pWISE10654 | 635 | 2.207% | 1.243% | 1.078% | 1.198% | 1.252% | 1.150% |
| pWISE10655 | 636 | 3.457% | 2.444% | 1.948% | 2.362% | 2.346% | 1.977% |
| pWISE10656 | 637 | 2.681% | 1.942% | 1.522% | 1.835% | 1.833% | 1.617% |
| pWISE10657 | 638 | 2.127% | 1.728% | 1.424% | 1.633% | 1.598% | 1.289% |

TABLE 66

| | | Standard Deviation of the average editing percent at the | | | | | | |
|---|---|---|---|---|---|---|---|---|
| | | nucleotides numbered according to the position in the PWsp135 | | | | | | |
| | Protein | spacer sequence on the non-target, genomic DNA strand | | | | | | |
| pWISE | SEQ ID NO: | C.-8 | C.-6 | C.-1 | C.3 | C.4 | C.6 | C.8 |
| pWISE121 | 56 | 0.002% | 0.015% | 0.064% | 0.011% | 0.014% | 0.411% | 0.437% |
| pWISE9120 | 453 | 0.092% | 0.004% | 0.238% | 0.007% | 0.002% | 0.988% | 0.400% |
| pWISE10648 | 629 | 0.001% | 0.003% | 0.131% | 0.002% | 0.004% | 0.188% | 0.046% |
| pWISE10649 | 630 | 0.017% | 0.001% | 0.109% | 0.022% | 0.002% | 0.226% | 0.008% |
| pWISE10650 | 631 | 0.112% | 0.009% | 0.054% | 0.007% | 0.024% | 0.209% | 0.046% |
| pWISE10651 | 632 | 0.046% | 0.002% | 0.133% | 0.014% | 0.000% | 0.023% | 0.009% |
| pWISE10652 | 633 | 0.085% | 0.008% | 0.003% | 0.041% | 0.002% | 0.009% | 0.058% |
| pWISE10658 | 639 | 0.084% | 0.014% | 0.379% | 0.002% | 0.003% | 0.283% | 0.034% |
| pWISE10653 | 634 | 0.025% | 0.019% | 0.036% | 0.014% | 0.010% | 0.049% | 0.017% |
| pWISE10654 | 635 | 0.039% | 0.008% | 0.205% | 0.004% | 0.013% | 0.819% | 0.056% |
| pWISE10655 | 636 | 0.053% | 0.009% | 0.003% | 0.009% | 0.009% | 0.024% | 0.015% |
| pWISE10656 | 637 | 0.008% | 0.000% | 0.023% | 0.012% | 0.012% | 0.363% | 0.033% |
| pWISE10657 | 638 | 0.091% | 0.006% | 0.329% | 0.004% | 0.017% | 0.316% | 0.013% |

| | |
|---|---|
| | Standard Deviation of the average editing percent at the |
| | nucleotides numbered according to the position in the PWsp135 |
| Protein | spacer sequence on the non-target, genomic DNA strand |

| pWISE | SEQ ID NO: | C.9 | C.10 | C.11 | C.13 | C.17 | C.18 |
|---|---|---|---|---|---|---|---|
| pWISE121 | 56 | 0.454% | 0.441% | 0.409% | 0.435% | 0.456% | 0.378% |
| pWISE9120 | 453 | 0.763% | 0.710% | 0.909% | 1.971% | 0.295% | 0.333% |
| pWISE10648 | 629 | 0.030% | 0.128% | 0.114% | 0.112% | 0.031% | 0.030% |
| pWISE10649 | 630 | 0.062% | 0.180% | 0.184% | 0.595% | 0.131% | 0.283% |
| pWISE10650 | 631 | 0.018% | 0.021% | 0.075% | 0.562% | 0.071% | 0.321% |
| pWISE10651 | 632 | 0.006% | 0.071% | 0.086% | 0.609% | 0.103% | 0.437% |
| pWISE10652 | 633 | 0.000% | 0.039% | 0.002% | 0.007% | 0.024% | 0.102% |
| pWISE10658 | 639 | 0.074% | 0.073% | 0.181% | 0.175% | 0.038% | 0.087% |
| pWISE10653 | 634 | 0.068% | 0.034% | 0.050% | 0.062% | 0.039% | 0.018% |
| pWISE10654 | 635 | 0.097% | 0.232% | 0.288% | 2.243% | 0.085% | 0.524% |
| pWISE10655 | 636 | 0.072% | 0.006% | 0.008% | 0.308% | 0.036% | 0.071% |
| pWISE10656 | 637 | 0.023% | 0.120% | 0.224% | 0.670% | 0.026% | 0.020% |
| pWISE10657 | 638 | 0.007% | 0.104% | 0.246% | 0.940% | 0.023% | 0.287% |

| | |
|---|---|
| | Standard Deviation of the average editing percent at the |
| | nucleotides numbered according to the position in the PWsp135 |
| Protein | spacer sequence on the non-target, genomic DNA strand |

| pWISE | SEQ ID NO: | C.19 | C.22 | C.25 | C.27 | C.29 | C.33 |
|---|---|---|---|---|---|---|---|
| pWISE121 | 56 | 0.467% | 0.079% | 0.073% | 0.021% | 0.076% | 0.056% |
| pWISE9120 | 453 | 0.349% | 0.065% | 0.024% | 0.178% | 0.173% | 0.211% |
| pWISE10648 | 629 | 0.045% | 0.018% | 0.074% | 0.041% | 0.018% | 0.059% |
| pWISE10649 | 630 | 0.344% | 0.334% | 0.217% | 0.193% | 0.257% | 0.243% |
| pWISE10650 | 631 | 0.336% | 0.243% | 0.254% | 0.277% | 0.291% | 0.303% |
| pWISE10651 | 632 | 0.560% | 0.407% | 0.348% | 0.342% | 0.393% | 0.402% |
| pWISE10652 | 633 | 0.017% | 0.124% | 0.095% | 0.117% | 0.095% | 0.052% |
| pWISE10658 | 639 | 0.148% | 0.015% | 0.044% | 0.043% | 0.074% | 0.052% |
| pWISE10653 | 634 | 0.039% | 0.011% | 0.025% | 0.009% | 0.025% | 0.051% |
| pWISE10654 | 635 | 0.972% | 0.499% | 0.472% | 0.555% | 0.601% | 0.480% |
| pWISE10655 | 636 | 0.153% | 0.009% | 0.067% | 0.031% | 0.058% | 0.045% |
| pWISE10656 | 637 | 0.238% | 0.345% | 0.258% | 0.335% | 0.259% | 0.324% |
| pWISE10657 | 638 | 0.296% | 0.214% | 0.250% | 0.224% | 0.297% | 0.264% |

TABLE 67

| | | Average G to A editing percent at the nucleotides numbered | | |
|---|---|---|---|---|
| | | according to the position in the PWsp135 spacer sequence on | | |
| | Protein SEQ | the opposite, target genomic DNA strand | | |
| pWISE | ID NO: | G.-4 | G.2 | G.16 |
| pWISE121 | 56 | 0.003% | 0.028% | 0.546% |
| pWISE9120 | 453 | 0.005% | 0.006% | 5.479% |
| pWISE10648 | 629 | 0.016% | 0.008% | 5.415% |
| pWISE10649 | 630 | 0.007% | 0.014% | 8.924% |
| pWISE10650 | 631 | 0.010% | 0.020% | 10.706% |
| pWISE10651 | 632 | 0.011% | 0.012% | 10.714% |
| pWISE10652 | 633 | 0.018% | 0.014% | 7.916% |
| pWISE10658 | 639 | 0.021% | 0.005% | 8.970% |
| pWISE10653 | 634 | 0.003% | 0.005% | 9.975% |
| pWISE10654 | 635 | 0.016% | 0.015% | 10.168% |
| pWISE10655 | 636 | 0.007% | 0.009% | 14.117% |
| pWISE10656 | 637 | 0.030% | 0.015% | 13.045% |
| pWISE10657 | 638 | 0.005% | 0.018% | 10.448% |

TABLE 68

| | | Standard deviation of the average G to A editing percent at the | | |
|---|---|---|---|---|
| | | nucleotides numbered according to the position in the PWsp135 | | |
| | Protein SEQ | spacer sequence on the opposite, target genomic DNA strand | | |
| pWISE | ID NO: | G.-4 | G.2 | G.16 |
| pWISE121 | 56 | 0.005% | 0.002% | 0.290% |
| pWISE9120 | 453 | 0.001% | 0.004% | 1.864% |
| pWISE10648 | 629 | 0.013% | 0.007% | 1.070% |
| pWISE10649 | 630 | 0.010% | 0.015% | 1.642% |
| pWISE10650 | 631 | 0.005% | 0.014% | 0.576% |
| pWISE10651 | 632 | 0.012% | 0.005% | 2.047% |
| pWISE10652 | 633 | 0.020% | 0.015% | 0.034% |
| pWISE10658 | 639 | 0.026% | 0.000% | 0.597% |
| pWISE10653 | 634 | 0.004% | 0.007% | 0.725% |
| pWISE10654 | 635 | 0.011% | 0.017% | 5.446% |
| pWISE10655 | 636 | 0.004% | 0.009% | 1.165% |
| pWISE10656 | 637 | 0.007% | 0.013% | 1.794% |
| pWISE10657 | 638 | 0.003% | 0.004% | 1.601% |

TABLE 69

| | | Average C to T editing percent at the nucleotides numbered | | | | |
|---|---|---|---|---|---|---|
| | | according to the position in the PWsp389 spacer sequence | | | | |
| | Protein | on the non-target, genomic DNA strand | | | | |
| pWISE | SEQ ID NO: | C.-5 | C.-1 | C.4 | C.6 | C.7 |
| pWISE121 | 56 | 0.000% | 0.070% | 0.068% | 0.094% | 0.270% |
| pWISE9120 | 453 | 0.014% | 0.191% | 0.231% | 0.036% | 0.390% |
| pWISE10648 | 629 | 0.005% | 0.063% | 0.072% | 0.000% | 0.120% |
| pWISE10649 | 630 | 0.004% | 0.052% | 0.025% | 0.022% | 0.098% |
| pWISE10650 | 631 | 0.023% | 0.160% | 0.165% | 0.059% | 0.260% |
| pWISE10651 | 632 | 0.010% | 0.109% | 0.145% | 0.042% | 0.203% |
| pWISE10652 | 633 | 0.023% | 0.103% | 0.092% | 0.031% | 0.086% |
| pWISE10658 | 639 | 0.003% | 0.324% | 0.259% | 0.128% | 0.397% |
| pWISE10653 | 634 | 0.010% | 0.148% | 0.172% | 0.072% | 0.154% |
| pWISE10654 | 635 | 0.013% | 0.213% | 0.151% | 0.057% | 0.180% |
| pWISE10655 | 636 | 0.008% | 0.174% | 0.178% | 0.073% | 0.179% |
| pWISE10656 | 637 | 0.017% | 0.146% | 0.191% | 0.038% | 0.216% |
| pWISE10657 | 638 | 0.026% | 0.201% | 0.207% | 0.044% | 0.165% |
| | | Average C to T editing percent at the nucleotides numbered | | | | |
| | | according to the position in the PWsp389 spacer sequence | | | | |
| | Protein | on the non-target, genomic DNA strand | | | | |
| pWISE | SEQ ID NO: | C.11 | C.12 | C.16 | C.17 | C.18 |
| pWISE121 | 56 | 0.168% | 0.254% | 0.726% | 0.805% | 0.793% |
| pWISE9120 | 453 | 1.885% | 1.898% | 0.572% | 0.359% | 0.357% |
| pWISE10648 | 629 | 0.525% | 0.487% | 0.212% | 0.125% | 0.111% |
| pWISE10649 | 630 | 0.546% | 0.504% | 0.154% | 0.117% | 0.127% |
| pWISE10650 | 631 | 1.226% | 1.139% | 0.525% | 0.377% | 0.380% |
| pWISE10651 | 632 | 1.372% | 1.256% | 0.538% | 0.422% | 0.436% |
| pWISE10652 | 633 | 0.594% | 0.592% | 0.344% | 0.251% | 0.257% |
| pWISE10658 | 639 | 2.299% | 2.086% | 0.433% | 0.187% | 0.217% |
| pWISE10653 | 634 | 1.022% | 0.953% | 0.257% | 0.137% | 0.106% |
| pWISE10654 | 635 | 1.214% | 1.107% | 0.260% | 0.170% | 0.198% |
| pWISE10655 | 636 | 1.333% | 1.139% | 0.265% | 0.149% | 0.198% |
| pWISE10656 | 637 | 1.187% | 0.964% | 0.261% | 0.139% | 0.108% |
| pWISE10657 | 638 | 1.170% | 1.025% | 0.270% | 0.128% | 0.112% |
| | | Average C to T editing percent at the nucleotides numbered | | | | |
| | | according to the position in the PWsp389 spacer sequence | | | | |
| | Protein | on the non-target, genomic DNA strand | | | | |
| pWISE | SEQ ID NO: | C.25 | C.26 | C.27 | C.28 | C.30 |
| pWISE121 | 56 | 0.052% | 0.120% | 0.087% | 0.175% | 0.082% |
| pWISE9120 | 453 | 0.040% | 0.031% | 0.051% | 0.074% | 0.058% |
| pWISE10648 | 629 | 0.053% | 0.087% | 0.125% | 0.183% | 0.246% |
| pWISE10649 | 630 | 0.019% | 0.021% | 0.022% | 0.032% | 0.017% |
| pWISE10650 | 631 | 0.055% | 0.066% | 0.056% | 0.077% | 0.030% |
| pWISE10651 | 632 | 0.049% | 0.037% | 0.043% | 0.037% | 0.039% |
| pWISE10652 | 633 | 0.045% | 0.040% | 0.040% | 0.047% | 0.004% |
| pWISE10658 | 639 | 0.005% | 0.008% | 0.022% | 0.017% | 0.005% |
| pWISE10653 | 634 | 0.003% | 0.003% | 0.003% | 0.010% | 0.003% |
| pWISE10654 | 635 | 0.031% | 0.021% | 0.021% | 0.040% | 0.017% |
| pWISE10655 | 636 | 0.017% | 0.033% | 0.047% | 0.029% | 0.016% |
| pWISE10656 | 637 | 0.024% | 0.017% | 0.028% | 0.024% | 0.014% |
| pWISE10657 | 638 | 0.031% | 0.034% | 0.032% | 0.032% | 0.003% |

TABLE 70

| | | Standard Deviation of the average editing percent at the | | | | |
|---|---|---|---|---|---|---|
| | | nucleotides numbered according to the position in the PWsp389 | | | | |
| | Protein | spacer sequence on the non-target, genomic DNA strand | | | | |
| pWISE | SEQ ID NO: | C.-5 | C.-1 | C.4 | C.6 | C.7 |
| pWISE121 | 56 | 0.000% | 0.077% | 0.005% | 0.012% | 0.004% |
| pWISE9120 | 453 | 0.019% | 0.090% | 0.057% | 0.026% | 0.056% |
| pWISE10648 | 629 | No data | No data | No data | No data | No data |
| pWISE10649 | 630 | 0.006% | 0.003% | 0.012% | 0.007% | 0.015% |
| pWISE10650 | 631 | 0.013% | 0.037% | 0.063% | 0.008% | 0.009% |
| pWISE10651 | 632 | 0.003% | 0.053% | 0.002% | 0.015% | 0.063% |
| pWISE10652 | 633 | 0.009% | 0.041% | 0.057% | 0.003% | 0.008% |
| pWISE10658 | 639 | 0.004% | 0.004% | 0.058% | 0.027% | 0.004% |
| pWISE10653 | 634 | 0.005% | 0.035% | 0.001% | 0.062% | 0.081% |
| pWISE10654 | 635 | 0.009% | 0.051% | 0.080% | 0.036% | 0.049% |
| pWISE10655 | 636 | 0.011% | 0.105% | 0.111% | 0.046% | 0.119% |
| pWISE10656 | 637 | 0.025% | 0.010% | 0.015% | 0.025% | 0.020% |
| pWISE10657 | 638 | 0.009% | 0.011% | 0.020% | 0.006% | 0.070% |
| | | Standard Deviation of the average editing percent at the | | | | |
| | | nucleotides numbered according to the position in the PWsp389 | | | | |
| | Protein | spacer sequence on the non-target, genomic DNA strand | | | | |
| pWISE | SEQ ID NO: | C.11 | C.12 | C.16 | C.17 | C.18 |
| pWISE121 | 56 | 0.040% | 0.101% | 0.050% | 0.043% | 0.083% |
| pWISE9120 | 453 | 0.470% | 0.501% | 0.028% | 0.098% | 0.010% |
| pWISE10648 | 629 | No data | No data | No data | No data | No data |
| pWISE10649 | 630 | 0.053% | 0.054% | 0.088% | 0.082% | 0.080% |
| pWISE10650 | 631 | 0.012% | 0.078% | 0.090% | 0.003% | 0.012% |
| pWISE10651 | 632 | 0.175% | 0.169% | 0.189% | 0.116% | 0.153% |
| pWISE10652 | 633 | 0.330% | 0.320% | 0.227% | 0.160% | 0.186% |
| pWISE10658 | 639 | 0.316% | 0.283% | 0.003% | 0.033% | 0.042% |
| pWISE10653 | 634 | 0.040% | 0.099% | 0.042% | 0.067% | 0.043% |
| pWISE10654 | 635 | 0.063% | 0.019% | 0.082% | 0.034% | 0.083% |
| pWISE10655 | 636 | 0.033% | 0.073% | 0.055% | 0.019% | 0.034% |
| pWISE10656 | 637 | 0.152% | 0.064% | 0.025% | 0.049% | 0.015% |
| pWISE10657 | 638 | 0.198% | 0.061% | 0.068% | 0.024% | 0.008% |
| | | Standard Deviation of the average editing percent at the | | | | |
| | | nucleotides numbered according to the position in the PWsp389 | | | | |
| | Protein | spacer sequence on the non-target, genomic DNA strand | | | | |
| pWISE | SEQ ID NO: | C.25 | C.26 | C.27 | C.28 | C.30 |
| pWISE121 | 56 | 0.028% | 0.012% | 0.029% | 0.078% | 0.028% |
| pWISE9120 | 453 | 0.043% | 0.031% | 0.002% | 0.007% | 0.008% |
| pWISE10648 | 629 | No data | No data | No data | No data | No data |
| pWISE10649 | 630 | 0.020% | 0.029% | 0.016% | 0.037% | 0.024% |
| pWISE10650 | 631 | 0.002% | 0.009% | 0.013% | 0.005% | 0.014% |
| pWISE10651 | 632 | 0.011% | 0.006% | 0.005% | 0.006% | 0.013% |
| pWISE10652 | 633 | 0.031% | 0.025% | 0.025% | 0.027% | 0.006% |
| pWISE10658 | 639 | 0.007% | 0.003% | 0.006% | 0.010% | 0.007% |
| pWISE10653 | 634 | 0.005% | 0.005% | 0.005% | 0.014% | 0.005% |
| pWISE10654 | 635 | 0.044% | 0.029% | 0.029% | 0.021% | 0.015% |
| pWISE10655 | 636 | 0.002% | 0.028% | 0.008% | 0.002% | 0.010% |
| pWISE10656 | 637 | 0.015% | 0.025% | 0.039% | 0.034% | 0.020% |
| pWISE10657 | 638 | 0.003% | 0.020% | 0.019% | 0.019% | 0.005% |

TABLE 71

| | | Average G to A editing percent at the nucleotides numbered | | | | |
|---|---|---|---|---|---|---|
| | | according to the position in the PWsp389 spacer sequence | | | | |
| | Protein | on the opposite, target genomic DNA strand | | | | |
| pWISE | SEQ ID NO: | G.-9 | G.-8 | G.-7 | G.-6 | G.2 |
| pWISE121 | 56 | 0.008% | 0.033% | 0.022% | 0.023% | 0.094% |
| pWISE9120 | 453 | 0.029% | 0.031% | 0.000% | 0.000% | 0.007% |
| pWISE10648 | 629 | 0.014% | 0.000% | 0.010% | 0.000% | 0.010% |
| pWISE10649 | 630 | 0.014% | 0.016% | 0.008% | 0.004% | 0.000% |
| pWISE10650 | 631 | 0.040% | 0.017% | 0.017% | 0.020% | 0.008% |
| pWISE10651 | 632 | 0.033% | 0.009% | 0.023% | 0.000% | 0.016% |
| pWISE10652 | 633 | 0.035% | 0.004% | 0.004% | 0.000% | 0.008% |
| pWISE10658 | 639 | 0.091% | 0.023% | 0.033% | 0.011% | 0.009% |
| pWISE10653 | 634 | 0.086% | 0.044% | 0.031% | 0.007% | 0.021% |
| pWISE10654 | 635 | 0.093% | 0.026% | 0.013% | 0.013% | 0.007% |
| pWISE10655 | 636 | 0.046% | 0.029% | 0.015% | 0.005% | 0.011% |
| pWISE10656 | 637 | 0.035% | 0.010% | 0.010% | 0.010% | 0.007% |
| pWISE10657 | 638 | 0.040% | 0.023% | 0.008% | 0.010% | 0.032% |
| | | Average G to A editing percent at the nucleotides numbered | | | | |
| | | according to the position in the PWsp389 spacer sequence | | | | |
| | Protein | on the opposite, target genomic DNA strand | | | | |
| pWISE | SEQ ID NO: | G.14 | G.21 | G.23 | G.24 | G.32 |
| pWISE121 | 56 | 0.491% | 0.310% | 0.243% | 0.248% | 0.358% |
| pWISE9120 | 453 | 0.690% | 0.193% | 0.117% | 0.077% | 0.136% |
| pWISE10648 | 629 | 0.352% | 0.077% | 0.135% | 0.092% | 0.222% |
| pWISE10649 | 630 | 0.301% | 0.139% | 0.106% | 0.101% | 0.055% |
| pWISE10650 | 631 | 0.567% | 0.296% | 0.303% | 0.211% | 0.116% |
| pWISE10651 | 632 | 1.042% | 0.527% | 0.518% | 0.437% | 0.128% |
| pWISE10652 | 633 | 0.603% | 0.427% | 0.415% | 0.331% | 0.116% |
| pWISE10658 | 639 | 1.085% | 0.480% | 0.232% | 0.139% | 0.087% |
| pWISE10653 | 634 | 0.885% | 0.391% | 0.144% | 0.075% | 0.051% |
| pWISE10654 | 635 | 0.833% | 0.524% | 0.281% | 0.235% | 0.146% |
| pWISE10655 | 636 | 0.989% | 0.718% | 0.446% | 0.313% | 0.112% |
| pWISE10656 | 637 | 0.756% | 0.540% | 0.366% | 0.244% | 0.108% |
| pWISE10657 | 638 | 0.904% | 0.745% | 0.680% | 0.477% | 0.163% |

TABLE 72

| | | Standard deviation of the average G to A editing percent at the | | | | |
|---|---|---|---|---|---|---|
| | | nucleotides numbered according to the position in the PWsp389 | | | | |
| | Protein | spacer sequence on the opposite, target genomic DNA strand | | | | |
| pWISE | SEQ ID NO: | G.-9 | G.-8 | G.-7 | G.-6 | G.2 |
| pWISE121 | 56 | 0.011% | 0.015% | 0.001% | 0.013% | 0.019% |
| pWISE9120 | 453 | 0.017% | 0.031% | 0.000% | 0.000% | 0.010% |
| pWISE10648 | 629 | No data | No data | No data | No data | No data |
| pWISE10649 | 630 | 0.019% | 0.000% | 0.011% | 0.006% | 0.000% |
| pWISE10650 | 631 | 0.057% | 0.024% | 0.024% | 0.028% | 0.011% |
| pWISE10651 | 632 | 0.012% | 0.012% | 0.009% | 0.000% | 0.023% |
| pWISE10652 | 633 | 0.033% | 0.006% | 0.006% | 0.000% | 0.012% |
| pWISE10658 | 639 | 0.027% | 0.018% | 0.013% | 0.001% | 0.013% |
| pWISE10653 | 634 | 0.043% | 0.043% | 0.005% | 0.010% | 0.010% |
| pWISE10654 | 635 | 0.092% | 0.017% | 0.018% | 0.009% | 0.010% |
| pWISE10655 | 636 | 0.020% | 0.002% | 0.021% | 0.006% | 0.016% |
| pWISE10656 | 637 | 0.010% | 0.005% | 0.005% | 0.005% | 0.010% |
| pWISE10657 | 638 | 0.016% | 0.023% | 0.002% | 0.014% | 0.036% |
| | | Standard deviation of the average G to A editing percent at the | | | | |
| | | nucleotides numbered according to the position in the PWsp389 | | | | |
| | Protein | spacer sequence on the opposite, target genomic DNA strand | | | | |
| pWISE | SEQ ID NO: | G.14 | G.21 | G.23 | G.24 | G.32 |
| pWISE121 | 56 | 0.002% | 0.092% | 0.047% | 0.081% | 0.074% |
| pWISE9120 | 453 | 0.190% | 0.124% | 0.082% | 0.064% | 0.117% |
| pWISE10648 | 629 | No data | No data | No data | No data | No data |
| pWISE10649 | 630 | 0.119% | 0.079% | 0.080% | 0.025% | 0.040% |
| pWISE10650 | 631 | 0.054% | 0.060% | 0.107% | 0.100% | 0.041% |
| pWISE10651 | 632 | 0.098% | 0.009% | 0.003% | 0.038% | 0.023% |
| pWISE10652 | 633 | 0.457% | 0.402% | 0.384% | 0.315% | 0.116% |
| pWISE10658 | 639 | 0.115% | 0.092% | 0.083% | 0.026% | 0.005% |
| pWISE10653 | 634 | 0.090% | 0.052% | 0.001% | 0.001% | 0.004% |
| pWISE10654 | 635 | 0.101% | 0.037% | 0.013% | 0.010% | 0.019% |
| pWISE10655 | 636 | 0.252% | 0.125% | 0.201% | 0.154% | 0.012% |
| pWISE10656 | 637 | 0.202% | 0.281% | 0.231% | 0.098% | 0.054% |
| pWISE10657 | 638 | 0.352% | 0.182% | 0.117% | 0.090% | 0.027% |

TABLE 73

| | | Average C to T editing percent at the nucleotides | | | | | |
|---|---|---|---|---|---|---|---|
| | | numbered according to the position in the PWsp390 | | | | | |
| | Protein | spacer sequence on the non-target, genomic DNA strand | | | | | |
| pWISE | SEQ ID NO: | C.-5 | C.2 | C.6 | C.7 | C.8 | C.9 |
| pWISE121 | 56 | 0.008% | 0.040% | 0.048% | 0.079% | 0.063% | 0.079% |
| pWISE9120 | 453 | 0.026% | 0.677% | 0.722% | 0.774% | 1.116% | 1.690% |
| pWISE10648 | 629 | 0.000% | 0.348% | 0.306% | 0.278% | 0.550% | 0.752% |
| pWISE10649 | 630 | 0.022% | 0.274% | 0.193% | 0.162% | 0.282% | 0.453% |
| pWISE10650 | 631 | 0.018% | 0.358% | 0.398% | 0.391% | 0.552% | 0.843% |
| pWISE10651 | 632 | 0.032% | 0.421% | 0.423% | 0.334% | 0.583% | 0.888% |
| pWISE10652 | 633 | 0.018% | 0.437% | 0.357% | 0.266% | 0.377% | 0.673% |
| pWISE10658 | 639 | 0.052% | 0.650% | 0.482% | 0.402% | 0.774% | 1.384% |
| pWISE10653 | 634 | 0.040% | 0.358% | 0.213% | 0.181% | 0.326% | 0.640% |
| pWISE10654 | 635 | No data | No data | No data | No data | No data | No data |
| pWISE10655 | 636 | 0.029% | 0.722% | 0.483% | 0.294% | 0.473% | 0.904% |
| pWISE10656 | 637 | 0.027% | 0.647% | 0.335% | 0.204% | 0.308% | 0.782% |
| pWISE10657 | 638 | 0.007% | 0.581% | 0.323% | 0.176% | 0.288% | 0.685% |

| | | Average C to T editing percent at the nucleotides | | | | |
|---|---|---|---|---|---|---|
| | | numbered according to the position in the PWsp390 | | | | |
| | Protein | spacer sequence on the non-target, genomic DNA strand | | | | |
| pWISE | SEQ ID NO: | C.11 | C.12 | C.14 | C.15 | C.16 |
| pWISE121 | 56 | 0.103% | 0.143% | 0.254% | 0.531% | 1.428% |
| pWISE9120 | 453 | 3.444% | 3.405% | 0.413% | 0.658% | 0.838% |
| pWISE10648 | 629 | 1.692% | 1.622% | 0.237% | 0.313% | 0.341% |
| pWISE10649 | 630 | 1.488% | 1.413% | 0.097% | 0.200% | 0.303% |
| pWISE10650 | 631 | 2.411% | 2.336% | 0.269% | 0.516% | 0.646% |
| pWISE10651 | 632 | 2.591% | 2.490% | 0.265% | 0.449% | 0.642% |
| pWISE10652 | 633 | 1.927% | 1.718% | 0.236% | 0.410% | 0.580% |
| pWISE10658 | 639 | 3.816% | 3.626% | 0.055% | 0.095% | 0.171% |
| pWISE10653 | 634 | 2.042% | 1.859% | 0.058% | 0.080% | 0.130% |
| pWISE10654 | 635 | No data | No data | No data | No data | No data |
| pWISE10655 | 636 | 3.942% | 3.676% | 0.070% | 0.088% | 0.196% |
| pWISE10656 | 637 | 3.596% | 3.163% | 0.061% | 0.124% | 0.192% |
| pWISE10657 | 638 | 3.217% | 2.969% | 0.042% | 0.098% | 0.163% |
| | | Average C to T editing percent at the nucleotides | | | | |
| | | numbered according to the position in the PWsp390 | | | | |
| | Protein | spacer sequence on the non-target, genomic DNA strand | | | | |
| pWISE | SEQ ID NO: | C.17 | C.19 | C.27 | C.28 | C.30 |
| pWISE121 | 56 | 3.824% | 1.475% | 0.159% | 0.151% | 0.008% |
| pWISE9120 | 453 | 0.942% | 1.142% | 0.052% | 0.052% | 0.039% |
| pWISE10648 | 629 | 0.411% | 0.801% | 0.021% | 0.007% | 0.000% |
| pWISE10649 | 630 | 0.343% | 0.769% | 0.026% | 0.030% | 0.018% |
| pWISE10650 | 631 | 0.700% | 1.537% | 0.022% | 0.051% | 0.015% |
| pWISE10651 | 632 | 0.736% | 1.643% | 0.019% | 0.016% | 0.009% |
| pWISE10652 | 633 | 0.671% | 1.339% | 0.043% | 0.039% | 0.004% |
| pWISE10658 | 639 | 0.250% | 0.630% | 0.000% | 0.028% | 0.012% |
| pWISE10653 | 634 | 0.149% | 0.465% | 0.015% | 0.008% | 0.004% |
| pWISE10654 | 635 | No data | No data | No data | No data | No data |
| pWISE10655 | 636 | 0.289% | 1.306% | 0.018% | 0.042% | 0.000% |
| pWISE10656 | 637 | 0.274% | 1.254% | 0.014% | 0.013% | 0.010% |
| pWISE10657 | 638 | 0.248% | 1.040% | 0.008% | 0.015% | 0.000% |

TABLE 74

| | | Standard Deviation of the average editing percent at the | | | | | |
|---|---|---|---|---|---|---|---|
| | | nucleotides numbered according to the position in the PWsp390 | | | | | |
| | Protein | spacer sequence on the non-target, genomic DNA strand | | | | | |
| pWISE | SEQ ID NO: | C.-5 | C.2 | C.6 | C.7 | C.8 | C.9 |
| pWISE121 | 56 | No data | No data | No data | No data | No data | No data |
| pWISE9120 | 453 | No data | No data | No data | No data | No data | No data |
| pWISE10648 | 629 | No data | No data | No data | No data | No data | No data |
| pWISE10649 | 630 | 0.031% | 0.103% | 0.050% | 0.046% | 0.028% | 0.031% |
| pWISE10650 | 631 | 0.026% | 0.121% | 0.148% | 0.137% | 0.128% | 0.135% |
| pWISE10651 | 632 | 0.037% | 0.096% | 0.194% | 0.127% | 0.254% | 0.270% |
| pWISE10652 | 633 | 0.026% | 0.251% | 0.160% | 0.135% | 0.208% | 0.313% |
| pWISE10658 | 639 | 0.035% | 0.014% | 0.194% | 0.189% | 0.107% | 0.126% |
| pWISE10653 | 634 | 0.018% | 0.010% | 0.011% | 0.017% | 0.007% | 0.039% |
| pWISE10654 | 635 | No data | No data | No data | No data | No data | No data |
| pWISE10655 | 636 | 0.008% | 0.218% | 0.110% | 0.041% | 0.134% | 0.098% |
| pWISE10656 | 637 | 0.011% | 0.141% | 0.017% | 0.021% | 0.029% | 0.114% |
| pWISE10657 | 638 | 0.001% | 0.062% | 0.132% | 0.020% | 0.017% | 0.036% |

| | | Standard Deviation of the average editing percent at the | | | | |
|---|---|---|---|---|---|---|
| | | nucleotides numbered according to the position in the PWsp390 | | | | |
| | Protein | spacer sequence on the non-target, genomic DNA strand | | | | |
| pWISE | SEQ ID NO: | C.11 | C.12 | C.14 | C.15 | C.16 |
| pWISE121 | 56 | No data | No data | No data | No data | No data |
| pWISE9120 | 453 | No data | No data | No data | No data | No data |
| pWISE10648 | 629 | No data | No data | No data | No data | No data |
| pWISE10649 | 630 | 0.170% | 0.145% | 0.066% | 0.089% | 0.062% |
| pWISE10650 | 631 | 0.196% | 0.198% | 0.143% | 0.096% | 0.132% |
| pWISE10651 | 632 | 0.443% | 0.467% | 0.030% | 0.065% | 0.171% |
| pWISE10652 | 633 | 0.570% | 0.483% | 0.114% | 0.161% | 0.202% |
| pWISE10658 | 639 | 0.145% | 0.029% | 0.019% | 0.007% | 0.004% |
| pWISE10653 | 634 | 0.052% | 0.068% | 0.044% | 0.025% | 0.018% |
| pWISE10654 | 635 | No data | No data | No data | No data | No data |
| pWISE10655 | 636 | 0.521% | 0.431% | 0.000% | 0.004% | 0.090% |
| pWISE10656 | 637 | 0.321% | 0.324% | 0.023% | 0.003% | 0.007% |
| pWISE10657 | 638 | 0.165% | 0.151% | 0.027% | 0.052% | 0.090% |
| | | Standard Deviation of the average editing percent at the | | | | |
| | | nucleotides numbered according to the position in the PWsp390 | | | | |
| | Protein | spacer sequence on the non-target, genomic DNA strand | | | | |
| pWISE | SEQ ID NO: | C.17 | C.19 | C.27 | C.28 | C.30 |
| pWISE121 | 56 | No data | No data | No data | No data | No data |
| pWISE9120 | 453 | No data | No data | No data | No data | No data |
| pWISE10648 | 629 | No data | No data | No data | No data | No data |
| pWISE10649 | 630 | 0.078% | 0.110% | 0.025% | 0.019% | 0.025% |
| pWISE10650 | 631 | 0.139% | 0.136% | 0.021% | 0.012% | 0.021% |
| pWISE10651 | 632 | 0.233% | 0.409% | 0.015% | 0.011% | 0.013% |
| pWISE10652 | 633 | 0.290% | 0.355% | 0.023% | 0.029% | 0.005% |
| pWISE10658 | 639 | 0.048% | 0.074% | 0.000% | 0.029% | 0.016% |
| pWISE10653 | 634 | 0.054% | 0.035% | 0.008% | 0.001% | 0.006% |
| pWISE10654 | 635 | No data | No data | No data | No data | No data |
| pWISE10655 | 636 | 0.166% | 0.096% | 0.025% | 0.059% | 0.000% |
| pWISE10656 | 637 | 0.040% | 0.062% | 0.010% | 0.001% | 0.004% |
| pWISE10657 | 638 | 0.047% | 0.015% | 0.011% | 0.012% | 0.000% |

TABLE 75

| | | Average G to A editing percent at the nucleotides | | | | |
|---|---|---|---|---|---|---|
| | | numbered according to the position in the PWsp390 spacer | | | | |
| | Protein | sequence on the opposite, target genomic DNA strand | | | | |
| pWISE | SEQ ID NO: | G.-9 | G.-8 | G.4 | G.21 | G.23 |
| pWISE121 | 56 | 0.008% | 0.000% | 0.008% | 0.635% | 1.015% |
| pWISE9120 | 453 | 0.045% | 0.039% | 0.232% | 1.019% | 0.806% |
| pWISE10648 | 629 | 0.014% | 0.014% | 0.160% | 0.717% | 0.654% |
| pWISE10649 | 630 | 0.035% | 0.018% | 0.070% | 0.707% | 0.667% |
| pWISE10650 | 631 | 0.004% | 0.007% | 0.118% | 1.208% | 1.080% |
| pWISE10651 | 632 | 0.027% | 0.003% | 0.088% | 1.378% | 1.425% |
| pWISE10652 | 633 | 0.009% | 0.014% | 0.054% | 1.281% | 1.151% |
| pWISE10658 | 639 | 0.070% | 0.061% | 0.030% | 0.576% | 0.891% |
| pWISE10653 | 634 | 0.112% | 0.087% | 0.069% | 0.639% | 0.554% |
| pWISE10654 | 635 | No data | No data | No data | No data | No data |
| pWISE10655 | 636 | 0.033% | 0.047% | 0.124% | 1.279% | 1.343% |
| pWISE10656 | 637 | 0.013% | 0.007% | 0.124% | 1.081% | 1.160% |
| pWISE10657 | 638 | 0.021% | 0.013% | 0.093% | 0.932% | 1.152% |

| | | Average G to A editing percent at the nucleotides | | | |
|---|---|---|---|---|---|
| | | numbered according to the position in the PWsp390 spacer | | | |
| | Protein | sequence on the opposite, target genomic DNA strand | | | |
| pWISE | SEQ ID NO: | G.24 | G.25 | G.26 | G.33 |
| pWISE121 | 56 | 0.206% | 0.294% | 0.087% | 0.103% |
| pWISE9120 | 453 | 0.535% | 0.316% | 0.206% | 0.064% |
| pWISE10648 | 629 | 0.480% | 0.320% | 0.244% | 0.104% |
| pWISE10649 | 630 | 0.431% | 0.256% | 0.167% | 0.227% |
| pWISE10650 | 631 | 0.790% | 0.447% | 0.195% | 0.232% |
| pWISE10651 | 632 | 0.901% | 0.623% | 0.453% | 0.268% |
| pWISE10652 | 633 | 0.723% | 0.450% | 0.346% | 0.313% |
| pWISE10658 | 639 | 0.615% | 0.271% | 0.165% | 0.168% |
| pWISE10653 | 634 | 0.333% | 0.218% | 0.112% | 0.093% |
| pWISE10654 | 635 | No data | No data | No data | No data |
| pWISE10655 | 636 | 0.901% | 0.348% | 0.213% | 0.212% |
| pWISE10656 | 637 | 0.773% | 0.360% | 0.237% | 0.260% |
| pWISE10657 | 638 | 0.751% | 0.354% | 0.221% | 0.152% |

TABLE 76

| | | Standard deviation of the average G to A editing percent at the | | | | |
|---|---|---|---|---|---|---|
| | | nucleotides numbered according to the position in the PWsp390 | | | | |
| | Protein | spacer sequence on the opposite, target genomic DNA strand | | | | |
| pWISE | SEQ ID NO: | G.-9 | G.-8 | G.4 | G.21 | G.23 |
| pWISE121 | 56 | No data | No data | No data | No data | No data |
| pWISE9120 | 453 | No data | No data | No data | No data | No data |
| pWISE10648 | 629 | No data | No data | No data | No data | No data |
| pWISE10649 | 630 | 0.002% | 0.025% | 0.003% | 0.079% | 0.045% |
| pWISE10650 | 631 | 0.005% | 0.010% | 0.031% | 0.215% | 0.113% |
| pWISE10651 | 632 | 0.021% | 0.004% | 0.006% | 0.118% | 0.042% |
| pWISE10652 | 633 | 0.013% | 0.019% | 0.013% | 0.054% | 0.289% |
| pWISE10658 | 639 | 0.020% | 0.066% | 0.012% | 0.076% | 0.020% |
| pWISE10653 | 634 | 0.007% | 0.016% | 0.029% | 0.028% | 0.161% |
| pWISE10654 | 635 | No data | No data | No data | No data | No data |
| pWISE10655 | 636 | 0.013% | 0.023% | 0.056% | 0.312% | 0.093% |
| pWISE10656 | 637 | 0.009% | 0.010% | 0.103% | 0.328% | 0.261% |
| pWISE10657 | 638 | 0.013% | 0.008% | 0.010% | 0.059% | 0.164% |

| | | Standard deviation of the average G to A editing percent at the | | | |
|---|---|---|---|---|---|
| | | nucleotides numbered according to the position in the PWsp390 | | | |
| | Protein | spacer sequence on the opposite, target genomic DNA strand | | | |
| pWISE | SEQ ID NO: | G.24 | G.25 | G.26 | G.33 |
| pWISE121 | 56 | No data | No data | No data | No data |
| pWISE9120 | 453 | No data | No data | No data | No data |
| pWISE10648 | 629 | No data | No data | No data | No data |
| pWISE10649 | 630 | 0.022% | 0.015% | 0.080% | 0.046% |
| pWISE10650 | 631 | 0.138% | 0.058% | 0.048% | 0.087% |
| pWISE10651 | 632 | 0.193% | 0.132% | 0.093% | 0.093% |
| pWISE10652 | 633 | 0.038% | 0.040% | 0.008% | 0.056% |
| pWISE10658 | 639 | 0.042% | 0.029% | 0.027% | 0.001% |
| pWISE10653 | 634 | 0.121% | 0.007% | 0.007% | 0.044% |
| pWISE10654 | 635 | No data | No data | No data | No data |
| pWISE10655 | 636 | 0.173% | 0.063% | 0.036% | 0.057% |
| pWISE10656 | 637 | 0.071% | 0.027% | 0.028% | 0.040% |
| pWISE10657 | 638 | 0.117% | 0.045% | 0.008% | 0.024% |

TABLE 77

| | | Average C to T editing percent at the nucleotides | | | | | | |
|---|---|---|---|---|---|---|---|---|
| | | numbered according to the position in the PWsp133 | | | | | | |
| | Protein | spacer sequence on the non-target, genomic DNA strand | | | | | | |
| pWISE | SEQ ID NO: | C.-5 | C.1 | C.11 | C.17 | C.20 | C.24 | C.27 |
| pWISE121 | 56 | 0.019% | 0.124% | 0.171% | 0.797% | 0.316% | 0.268% | 0.051% |
| pWISE9120 | 453 | 0.030% | 0.166% | 0.814% | 0.125% | 2.567% | 0.070% | 0.015% |
| pWISE10648 | 629 | 0.009% | 0.133% | 0.148% | 0.079% | 1.611% | 0.068% | 0.015% |
| pWISE10649 | 630 | 0.021% | 0.174% | 0.113% | 0.066% | 2.203% | 0.196% | 0.030% |
| pWISE10650 | 631 | 0.021% | 0.224% | 0.190% | 0.130% | 4.514% | 0.618% | 0.060% |
| pWISE10651 | 632 | 0.024% | 0.243% | 0.168% | 0.109% | 4.555% | 0.734% | 0.088% |
| pWISE10652 | 633 | 0.034% | 0.177% | 0.167% | 0.087% | 3.410% | 0.687% | 0.065% |
| pWISE10658 | 639 | 0.018% | 0.236% | 0.276% | 0.062% | 4.315% | 0.102% | 0.030% |
| pWISE10653 | 634 | 0.008% | 0.125% | 0.125% | 0.047% | 2.812% | 0.132% | 0.008% |
| pWISE10654 | 635 | 0.017% | 0.253% | 0.128% | 0.065% | 5.429% | 0.450% | 0.067% |
| pWISE10655 | 636 | 0.017% | 0.245% | 0.149% | 0.077% | 6.715% | 0.691% | 0.102% |
| pWISE10656 | 637 | 0.007% | 0.222% | 0.129% | 0.037% | 6.144% | 0.752% | 0.088% |
| pWISE10657 | 638 | 0.009% | 0.156% | 0.117% | 0.030% | 4.792% | 0.764% | 0.077% |

TABLE 78

| | | Standard Deviation of the average editing percent at the | | | | | | |
|---|---|---|---|---|---|---|---|---|
| | | nucleotides numbered according to the position in the PWsp133 | | | | | | |
| | Protein | spacer sequence on the non-target, genomic DNA strand | | | | | | |
| pWISE | SEQ ID NO: | C.-5 | C.1 | C.11 | C.17 | C.20 | C.24 | C.27 |
| pWISE121 | 56 | 0.022% | 0.043% | 0.049% | 0.184% | 0.080% | 0.076% | 0.028% |
| pWISE9120 | 453 | 0.020% | 0.063% | 0.220% | 0.025% | 0.379% | 0.029% | 0.008% |
| pWISE10648 | 629 | 0.010% | 0.049% | 0.029% | 0.038% | 0.168% | 0.032% | 0.020% |
| pWISE10649 | 630 | 0.017% | 0.056% | 0.029% | 0.010% | 0.306% | 0.087% | 0.019% |
| pWISE10650 | 631 | 0.019% | 0.078% | 0.077% | 0.031% | 0.565% | 0.135% | 0.025% |
| pWISE10651 | 632 | 0.030% | 0.063% | 0.034% | 0.011% | 0.740% | 0.152% | 0.056% |
| pWISE10652 | 633 | 0.023% | 0.037% | 0.051% | 0.050% | 0.541% | 0.200% | 0.030% |
| pWISE10658 | 639 | 0.011% | 0.064% | 0.025% | 0.020% | 0.496% | 0.023% | 0.019% |
| pWISE10653 | 634 | 0.010% | 0.035% | 0.046% | 0.026% | 0.533% | 0.038% | 0.013% |
| pWISE10654 | 635 | 0.012% | 0.050% | 0.056% | 0.025% | 0.567% | 0.055% | 0.025% |
| pWISE10655 | 636 | 0.013% | 0.073% | 0.035% | 0.055% | 1.195% | 0.137% | 0.036% |
| pWISE10656 | 637 | 0.007% | 0.025% | 0.035% | 0.018% | 0.818% | 0.209% | 0.025% |
| pWISE10657 | 638 | 0.008% | 0.055% | 0.045% | 0.020% | 0.939% | 0.249% | 0.044% |

TABLE 79

| | | Average G to A editing percent at the nucleotides | | | | | | |
|---|---|---|---|---|---|---|---|---|
| | | numbered according to the position in the PWsp133 spacer | | | | | | |
| | Protein | sequence on the opposite, target genomic DNA strand | | | | | | |
| pWISE | SEQ ID NO: | G.-9 | G.-8 | G.-6 | G.3 | G.4 | G.6 | G.7 |
| pWISE121 | 56 | 0.006% | 0.020% | 0.022% | 0.128% | 0.127% | 0.173% | 0.131% |
| pWISE9120 | 453 | 0.004% | 0.004% | 0.007% | 0.033% | 0.044% | 0.013% | 0.045% |
| pWISE10648 | 629 | 0.003% | 0.005% | 0.002% | 0.030% | 0.044% | 0.013% | 0.044% |
| pWISE10649 | 630 | 0.003% | 0.005% | 0.004% | 0.034% | 0.057% | 0.019% | 0.065% |
| pWISE10650 | 631 | 0.001% | 0.004% | 0.015% | 0.016% | 0.064% | 0.005% | 0.055% |
| pWISE10651 | 632 | 0.004% | 0.006% | 0.018% | 0.037% | 0.064% | 0.016% | 0.068% |
| pWISE10652 | 633 | 0.002% | 0.005% | 0.003% | 0.013% | 0.026% | 0.013% | 0.049% |
| pWISE10658 | 639 | 0.008% | 0.001% | 0.008% | 0.013% | 0.033% | 0.011% | 0.040% |
| pWISE10653 | 634 | 0.002% | 0.004% | 0.014% | 0.011% | 0.042% | 0.009% | 0.061% |
| pWISE10654 | 635 | 0.006% | 0.010% | 0.009% | 0.036% | 0.068% | 0.005% | 0.039% |
| pWISE10655 | 636 | 0.004% | 0.002% | 0.007% | 0.016% | 0.031% | 0.009% | 0.043% |
| pWISE10656 | 637 | 0.003% | 0.006% | 0.010% | 0.018% | 0.032% | 0.004% | 0.034% |
| pWISE10657 | 638 | 0.007% | 0.004% | 0.007% | 0.015% | 0.020% | 0.005% | 0.031% |

| | | Average G to A editing percent at the nucleotides | | | | | |
|---|---|---|---|---|---|---|---|
| | | numbered according to the position in the PWsp133 spacer | | | | | |
| | Protein | sequence on the opposite, target genomic DNA strand | | | | | |
| pWISE | SEQ ID NO: | G.10 | G.12 | G.15 | G.16 | G.22 | G.26 |
| pWISE121 | 56 | 0.171% | 0.263% | 0.737% | 1.561% | 0.321% | 0.065% |
| pWISE9120 | 453 | 3.694% | 4.314% | 2.470% | 2.091% | 2.252% | 0.280% |
| pWISE10648 | 629 | 1.359% | 2.899% | 2.006% | 1.700% | 1.659% | 0.246% |
| pWISE10649 | 630 | 1.344% | 3.271% | 2.224% | 1.861% | 2.403% | 0.298% |
| pWISE10650 | 631 | 1.453% | 3.751% | 2.751% | 2.324% | 3.657% | 0.492% |
| pWISE10651 | 632 | 1.089% | 2.386% | 1.794% | 1.512% | 3.057% | 0.473% |
| pWISE10652 | 633 | 0.626% | 1.462% | 1.169% | 0.980% | 2.523% | 0.486% |
| pWISE10658 | 639 | 6.851% | 7.752% | 5.354% | 4.701% | 4.565% | 0.483% |
| pWISE10653 | 634 | 3.298% | 6.114% | 4.332% | 3.691% | 3.513% | 0.252% |
| pWISE10654 | 635 | 4.019% | 8.284% | 5.971% | 5.023% | 5.746% | 0.644% |
| pWISE10655 | 636 | 3.151% | 6.759% | 4.916% | 4.235% | 5.713% | 0.610% |
| pWISE10656 | 637 | 2.221% | 4.167% | 3.230% | 2.818% | 4.490% | 0.448% |
| pWISE10657 | 638 | 1.446% | 2.598% | 2.309% | 2.002% | 3.808% | 0.437% |

TABLE 80

| | | Standard deviation of the average G to A editing percent at the | | | | | | |
|---|---|---|---|---|---|---|---|---|
| | | nucleotides numbered according to the position in the PWsp133 | | | | | | |
| | Protein SEQ | spacer sequence on the opposite, target genomic DNA strand | | | | | | |
| pWISE | ID NO: | G.-9 | G.-8 | G.-6 | G.3 | G.4 | G.6 | G.7 |
| pWISE121 | 56 | 0.004% | 0.016% | 0.011% | 0.023% | 0.041% | 0.044% | 0.044% |
| pWISE9120 | 453 | 0.005% | 0.003% | 0.006% | 0.023% | 0.035% | 0.009% | 0.022% |
| pWISE10648 | 629 | 0.005% | 0.005% | 0.001% | 0.025% | 0.025% | 0.013% | 0.032% |
| pWISE10649 | 630 | 0.003% | 0.005% | 0.003% | 0.048% | 0.040% | 0.016% | 0.030% |
| pWISE10650 | 631 | 0.002% | 0.002% | 0.011% | 0.009% | 0.039% | 0.005% | 0.026% |
| pWISE10651 | 632 | 0.004% | 0.004% | 0.016% | 0.025% | 0.027% | 0.022% | 0.028% |
| pWISE10652 | 633 | 0.002% | 0.006% | 0.005% | 0.015% | 0.014% | 0.015% | 0.027% |
| pWISE10658 | 639 | 0.007% | 0.002% | 0.004% | 0.014% | 0.017% | 0.009% | 0.030% |
| pWISE10653 | 634 | 0.003% | 0.002% | 0.016% | 0.009% | 0.030% | 0.005% | 0.014% |
| pWISE10654 | 635 | 0.014% | 0.013% | 0.009% | 0.032% | 0.054% | 0.007% | 0.035% |
| pWISE10655 | 636 | 0.002% | 0.004% | 0.007% | 0.013% | 0.027% | 0.007% | 0.026% |
| pWISE10656 | 637 | 0.002% | 0.005% | 0.008% | 0.017% | 0.011% | 0.004% | 0.031% |
| pWISE10657 | 638 | 0.008% | 0.004% | 0.006% | 0.014% | 0.022% | 0.003% | 0.021% |

| | |
|---|---|
| | Standard deviation of the average G to A editing percent at the |
| | nucleotides numbered according to the position in the PWsp133 |
| Protein SEQ | spacer sequence on the opposite, target genomic DNA strand |

| pWISE | ID NO: | G.10 | G.12 | G.15 | G.16 | G.22 | G.26 |
|---|---|---|---|---|---|---|---|
| pWISE121 | 56 | 0.043% | 0.062% | 0.111% | 0.146% | 0.068% | 0.028% |
| pWISE9120 | 453 | 0.396% | 0.421% | 0.142% | 0.103% | 0.360% | 0.074% |
| pWISE10648 | 629 | 0.202% | 0.235% | 0.141% | 0.136% | 0.178% | 0.119% |
| pWISE10649 | 630 | 0.204% | 0.327% | 0.315% | 0.393% | 0.386% | 0.085% |
| pWISE10650 | 631 | 0.317% | 0.582% | 0.423% | 0.350% | 0.561% | 0.071% |
| pWISE10651 | 632 | 0.144% | 0.261% | 0.249% | 0.250% | 0.394% | 0.100% |
| pWISE10652 | 633 | 0.096% | 0.149% | 0.162% | 0.124% | 0.394% | 0.204% |
| pWISE10658 | 639 | 1.011% | 1.134% | 0.645% | 0.606% | 0.543% | 0.120% |
| pWISE10653 | 634 | 0.342% | 0.648% | 0.341% | 0.375% | 0.507% | 0.080% |
| pWISE10654 | 635 | 0.468% | 1.037% | 0.684% | 0.570% | 0.753% | 0.192% |
| pWISE10655 | 636 | 0.426% | 0.900% | 0.696% | 0.657% | 1.047% | 0.148% |
| pWISE10656 | 637 | 0.253% | 0.662% | 0.464% | 0.381% | 0.534% | 0.098% |
| pWISE10657 | 638 | 0.118% | 0.344% | 0.416% | 0.346% | 0.705% | 0.134% |

TABLE 81

| | | Average C to T editing percent at the nucleotides numbered | | | | | |
|---|---|---|---|---|---|---|---|
| | | according to the position in the PWsp3627 spacer sequence on the | | | | | |
| | Protein SEQ | non-target, genomic DNA strand | | | | | |
| pWISE | ID NO: | C.-7 | C.-6 | C.-4 | C.-1 | C.13 | C.18 |
| pWISE121 | 56 | 0.026% | 0.032% | 0.013% | 0.037% | 0.392% | 2.274% |
| pWISE9120 | 453 | 0.007% | 0.002% | 0.000% | 0.290% | 3.725% | 1.194% |
| pWISE10648 | 629 | 0.003% | 0.007% | 0.004% | 0.124% | 0.888% | 0.312% |
| pWISE10649 | 630 | 0.003% | 0.003% | 0.002% | 0.095% | 0.592% | 0.450% |
| pWISE10650 | 631 | 0.006% | 0.004% | 0.005% | 0.163% | 0.828% | 0.639% |
| pWISE10651 | 632 | 0.003% | 0.007% | 0.010% | 0.152% | 1.096% | 0.939% |
| pWISE10652 | 633 | 0.001% | 0.003% | 0.003% | 0.281% | 0.966% | 0.540% |
| pWISE10658 | 639 | 0.003% | 0.006% | 0.003% | 0.258% | 1.580% | 0.542% |
| pWISE10653 | 634 | 0.003% | 0.012% | 0.003% | 0.190% | 1.137% | 0.712% |
| pWISE10654 | 635 | 0.004% | 0.005% | 0.005% | 0.181% | 0.927% | 1.052% |
| pWISE10655 | 636 | 0.002% | 0.007% | 0.004% | 0.286% | 1.137% | 1.809% |
| pWISE10656 | 637 | 0.007% | 0.008% | 0.001% | 0.250% | 1.092% | 1.698% |
| pWISE10657 | 638 | 0.002% | 0.004% | 0.000% | 0.244% | 1.298% | 1.160% |

| | | Average C to T editing percent at the nucleotides | | | | |
|---|---|---|---|---|---|---|
| | | numbered according to the position in the PWsp3627 | | | | |
| | Protein SEQ | spacer sequence on the non-target, genomic DNA strand | | | | |
| pWISE | ID NO: | C.19 | C.20 | C.24 | C.26 | C.30 |
| pWISE121 | 56 | 1.031% | 0.457% | 0.374% | 0.460% | 0.156% |
| pWISE9120 | 453 | 1.581% | 2.294% | 0.840% | 0.103% | 0.024% |
| pWISE10648 | 629 | 0.607% | 0.858% | 0.583% | 0.080% | 0.009% |
| pWISE10649 | 630 | 0.915% | 1.540% | 1.144% | 0.350% | 0.153% |
| pWISE10650 | 631 | 1.349% | 2.144% | 1.592% | 0.392% | 0.072% |
| pWISE10651 | 632 | 1.895% | 3.064% | 2.514% | 0.699% | 0.107% |
| pWISE10652 | 633 | 1.234% | 2.433% | 1.942% | 0.608% | 0.073% |
| pWISE10658 | 639 | 1.201% | 1.704% | 0.904% | 0.094% | 0.038% |
| pWISE10653 | 634 | 1.280% | 1.727% | 0.856% | 0.167% | 0.038% |
| pWISE10654 | 635 | 1.819% | 2.501% | 1.521% | 0.354% | 0.076% |
| pWISE10655 | 636 | 2.850% | 3.592% | 2.392% | 0.616% | 0.122% |
| pWISE10656 | 637 | 2.612% | 3.246% | 2.164% | 0.680% | 0.152% |
| pWISE10657 | 638 | 1.827% | 3.074% | 1.804% | 0.503% | 0.119% |

TABLE 82

| | | Standard Deviation of the average editing percent at the | | | | | |
|---|---|---|---|---|---|---|---|
| | | nucleotides numbered according to the position in the PWsp3627 | | | | | |
| | Protein SEQ | spacer sequence on the non-target, genomic DNA strand | | | | | |
| pWISE | ID NO: | C.-7 | C.-6 | C.-4 | C.-1 | C.13 | C.18 |
| pWISE121 | 56 | 0.029% | 0.031% | 0.016% | 0.029% | 0.120% | 0.782% |
| pWISE9120 | 453 | 0.005% | 0.002% | 0.001% | 0.158% | 1.204% | 0.422% |
| pWISE10648 | 629 | 0.002% | 0.007% | 0.007% | 0.055% | 0.446% | 0.194% |
| pWISE10649 | 630 | 0.002% | 0.003% | 0.004% | 0.065% | 0.254% | 0.276% |
| pWISE10650 | 631 | 0.005% | 0.005% | 0.004% | 0.077% | 0.335% | 0.355% |
| pWISE10651 | 632 | 0.003% | 0.007% | 0.013% | 0.106% | 0.301% | 0.430% |
| pWISE10652 | 633 | 0.002% | 0.002% | 0.002% | 0.099% | 0.584% | 0.295% |
| pWISE10658 | 639 | 0.004% | 0.003% | 0.005% | 0.132% | 0.513% | 0.241% |
| pWISE10653 | 634 | 0.004% | 0.014% | 0.004% | 0.110% | 0.362% | 0.293% |
| pWISE10654 | 635 | 0.004% | 0.003% | 0.006% | 0.086% | 0.414% | 0.666% |
| pWISE10655 | 636 | 0.002% | 0.005% | 0.008% | 0.175% | 0.393% | 0.721% |
| pWISE10656 | 637 | 0.010% | 0.012% | 0.003% | 0.106% | 0.365% | 0.987% |
| pWISE10657 | 638 | 0.002% | 0.006% | 0.001% | 0.125% | 0.510% | 0.674% |

| | | Standard Deviation of the average editing percent at the | | | | |
|---|---|---|---|---|---|---|
| | | nucleotides numbered according to the position in the PWsp3627 | | | | |
| | Protein SEQ | spacer sequence on the non-target, genomic DNA strand | | | | |
| pWISE | ID NO: | C.19 | C.20 | C.24 | C.26 | C.30 |
| pWISE121 | 56 | 0.374% | 0.189% | 0.139% | 0.170% | 0.097% |
| pWISE9120 | 453 | 0.562% | 0.874% | 0.407% | 0.063% | 0.021% |
| pWISE10648 | 629 | 0.356% | 0.485% | 0.362% | 0.056% | 0.009% |
| pWISE10649 | 630 | 0.591% | 0.777% | 0.513% | 0.178% | 0.219% |
| pWISE10650 | 631 | 0.778% | 1.206% | 0.880% | 0.223% | 0.045% |
| pWISE10651 | 632 | 0.842% | 1.280% | 1.181% | 0.371% | 0.083% |
| pWISE10652 | 633 | 0.798% | 1.418% | 1.200% | 0.470% | 0.050% |
| pWISE10658 | 639 | 0.540% | 0.827% | 0.456% | 0.062% | 0.018% |
| pWISE10653 | 634 | 0.440% | 0.623% | 0.305% | 0.069% | 0.030% |
| pWISE10654 | 635 | 1.082% | 1.501% | 0.910% | 0.214% | 0.084% |
| pWISE10655 | 636 | 1.232% | 1.597% | 1.170% | 0.275% | 0.060% |
| pWISE10656 | 637 | 1.415% | 1.700% | 1.149% | 0.378% | 0.094% |
| pWISE10657 | 638 | 1.065% | 1.823% | 1.029% | 0.295% | 0.083% |

TABLE 83

| | | Average G to A editing percent at the nucleotides numbered | | | | | | |
|---|---|---|---|---|---|---|---|---|
| | | according to the position in the PWsp3627 spacer sequence on the | | | | | | |
| | Protein SEQ | opposite, target genomic DNA strand | | | | | | |
| pWISE | ID NO: | G.-9 | G.-8 | G.2 | G.3 | G.5 | G.6 | G.8 |
| pWISE121 | 56 | 0.018% | 0.036% | 0.043% | 0.070% | 0.062% | 0.078% | 0.183% |
| pWISE9120 | 453 | 0.030% | 0.020% | 0.016% | 0.020% | 0.021% | 0.043% | 0.325% |
| pWISE10648 | 629 | 0.035% | 0.023% | 0.023% | 0.075% | 0.032% | 0.081% | 0.302% |
| pWISE10649 | 630 | 0.026% | 0.010% | 0.020% | 0.029% | 0.017% | 0.028% | 0.414% |
| pWISE10650 | 631 | 0.033% | 0.008% | 0.043% | 0.070% | 0.049% | 0.078% | 0.888% |
| pWISE10651 | 632 | 0.023% | 0.009% | 0.045% | 0.055% | 0.040% | 0.129% | 0.846% |
| pWISE10652 | 633 | 0.022% | 0.005% | 0.059% | 0.063% | 0.068% | 0.102% | 0.527% |
| pWISE10658 | 639 | 0.059% | 0.025% | 0.044% | 0.036% | 0.018% | 0.083% | 0.591% |
| pWISE10653 | 634 | 0.029% | 0.025% | 0.017% | 0.032% | 0.021% | 0.069% | 0.620% |
| pWISE10654 | 635 | 0.038% | 0.003% | 0.057% | 0.078% | 0.047% | 0.072% | 1.219% |
| pWISE10655 | 636 | 0.045% | 0.009% | 0.030% | 0.049% | 0.038% | 0.099% | 1.977% |
| pWISE10656 | 637 | 0.021% | 0.006% | 0.042% | 0.050% | 0.034% | 0.079% | 1.496% |
| pWISE10657 | 638 | 0.034% | 0.025% | 0.023% | 0.026% | 0.031% | 0.064% | 1.147% |

| | | Average G to A editing percent at the nucleotides numbered | | | | | |
|---|---|---|---|---|---|---|---|
| | | according to the position in the PWsp3627 spacer sequence on the | | | | | |
| | Protein SEQ | opposite, target genomic DNA strand | | | | | |
| pWISE | ID NO: | G.9 | G.14 | G.15 | G.28 | G.32 | G.33 |
| pWISE121 | 56 | 0.112% | 0.431% | 1.056% | 0.287% | 0.193% | 0.061% |
| pWISE9120 | 453 | 2.809% | 9.481% | 9.716% | 5.186% | 0.450% | 0.275% |
| pWISE10648 | 629 | 1.317% | 6.833% | 6.872% | 3.786% | 0.368% | 0.211% |
| pWISE10649 | 630 | 1.126% | 8.696% | 8.858% | 5.633% | 0.574% | 0.343% |
| pWISE10650 | 631 | 1.590% | 11.884% | 12.370% | 8.012% | 0.864% | 0.477% |
| pWISE10651 | 632 | 1.768% | 14.517% | 15.365% | 10.011% | 1.160% | 0.816% |
| pWISE10652 | 633 | 1.114% | 9.031% | 9.961% | 7.787% | 0.791% | 0.399% |
| pWISE10658 | 639 | 1.944% | 15.885% | 16.085% | 7.953% | 0.892% | 0.538% |
| pWISE10653 | 634 | 1.495% | 14.954% | 15.111% | 7.053% | 0.522% | 0.301% |
| pWISE10654 | 635 | 2.040% | 16.807% | 17.108% | 9.331% | 1.005% | 0.527% |
| pWISE10655 | 636 | 2.917% | 23.470% | 24.197% | 13.347% | 1.191% | 0.744% |
| pWISE10656 | 637 | 2.195% | 18.804% | 19.936% | 10.528% | 0.990% | 0.554% |
| pWISE10657 | 638 | 1.850% | 15.529% | 17.076% | 10.371% | 0.970% | 0.513% |

TABLE 84

| | | Standard deviation of the average G to A editing percent at the | | | | | | |
|---|---|---|---|---|---|---|---|---|
| | | nucleotides numbered according to the position in the PWsp3627 | | | | | | |
| | Protein SEQ | spacer sequence on the opposite, target genomic DNA strand | | | | | | |
| pWISE | ID NO: | G.-9 | G.-8 | G.2 | G.3 | G.5 | G.6 | G.8 |
| pWISE121 | 56 | 0.021% | 0.030% | 0.027% | 0.048% | 0.041% | 0.038% | 0.101% |
| pWISE9120 | 453 | 0.018% | 0.010% | 0.017% | 0.019% | 0.009% | 0.035% | 0.121% |
| pWISE10648 | 629 | 0.015% | 0.015% | 0.023% | 0.038% | 0.024% | 0.050% | 0.157% |
| pWISE10649 | 630 | 0.019% | 0.006% | 0.022% | 0.023% | 0.013% | 0.024% | 0.324% |
| pWISE10650 | 631 | 0.022% | 0.003% | 0.046% | 0.070% | 0.041% | 0.051% | 0.596% |
| pWISE10651 | 632 | 0.013% | 0.010% | 0.048% | 0.045% | 0.052% | 0.122% | 0.289% |
| pWISE10652 | 633 | 0.011% | 0.004% | 0.071% | 0.072% | 0.073% | 0.068% | 0.317% |
| pWISE10658 | 639 | 0.067% | 0.022% | 0.062% | 0.021% | 0.017% | 0.037% | 0.227% |
| pWISE10653 | 634 | 0.020% | 0.017% | 0.007% | 0.021% | 0.021% | 0.033% | 0.221% |
| pWISE10654 | 635 | 0.033% | 0.003% | 0.041% | 0.057% | 0.048% | 0.042% | 0.608% |
| pWISE10655 | 636 | 0.026% | 0.010% | 0.022% | 0.029% | 0.026% | 0.038% | 0.924% |
| pWISE10656 | 637 | 0.024% | 0.005% | 0.030% | 0.030% | 0.028% | 0.036% | 0.674% |
| pWISE10657 | 638 | 0.028% | 0.040% | 0.016% | 0.019% | 0.027% | 0.030% | 0.659% |

| | |
|---|---|
| | Standard deviation of the average G to A editing percent at the |
| | nucleotides numbered according to the position in the PWsp3627 |
| Protein SEQ | spacer sequence on the opposite, target genomic DNA strand |

| pWISE | ID NO: | G.9 | G.14 | G.15 | G.28 | G.32 | G.33 |
|---|---|---|---|---|---|---|---|
| pWISE121 | 56 | 0.028% | 0.162% | 0.390% | 0.159% | 0.051% | 0.047% |
| pWISE9120 | 453 | 1.161% | 4.267% | 4.398% | 2.476% | 0.248% | 0.180% |
| pWISE10648 | 629 | 0.765% | 3.843% | 3.847% | 2.320% | 0.338% | 0.180% |
| pWISE10649 | 630 | 0.802% | 4.336% | 4.682% | 2.972% | 0.470% | 0.280% |
| pWISE10650 | 631 | 0.930% | 6.925% | 7.214% | 4.923% | 0.670% | 0.386% |
| pWISE10651 | 632 | 0.693% | 6.888% | 7.233% | 4.865% | 0.834% | 0.902% |
| pWISE10652 | 633 | 0.625% | 5.069% | 5.715% | 4.656% | 0.587% | 0.331% |
| pWISE10658 | 639 | 0.836% | 8.405% | 8.517% | 4.361% | 0.665% | 0.418% |
| pWISE10653 | 634 | 0.580% | 6.482% | 6.546% | 3.282% | 0.309% | 0.214% |
| pWISE10654 | 635 | 1.047% | 10.674% | 10.877% | 6.122% | 0.845% | 0.459% |
| pWISE10655 | 636 | 1.199% | 10.541% | 10.733% | 6.567% | 0.820% | 0.483% |
| pWISE10656 | 637 | 0.968% | 9.861% | 10.487% | 6.010% | 0.703% | 0.396% |
| pWISE10657 | 638 | 1.035% | 8.674% | 9.631% | 6.156% | 0.724% | 0.386% |

TABLE 85

| | | Average C to T editing percent at the nucleotides numbered | | | | | |
|---|---|---|---|---|---|---|---|
| | | according to the position in the PWsp3628 spacer sequence on the | | | | | |
| | Protein SEQ | non-target, genomic DNA strand | | | | | |
| pWISE | ID NO: | C.-9 | C.-7 | C.-1 | C.1 | C.2 | C.3 |
| pWISE121 | 56 | 0.016% | 0.024% | 0.025% | 0.014% | 0.023% | 0.105% |
| pWISE9120 | 453 | 0.014% | 0.027% | 0.031% | 0.015% | 0.016% | 0.038% |
| pWISE10648 | 629 | 0.004% | 0.008% | 0.006% | 0.003% | 0.007% | 0.064% |
| pWISE10649 | 630 | 0.008% | 0.028% | 0.012% | 0.011% | 0.010% | 0.096% |
| pWISE10650 | 631 | 0.007% | 0.050% | 0.009% | 0.006% | 0.005% | 0.053% |
| pWISE10651 | 632 | 0.007% | 0.033% | 0.050% | 0.029% | 0.019% | 0.076% |
| pWISE10652 | 633 | 0.006% | 0.026% | 0.039% | 0.004% | 0.006% | 0.060% |
| pWISE10658 | 639 | 0.012% | 0.018% | 0.008% | 0.004% | 0.001% | 0.093% |
| pWISE10653 | 634 | 0.003% | 0.013% | 0.014% | 0.012% | 0.009% | 0.060% |
| pWISE10654 | 635 | 0.002% | 0.017% | 0.022% | 0.004% | 0.005% | 0.015% |
| pWISE10655 | 636 | 0.012% | 0.033% | 0.025% | 0.008% | 0.005% | 0.060% |
| pWISE10656 | 637 | 0.002% | 0.025% | 0.021% | 0.007% | 0.004% | 0.062% |
| pWISE10657 | 638 | 0.006% | 0.020% | 0.010% | 0.007% | 0.002% | 0.060% |

| | | Average C to T editing percent at the nucleotides numbered | | | | |
|---|---|---|---|---|---|---|
| | | according to the position in the PWsp3628 spacer sequence on | | | | |
| | Protein SEQ | the non-target, genomic DNA strand | | | | |
| pWISE | ID NO: | C.8 | C.13 | C.17 | C.31 | C.32 |
| pWISE121 | 56 | 0.068% | 0.146% | 1.093% | 0.147% | 0.104% |
| pWISE9120 | 453 | 1.396% | 1.449% | 0.407% | 0.004% | 0.023% |
| pWISE10648 | 629 | 0.039% | 0.081% | 0.038% | 0.001% | 0.023% |
| pWISE10649 | 630 | 0.020% | 0.058% | 0.019% | 0.013% | 0.032% |
| pWISE10650 | 631 | 0.027% | 0.057% | 0.015% | 0.006% | 0.010% |
| pWISE10651 | 632 | 0.042% | 0.089% | 0.048% | 0.006% | 0.021% |
| pWISE10652 | 633 | 0.018% | 0.031% | 0.008% | 0.003% | 0.033% |
| pWISE10658 | 639 | 0.069% | 0.138% | 0.051% | 0.005% | 0.036% |
| pWISE10653 | 634 | 0.068% | 0.089% | 0.087% | 0.003% | 0.023% |
| pWISE10654 | 635 | 0.056% | 0.066% | 0.090% | 0.005% | 0.034% |
| pWISE10655 | 636 | 0.018% | 0.070% | 0.030% | 0.003% | 0.054% |
| pWISE10656 | 637 | 0.045% | 0.053% | 0.021% | 0.004% | 0.030% |
| pWISE10657 | 638 | 0.017% | 0.060% | 0.005% | 0.002% | 0.065% |

TABLE 86

| | | Standard Deviation of the average editing percent at the | | | | | |
|---|---|---|---|---|---|---|---|
| | | nucleotides numbered according to the position in the PWsp3628 | | | | | |
| | Protein SEQ | spacer sequence on the non-target, genomic DNA strand | | | | | |
| pWISE | ID NO: | C.-9 | C.-7 | C.-1 | C.1 | C.2 | C.3 |
| pWISE121 | 56 | 0.016% | 0.021% | 0.030% | 0.013% | 0.018% | 0.072% |
| pWISE9120 | 453 | 0.020% | 0.020% | 0.018% | 0.016% | 0.018% | 0.031% |
| pWISE10648 | 629 | 0.004% | 0.007% | 0.006% | 0.003% | 0.005% | 0.113% |
| pWISE10649 | 630 | 0.014% | 0.021% | 0.013% | 0.016% | 0.016% | 0.128% |
| pWISE10650 | 631 | 0.007% | 0.056% | 0.009% | 0.005% | 0.004% | 0.090% |
| pWISE10651 | 632 | 0.008% | 0.036% | 0.044% | 0.025% | 0.016% | 0.093% |
| pWISE10652 | 633 | 0.005% | 0.030% | 0.049% | 0.004% | 0.004% | 0.077% |
| pWISE10658 | 639 | 0.012% | 0.009% | 0.008% | 0.003% | 0.001% | 0.107% |
| pWISE10653 | 634 | 0.003% | 0.011% | 0.018% | 0.008% | 0.009% | 0.097% |
| pWISE10654 | 635 | 0.002% | 0.018% | 0.024% | 0.004% | 0.004% | 0.014% |
| pWISE10655 | 636 | 0.017% | 0.032% | 0.026% | 0.008% | 0.004% | 0.072% |
| pWISE10656 | 637 | 0.002% | 0.037% | 0.013% | 0.005% | 0.003% | 0.063% |
| pWISE10657 | 638 | 0.006% | 0.018% | 0.014% | 0.011% | 0.002% | 0.078% |

| | | Standard Deviation of the average editing percent at the | | | | |
|---|---|---|---|---|---|---|
| | | nucleotides numbered according to the position in the PWsp3628 | | | | |
| | Protein SEQ | spacer sequence on the non-target, genomic DNA strand | | | | |
| pWISE | ID NO: | C.8 | C.13 | C.17 | C.31 | C.32 |
| pWISE121 | 56 | 0.076% | 0.131% | 0.740% | 0.112% | 0.090% |
| pWISE9120 | 453 | 0.423% | 0.458% | 0.139% | 0.004% | 0.020% |
| pWISE10648 | 629 | 0.027% | 0.042% | 0.028% | 0.001% | 0.025% |
| pWISE10649 | 630 | 0.010% | 0.055% | 0.020% | 0.027% | 0.024% |
| pWISE10650 | 631 | 0.025% | 0.029% | 0.008% | 0.006% | 0.012% |
| pWISE10651 | 632 | 0.033% | 0.053% | 0.036% | 0.008% | 0.017% |
| pWISE10652 | 633 | 0.020% | 0.030% | 0.006% | 0.004% | 0.053% |
| pWISE10658 | 639 | 0.033% | 0.118% | 0.029% | 0.005% | 0.028% |
| pWISE10653 | 634 | 0.036% | 0.062% | 0.035% | 0.003% | 0.018% |
| pWISE10654 | 635 | 0.036% | 0.047% | 0.064% | 0.005% | 0.033% |
| pWISE10655 | 636 | 0.009% | 0.035% | 0.038% | 0.003% | 0.043% |
| pWISE10656 | 637 | 0.021% | 0.025% | 0.024% | 0.005% | 0.033% |
| pWISE10657 | 638 | 0.015% | 0.044% | 0.005% | 0.003% | 0.085% |

TABLE 87

| | | Average G to A editing percent at the nucleotides numbered | | | | | |
|---|---|---|---|---|---|---|---|
| | | according to the position in the PWsp3628 spacer sequence on the | | | | | |
| | Protein SEQ | opposite, target genomic DNA strand | | | | | |
| pWISE | ID NO: | G.-6 | G.-5 | G.6 | G.7 | G.10 | G.12 |
| pWISE121 | 56 | 0.008% | 0.011% | 0.083% | 0.042% | 0.118% | 0.082% |
| pWISE9120 | 453 | 0.010% | 0.003% | 0.003% | 0.002% | 2.155% | 1.054% |
| pWISE10648 | 629 | 0.012% | 0.003% | 0.006% | 0.006% | 0.819% | 0.545% |
| pWISE10649 | 630 | 0.004% | 0.002% | 0.002% | 0.002% | 1.133% | 0.747% |
| pWISE10650 | 631 | 0.006% | 0.002% | 0.003% | 0.012% | 1.107% | 0.699% |
| pWISE10651 | 632 | 0.004% | 0.003% | 0.006% | 0.003% | 1.400% | 0.686% |
| pWISE10652 | 633 | 0.012% | 0.003% | 0.003% | 0.005% | 0.908% | 0.405% |
| pWISE10658 | 639 | 0.010% | 0.006% | 0.006% | 0.007% | 3.508% | 1.566% |
| pWISE10653 | 634 | 0.006% | 0.002% | 0.002% | 0.003% | 1.609% | 0.921% |
| pWISE10654 | 635 | 0.005% | 0.006% | 0.004% | 0.007% | 2.585% | 1.535% |
| pWISE10655 | 636 | 0.019% | 0.004% | 0.006% | 0.003% | 2.102% | 1.079% |
| pWISE10656 | 637 | 0.009% | 0.004% | 0.003% | 0.013% | 1.866% | 0.763% |
| pWISE10657 | 638 | 0.013% | 0.002% | 0.004% | 0.006% | 1.295% | 0.385% |
| | | Average G to A editing percent at the nucleotides numbered | | | | | |
| | | according to the position in the PWsp3628 spacer sequence on the | | | | | |
| | Protein SEQ | opposite, target genomic DNA strand | | | | | |
| pWISE | ID NO: | G.15 | G.16 | G.19 | G.20 | G.21 | G.23 |
| pWISE121 | 56 | 0.250% | 0.227% | 0.211% | 0.333% | 0.416% | 0.334% |
| pWISE9120 | 453 | 0.289% | 0.251% | 0.369% | 0.263% | 0.283% | 0.274% |
| pWISE10648 | 629 | 0.255% | 0.239% | 0.300% | 0.228% | 0.286% | 0.233% |
| pWISE10649 | 630 | 0.201% | 0.169% | 0.237% | 0.154% | 0.193% | 0.155% |
| pWISE10650 | 631 | 0.153% | 0.132% | 0.169% | 0.117% | 0.191% | 0.130% |
| pWISE10651 | 632 | 0.149% | 0.129% | 0.195% | 0.116% | 0.172% | 0.177% |
| pWISE10652 | 633 | 0.060% | 0.042% | 0.082% | 0.057% | 0.139% | 0.082% |
| pWISE10658 | 639 | 0.665% | 0.606% | 0.595% | 0.418% | 0.396% | 0.470% |
| pWISE10653 | 634 | 0.407% | 0.378% | 0.423% | 0.315% | 0.347% | 0.298% |
| pWISE10654 | 635 | 0.585% | 0.528% | 0.618% | 0.442% | 0.441% | 0.410% |
| pWISE10655 | 636 | 0.498% | 0.428% | 0.453% | 0.339% | 0.330% | 0.325% |
| pWISE10656 | 637 | 0.312% | 0.302% | 0.411% | 0.253% | 0.207% | 0.291% |
| pWISE10657 | 638 | 0.304% | 0.308% | 0.316% | 0.243% | 0.265% | 0.233% |
| | | Average G to A editing percent at the nucleotides numbered | | | | | |
| | | according to the position in the PWsp3628 spacer sequence on the | | | | | |
| | Protein SEQ | opposite, target genomic DNA strand | | | | | |
| pWISE | ID NO: | G.24 | G.25 | G.26 | G.27 | G.29 | G.30 |
| pWISE121 | 56 | 0.272% | 0.214% | 0.177% | 0.206% | 0.336% | 0.129% |
| pWISE9120 | 453 | 0.260% | 0.266% | 0.283% | 0.366% | 0.081% | 0.055% |
| pWISE10648 | 629 | 0.234% | 0.234% | 0.251% | 0.337% | 0.122% | 0.091% |
| pWISE10649 | 630 | 0.144% | 0.145% | 0.152% | 0.206% | 0.061% | 0.042% |
| pWISE10650 | 631 | 0.129% | 0.135% | 0.163% | 0.202% | 0.074% | 0.054% |
| pWISE10651 | 632 | 0.161% | 0.167% | 0.192% | 0.266% | 0.077% | 0.071% |
| pWISE10652 | 633 | 0.078% | 0.082% | 0.088% | 0.102% | 0.057% | 0.054% |
| pWISE10658 | 639 | 0.403% | 0.394% | 0.413% | 0.504% | 0.148% | 0.131% |
| pWISE10653 | 634 | 0.279% | 0.282% | 0.298% | 0.331% | 0.100% | 0.048% |
| pWISE10654 | 635 | 0.392% | 0.387% | 0.399% | 0.507% | 0.147% | 0.097% |
| pWISE10655 | 636 | 0.288% | 0.289% | 0.311% | 0.387% | 0.097% | 0.062% |
| pWISE10656 | 637 | 0.243% | 0.222% | 0.268% | 0.340% | 0.100% | 0.068% |
| pWISE10657 | 638 | 0.209% | 0.204% | 0.246% | 0.289% | 0.124% | 0.109% |

TABLE 88

| | | Standard deviation of the average G to A editing percent at the | | | | | |
|---|---|---|---|---|---|---|---|
| | | nucleotides numbered according to the position in the PWsp3628 | | | | | |
| | Protein SEQ | spacer sequence on the opposite, target genomic DNA strand | | | | | |
| pWISE | ID NO: | G.-6 | G.-5 | G.6 | G.7 | G.10 | G.12 |
| pWISE121 | 56 | 0.012% | 0.023% | 0.077% | 0.058% | 0.087% | 0.082% |
| pWISE9120 | 453 | 0.010% | 0.005% | 0.002% | 0.003% | 1.025% | 0.513% |
| pWISE10648 | 629 | 0.016% | 0.003% | 0.010% | 0.003% | 0.334% | 0.228% |
| pWISE10649 | 630 | 0.005% | 0.003% | 0.001% | 0.002% | 0.579% | 0.388% |
| pWISE10650 | 631 | 0.004% | 0.002% | 0.003% | 0.019% | 0.960% | 0.621% |
| pWISE10651 | 632 | 0.005% | 0.005% | 0.005% | 0.003% | 0.621% | 0.352% |
| pWISE10652 | 633 | 0.022% | 0.002% | 0.002% | 0.006% | 0.457% | 0.239% |
| pWISE10658 | 639 | 0.012% | 0.006% | 0.004% | 0.003% | 1.589% | 0.627% |
| pWISE10653 | 634 | 0.006% | 0.003% | 0.004% | 0.004% | 0.904% | 0.464% |
| pWISE10654 | 635 | 0.004% | 0.006% | 0.004% | 0.009% | 1.276% | 0.649% |
| pWISE10655 | 636 | 0.030% | 0.003% | 0.005% | 0.004% | 1.112% | 0.581% |
| pWISE10656 | 637 | 0.004% | 0.004% | 0.003% | 0.015% | 0.933% | 0.418% |
| pWISE10657 | 638 | 0.016% | 0.002% | 0.004% | 0.006% | 0.792% | 0.259% |
| | | Standard deviation of the average G to A editing percent at the | | | | | |
| | | nucleotides numbered according to the position in the PWsp3628 | | | | | |
| | Protein SEQ | spacer sequence on the opposite, target genomic DNA strand | | | | | |
| pWISE | ID NO: | G.15 | G.16 | G.19 | G.20 | G.21 | G.23 |
| pWISE121 | 56 | 0.167% | 0.161% | 0.161% | 0.232% | 0.242% | 0.219% |
| pWISE9120 | 453 | 0.128% | 0.094% | 0.131% | 0.075% | 0.077% | 0.066% |
| pWISE10648 | 629 | 0.081% | 0.087% | 0.131% | 0.094% | 0.168% | 0.100% |
| pWISE10649 | 630 | 0.055% | 0.041% | 0.060% | 0.031% | 0.120% | 0.023% |
| pWISE10650 | 631 | 0.132% | 0.116% | 0.148% | 0.109% | 0.151% | 0.127% |
| pWISE10651 | 632 | 0.098% | 0.081% | 0.123% | 0.059% | 0.133% | 0.133% |
| pWISE10652 | 633 | 0.043% | 0.050% | 0.058% | 0.041% | 0.108% | 0.063% |
| pWISE10658 | 639 | 0.327% | 0.323% | 0.214% | 0.203% | 0.184% | 0.214% |
| pWISE10653 | 634 | 0.190% | 0.181% | 0.187% | 0.127% | 0.077% | 0.119% |
| pWISE10654 | 635 | 0.230% | 0.185% | 0.236% | 0.141% | 0.132% | 0.121% |
| pWISE10655 | 636 | 0.261% | 0.226% | 0.244% | 0.153% | 0.068% | 0.158% |
| pWISE10656 | 637 | 0.216% | 0.206% | 0.300% | 0.160% | 0.132% | 0.185% |
| pWISE10657 | 638 | 0.218% | 0.232% | 0.223% | 0.185% | 0.166% | 0.183% |
| | | Standard deviation of the average G to A editing percent at the | | | | | |
| | | nucleotides numbered according to the position in the PWsp3628 | | | | | |
| | Protein SEQ | spacer sequence on the opposite, target genomic DNA strand | | | | | |
| pWISE | ID NO: | G.24 | G.25 | G.26 | G.27 | G.29 | G.30 |
| pWISE121 | 56 | 0.196% | 0.155% | 0.155% | 0.129% | 0.243% | 0.127% |
| pWISE9120 | 453 | 0.064% | 0.062% | 0.078% | 0.113% | 0.025% | 0.032% |
| pWISE10648 | 629 | 0.103% | 0.106% | 0.103% | 0.173% | 0.059% | 0.062% |
| pWISE10649 | 630 | 0.019% | 0.023% | 0.028% | 0.057% | 0.018% | 0.012% |
| pWISE10650 | 631 | 0.122% | 0.120% | 0.186% | 0.183% | 0.040% | 0.027% |
| pWISE10651 | 632 | 0.105% | 0.100% | 0.152% | 0.180% | 0.032% | 0.041% |
| pWISE10652 | 633 | 0.063% | 0.063% | 0.061% | 0.079% | 0.052% | 0.053% |
| pWISE10658 | 639 | 0.135% | 0.137% | 0.153% | 0.167% | 0.051% | 0.114% |
| pWISE10653 | 634 | 0.103% | 0.103% | 0.098% | 0.101% | 0.058% | 0.051% |
| pWISE10654 | 635 | 0.100% | 0.097% | 0.105% | 0.160% | 0.064% | 0.036% |
| pWISE10655 | 636 | 0.138% | 0.143% | 0.162% | 0.202% | 0.049% | 0.035% |
| pWISE10656 | 637 | 0.178% | 0.164% | 0.214% | 0.261% | 0.087% | 0.061% |
| pWISE10657 | 638 | 0.151% | 0.151% | 0.215% | 0.209% | 0.111% | 0.091% |

TABLE 89

| | | Average C to T editing percent at the nucleotides numbered | | | | | | |
|---|---|---|---|---|---|---|---|---|
| | | according to the position in the PWsp3629 spacer sequence on the | | | | | | |
| | Protein SEQ | non-target, genomic DNA strand | | | | | | |
| pWISE | ID NO: | C.-7 | C.1 | C.4 | C.5 | C.7 | C.8 | C.15 |
| pWISE121 | 56 | 0.035% | 0.048% | 0.287% | 0.061% | 0.095% | 0.184% | 1.003% |
| pWISE9120 | 453 | 0.006% | 0.005% | 0.006% | 0.005% | 2.400% | 2.466% | 0.840% |
| pWISE10648 | 629 | 0.004% | 0.004% | 0.003% | 0.008% | 1.142% | 1.219% | 0.329% |
| pWISE10649 | 630 | 0.007% | 0.002% | 0.002% | 0.006% | 0.681% | 0.683% | 0.201% |
| pWISE10650 | 631 | 0.004% | 0.018% | 0.015% | 0.015% | 1.678% | 1.742% | 0.634% |
| pWISE10651 | 632 | 0.005% | 0.014% | 0.004% | 0.005% | 1.589% | 1.704% | 0.689% |
| pWISE10652 | 633 | 0.006% | 0.006% | 0.010% | 0.008% | 1.163% | 1.258% | 0.438% |
| pWISE10658 | 639 | 0.004% | 0.005% | 0.010% | 0.004% | 4.049% | 4.367% | 0.754% |
| pWISE10653 | 634 | 0.004% | 0.007% | 0.020% | 0.012% | 2.062% | 2.117% | 0.382% |
| pWISE10654 | 635 | 0.007% | 0.009% | 0.008% | 0.014% | 1.999% | 2.085% | 0.406% |
| pWISE10655 | 636 | 0.013% | 0.011% | 0.014% | 0.018% | 2.000% | 1.869% | 0.530% |
| pWISE10656 | 637 | 0.003% | 0.002% | 0.009% | 0.016% | 1.865% | 1.862% | 0.545% |
| pWISE10657 | 638 | 0.006% | 0.004% | 0.008% | 0.005% | 1.897% | 1.949% | 0.485% |

| | | Average C to T editing percent at the nucleotides numbered | | | | | |
|---|---|---|---|---|---|---|---|
| | | according to the position in the PWsp3629 spacer sequence on the | | | | | |
| | Protein SEQ | non-target, genomic DNA strand | | | | | |
| pWISE | ID NO: | C.16 | C.22 | C.23 | C.24 | C.25 | C.29 |
| pWISE121 | 56 | 0.590% | 0.658% | 0.550% | 0.418% | 0.207% | 0.132% |
| pWISE9120 | 453 | 0.666% | 0.201% | 0.179% | 0.165% | 0.184% | 0.018% |
| pWISE10648 | 629 | 0.149% | 0.121% | 0.098% | 0.090% | 0.118% | 0.026% |
| pWISE10649 | 630 | 0.094% | 0.265% | 0.203% | 0.186% | 0.181% | 0.035% |
| pWISE10650 | 631 | 0.334% | 0.751% | 0.685% | 0.678% | 0.662% | 0.084% |
| pWISE10651 | 632 | 0.407% | 0.991% | 0.907% | 0.881% | 0.922% | 0.128% |
| pWISE10652 | 633 | 0.243% | 0.820% | 0.643% | 0.632% | 0.628% | 0.096% |
| pWISE10658 | 639 | 0.385% | 0.311% | 0.204% | 0.202% | 0.220% | 0.036% |
| pWISE10653 | 634 | 0.154% | 0.200% | 0.132% | 0.125% | 0.141% | 0.023% |
| pWISE10654 | 635 | 0.185% | 0.575% | 0.433% | 0.402% | 0.398% | 0.060% |
| pWISE10655 | 636 | 0.237% | 0.876% | 0.750% | 0.695% | 0.709% | 0.088% |
| pWISE10656 | 637 | 0.252% | 0.688% | 0.610% | 0.580% | 0.607% | 0.073% |
| pWISE10657 | 638 | 0.192% | 0.790% | 0.648% | 0.652% | 0.676% | 0.090% |

TABLE 90

| | | Standard Deviation of the average editing percent at the | | | | | | |
|---|---|---|---|---|---|---|---|---|
| | | nucleotides numbered according to the position in the PWsp3629 | | | | | | |
| | Protein SEQ | spacer sequence on the non-target, genomic DNA strand | | | | | | |
| pWISE | ID NO: | C.-7 | C.1 | C.4 | C.5 | C.7 | C.8 | C.15 |
| pWISE121 | 56 | 0.027% | 0.059% | 0.190% | 0.046% | 0.106% | 0.134% | 0.563% |
| pWISE9120 | 453 | 0.004% | 0.001% | 0.006% | 0.004% | 1.047% | 1.007% | 0.367% |
| pWISE10648 | 629 | 0.005% | 0.004% | 0.002% | 0.005% | 0.436% | 0.427% | 0.109% |
| pWISE10649 | 630 | 0.004% | 0.001% | 0.002% | 0.010% | 0.276% | 0.252% | 0.080% |
| pWISE10650 | 631 | 0.004% | 0.024% | 0.023% | 0.030% | 0.628% | 0.575% | 0.266% |
| pWISE10651 | 632 | 0.005% | 0.014% | 0.005% | 0.009% | 0.293% | 0.316% | 0.167% |
| pWISE10652 | 633 | 0.003% | 0.005% | 0.008% | 0.011% | 0.477% | 0.447% | 0.305% |
| pWISE10658 | 639 | 0.003% | 0.002% | 0.009% | 0.005% | 1.381% | 1.313% | 0.245% |
| pWISE10653 | 634 | 0.007% | 0.008% | 0.014% | 0.014% | 0.894% | 0.909% | 0.182% |
| pWISE10654 | 635 | 0.005% | 0.006% | 0.007% | 0.011% | 0.638% | 0.638% | 0.218% |
| pWISE10655 | 636 | 0.020% | 0.017% | 0.019% | 0.017% | 0.768% | 0.508% | 0.232% |
| pWISE10656 | 637 | 0.004% | 0.003% | 0.010% | 0.010% | 0.864% | 0.715% | 0.248% |
| pWISE10657 | 638 | 0.005% | 0.007% | 0.012% | 0.004% | 0.610% | 0.603% | 0.241% |

| | |
|---|---|
| | Standard Deviation of the average editing percent at the |
| | nucleotides numbered according to the position in the PWsp3629 |
| Protein SEQ | spacer sequence on the non-target, genomic DNA strand |

| pWISE | ID NO: | C.16 | C.22 | C.23 | C.24 | C.25 | C.29 |
|---|---|---|---|---|---|---|---|
| pWISE121 | 56 | 0.388% | 0.382% | 0.285% | 0.262% | 0.150% | 0.142% |
| pWISE9120 | 453 | 0.252% | 0.103% | 0.105% | 0.104% | 0.108% | 0.023% |
| pWISE10648 | 629 | 0.071% | 0.067% | 0.067% | 0.070% | 0.093% | 0.026% |
| pWISE10649 | 630 | 0.025% | 0.167% | 0.118% | 0.113% | 0.102% | 0.030% |
| pWISE10650 | 631 | 0.116% | 0.456% | 0.413% | 0.413% | 0.402% | 0.056% |
| pWISE10651 | 632 | 0.074% | 0.600% | 0.554% | 0.539% | 0.513% | 0.068% |
| pWISE10652 | 633 | 0.162% | 0.573% | 0.618% | 0.592% | 0.573% | 0.055% |
| pWISE10658 | 639 | 0.184% | 0.179% | 0.133% | 0.131% | 0.126% | 0.027% |
| pWISE10653 | 634 | 0.043% | 0.125% | 0.107% | 0.103% | 0.116% | 0.024% |
| pWISE10654 | 635 | 0.086% | 0.350% | 0.267% | 0.264% | 0.224% | 0.070% |
| pWISE10655 | 636 | 0.109% | 0.576% | 0.516% | 0.464% | 0.447% | 0.074% |
| pWISE10656 | 637 | 0.096% | 0.553% | 0.526% | 0.496% | 0.496% | 0.063% |
| pWISE10657 | 638 | 0.046% | 0.499% | 0.420% | 0.411% | 0.429% | 0.066% |

TABLE 91

| | | Average G to A editing percent at the nucleotides numbered | | | | | | |
|---|---|---|---|---|---|---|---|---|
| | | according to the position in the PWsp3629 spacer sequence on the | | | | | | |
| | Protein SEQ | opposite, target genomic DNA strand | | | | | | |
| pWISE | ID NO: | G.-8 | G.-4 | G.-1 | G.3 | G.10 | G.11 | G.12 |
| pWISE121 | 56 | 0.007% | 0.027% | 0.025% | 0.032% | 0.099% | 0.082% | 0.135% |
| pWISE9120 | 453 | 0.008% | 0.005% | 0.004% | 0.014% | 3.714% | 3.744% | 3.934% |
| pWISE10648 | 629 | 0.005% | 0.013% | 0.007% | 0.010% | 2.207% | 2.220% | 2.310% |
| pWISE10649 | 630 | 0.002% | 0.013% | 0.002% | 0.006% | 1.599% | 1.620% | 1.645% |
| pWISE10650 | 631 | 0.010% | 0.002% | 0.009% | 0.011% | 3.606% | 3.766% | 3.918% |
| pWISE10651 | 632 | 0.005% | 0.025% | 0.023% | 0.033% | 3.767% | 3.939% | 4.154% |
| pWISE10652 | 633 | 0.006% | 0.005% | 0.003% | 0.011% | 2.778% | 2.908% | 3.103% |
| pWISE10658 | 639 | 0.009% | 0.003% | 0.004% | 0.010% | 6.408% | 6.407% | 6.532% |
| pWISE10653 | 634 | 0.005% | 0.004% | 0.004% | 0.014% | 3.136% | 3.182% | 3.288% |
| pWISE10654 | 635 | 0.004% | 0.001% | 0.002% | 0.009% | 4.984% | 5.029% | 5.090% |
| pWISE10655 | 636 | 0.003% | 0.009% | 0.002% | 0.014% | 4.913% | 5.047% | 5.176% |
| pWISE10656 | 637 | 0.002% | 0.005% | 0.008% | 0.012% | 4.152% | 4.333% | 4.435% |
| pWISE10657 | 638 | 0.007% | 0.005% | 0.003% | 0.007% | 3.300% | 3.415% | 3.529% |
| | | Average G to A editing percent at the nucleotides numbered | | | | | | |
| | | according to the position in the PWsp3629 spacer sequence on the | | | | | | |
| | Protein SEQ | opposite, target genomic DNA strand | | | | | | |
| pWISE | ID NO: | G.18 | G.20 | G.26 | G.28 | G.31 | G.32 | G.33 |
| pWISE121 | 56 | 0.315% | 0.260% | 0.108% | 0.081% | 0.083% | 0.109% | 0.102% |
| pWISE9120 | 453 | 1.002% | 0.758% | 1.077% | 0.308% | 0.160% | 0.129% | 0.148% |
| pWISE10648 | 629 | 0.630% | 0.545% | 0.812% | 0.244% | 0.151% | 0.133% | 0.150% |
| pWISE10649 | 630 | 0.746% | 0.821% | 1.278% | 0.334% | 0.249% | 0.193% | 0.195% |
| pWISE10650 | 631 | 2.774% | 2.729% | 3.918% | 1.299% | 0.774% | 0.638% | 0.680% |
| pWISE10651 | 632 | 2.961% | 2.980% | 4.709% | 1.595% | 0.955% | 0.717% | 0.752% |
| pWISE10652 | 633 | 2.698% | 2.628% | 4.418% | 1.626% | 0.945% | 0.726% | 0.737% |
| pWISE10658 | 639 | 1.737% | 1.383% | 1.677% | 0.312% | 0.200% | 0.133% | 0.179% |
| pWISE10653 | 634 | 0.746% | 0.583% | 0.849% | 0.170% | 0.153% | 0.139% | 0.134% |
| pWISE10654 | 635 | 2.501% | 2.471% | 3.210% | 0.986% | 0.579% | 0.424% | 0.513% |
| pWISE10655 | 636 | 2.995% | 3.089% | 4.137% | 1.262% | 0.734% | 0.595% | 0.635% |
| pWISE10656 | 637 | 2.526% | 2.418% | 3.720% | 1.085% | 0.770% | 0.561% | 0.590% |
| pWISE10657 | 638 | 2.638% | 2.441% | 4.667% | 1.312% | 0.855% | 0.647% | 0.681% |

TABLE 92

| | | Standard deviation of the average G to A editing percent at the | | | | | | |
|---|---|---|---|---|---|---|---|---|
| | | nucleotides numbered according to the position in the PWsp3629 | | | | | | |
| | Protein SEQ | spacer sequence on the opposite, target genomic DNA strand | | | | | | |
| pWISE | ID NO: | G.-8 | G.-4 | G.-1 | G.3 | G.10 | G.11 | G.12 |
| pWISE121 | 56 | 0.011% | 0.032% | 0.025% | 0.018% | 0.055% | 0.045% | 0.126% |
| pWISE9120 | 453 | 0.006% | 0.005% | 0.006% | 0.011% | 1.750% | 1.758% | 1.783% |
| pWISE10648 | 629 | 0.005% | 0.018% | 0.006% | 0.012% | 1.001% | 1.004% | 1.075% |
| pWISE10649 | 630 | 0.002% | 0.016% | 0.002% | 0.004% | 0.628% | 0.624% | 0.636% |
| pWISE10650 | 631 | 0.012% | 0.002% | 0.012% | 0.010% | 1.573% | 1.725% | 1.837% |
| pWISE10651 | 632 | 0.005% | 0.032% | 0.027% | 0.016% | 1.099% | 1.193% | 1.263% |
| pWISE10652 | 633 | 0.007% | 0.005% | 0.003% | 0.006% | 0.801% | 0.818% | 0.852% |
| pWISE10658 | 639 | 0.016% | 0.001% | 0.006% | 0.004% | 2.460% | 2.474% | 2.515% |
| pWISE10653 | 634 | 0.009% | 0.003% | 0.002% | 0.010% | 1.150% | 1.207% | 1.260% |
| pWISE10654 | 635 | 0.002% | 0.002% | 0.003% | 0.007% | 2.056% | 2.092% | 2.113% |
| pWISE10655 | 636 | 0.004% | 0.004% | 0.003% | 0.018% | 2.008% | 2.086% | 2.133% |
| pWISE10656 | 637 | 0.003% | 0.005% | 0.006% | 0.011% | 1.833% | 1.983% | 2.034% |
| pWISE10657 | 638 | 0.011% | 0.006% | 0.002% | 0.006% | 0.999% | 1.051% | 1.101% |
| | | Standard deviation of the average G to A editing percent at the | | | | | | |
| | | nucleotides numbered according to the position in the PWsp3629 | | | | | | |
| | Protein SEQ | spacer sequence on the opposite, target genomic DNA strand | | | | | | |
| pWISE | ID NO: | G.18 | G.20 | G.26 | G.28 | G.31 | G.32 | G.33 |
| pWISE121 | 56 | 0.214% | 0.175% | 0.097% | 0.086% | 0.050% | 0.080% | 0.078% |
| pWISE9120 | 453 | 0.540% | 0.494% | 0.606% | 0.215% | 0.077% | 0.062% | 0.066% |
| pWISE10648 | 629 | 0.345% | 0.336% | 0.521% | 0.206% | 0.111% | 0.099% | 0.114% |
| pWISE10649 | 630 | 0.284% | 0.334% | 0.563% | 0.155% | 0.139% | 0.102% | 0.107% |
| pWISE10650 | 631 | 1.528% | 1.590% | 2.484% | 0.895% | 0.506% | 0.420% | 0.449% |
| pWISE10651 | 632 | 1.156% | 1.424% | 2.613% | 1.049% | 0.561% | 0.464% | 0.466% |
| pWISE10652 | 633 | 1.120% | 1.185% | 2.406% | 1.064% | 0.596% | 0.460% | 0.457% |
| pWISE10658 | 639 | 0.861% | 0.757% | 0.912% | 0.195% | 0.114% | 0.083% | 0.094% |
| pWISE10653 | 634 | 0.459% | 0.317% | 0.469% | 0.158% | 0.124% | 0.122% | 0.106% |
| pWISE10654 | 635 | 1.245% | 1.374% | 1.960% | 0.725% | 0.382% | 0.281% | 0.370% |
| pWISE10655 | 636 | 1.580% | 1.718% | 2.443% | 0.834% | 0.447% | 0.366% | 0.406% |
| pWISE10656 | 637 | 1.412% | 1.550% | 2.849% | 0.976% | 0.644% | 0.451% | 0.477% |
| pWISE10657 | 638 | 1.176% | 1.167% | 2.630% | 0.832% | 0.516% | 0.381% | 0.397% |

TABLE 93

| | | Average C to T editing percent at the nucleotides numbered | | | | | |
|---|---|---|---|---|---|---|---|
| | | according to the position in the PWsp3630 spacer sequence on the | | | | | |
| | Protein SEQ | non-target, genomic DNA strand | | | | | |
| pWISE | ID NO: | C.-7 | C.-6 | C.-1 | C.1 | C.6 | C.11 |
| pWISE121 | 56 | 0.016% | 0.018% | 0.018% | 0.023% | 0.051% | 0.145% |
| pWISE9120 | 453 | 0.059% | 0.044% | 0.114% | 0.056% | 1.177% | 1.749% |
| pWISE10648 | 629 | 0.069% | 0.046% | 0.101% | 0.052% | 0.476% | 1.144% |
| pWISE10649 | 630 | 0.055% | 0.024% | 0.057% | 0.029% | 0.166% | 0.390% |
| pWISE10650 | 631 | 0.097% | 0.063% | 0.130% | 0.087% | 0.386% | 1.020% |
| pWISE10651 | 632 | 0.071% | 0.057% | 0.093% | 0.062% | 0.292% | 0.837% |
| pWISE10652 | 633 | 0.074% | 0.052% | 0.093% | 0.045% | 0.298% | 0.855% |
| pWISE10658 | 639 | 0.046% | 0.033% | 0.111% | 0.051% | 0.489% | 0.940% |
| pWISE10653 | 634 | 0.052% | 0.041% | 0.095% | 0.048% | 0.489% | 0.973% |
| pWISE10654 | 635 | 0.080% | 0.065% | 0.127% | 0.068% | 0.295% | 0.705% |
| pWISE10655 | 636 | 0.056% | 0.027% | 0.070% | 0.035% | 0.278% | 0.599% |
| pWISE10656 | 637 | 0.032% | 0.022% | 0.055% | 0.024% | 0.201% | 0.557% |
| pWISE10657 | 638 | 0.043% | 0.039% | 0.076% | 0.060% | 0.227% | 0.590% |
| | | Average C to T editing percent at the nucleotides numbered | | | | | |
| | | according to the position in the PWsp3630 spacer sequence on the | | | | | |
| | Protein SEQ | non-target, genomic DNA strand | | | | | |
| pWISE | ID NO: | C.12 | C.15 | C.19 | C.30 | C.31 | C.33 |
| pWISE121 | 56 | 0.145% | 0.992% | 0.336% | 0.394% | 0.201% | 0.166% |
| pWISE9120 | 453 | 2.255% | 2.946% | 0.558% | 0.002% | 0.007% | 0.003% |
| pWISE10648 | 629 | 1.591% | 2.669% | 0.909% | 0.005% | 0.011% | 0.023% |
| pWISE10649 | 630 | 0.700% | 1.893% | 0.821% | 0.010% | 0.025% | 0.011% |
| pWISE10650 | 631 | 1.545% | 4.167% | 2.020% | 0.016% | 0.025% | 0.007% |
| pWISE10651 | 632 | 1.359% | 3.838% | 2.030% | 0.010% | 0.017% | 0.010% |
| pWISE10652 | 633 | 1.352% | 4.082% | 2.138% | 0.011% | 0.034% | 0.006% |
| pWISE10658 | 639 | 1.525% | 1.985% | 0.411% | 0.003% | 0.008% | 0.003% |
| pWISE10653 | 634 | 1.411% | 2.498% | 0.804% | 0.005% | 0.031% | 0.015% |
| pWISE10654 | 635 | 1.277% | 3.042% | 1.376% | 0.013% | 0.018% | 0.002% |
| pWISE10655 | 636 | 1.021% | 2.645% | 1.272% | 0.009% | 0.024% | 0.007% |
| pWISE10656 | 637 | 0.904% | 2.375% | 1.088% | 0.002% | 0.015% | 0.012% |
| pWISE10657 | 638 | 0.961% | 2.547% | 0.818% | 0.010% | 0.012% | 0.005% |

TABLE 94

| | | Standard Deviation of the average editing percent at the nucleotides | | | | | |
|---|---|---|---|---|---|---|---|
| | | numbered according to the position in the PWsp3630 spacer sequence | | | | | |
| | Protein SEQ | on the non-target, genomic DNA strand | | | | | |
| pWISE | ID NO: | C.-7 | C.-6 | C.-1 | C.1 | C.6 | C.11 |
| pWISE121 | 56 | 0.018% | 0.018% | 0.023% | 0.029% | 0.037% | 0.061% |
| pWISE9120 | 453 | 0.010% | 0.015% | 0.044% | 0.012% | 0.613% | 0.889% |
| pWISE10648 | 629 | 0.025% | 0.022% | 0.031% | 0.013% | 0.224% | 0.556% |
| pWISE10649 | 630 | 0.026% | 0.014% | 0.015% | 0.016% | 0.108% | 0.162% |
| pWISE10650 | 631 | 0.049% | 0.017% | 0.048% | 0.029% | 0.125% | 0.396% |
| pWISE10651 | 632 | 0.022% | 0.013% | 0.021% | 0.019% | 0.073% | 0.313% |
| pWISE10652 | 633 | 0.038% | 0.027% | 0.044% | 0.022% | 0.129% | 0.303% |
| pWISE10658 | 639 | 0.055% | 0.033% | 0.113% | 0.055% | 0.449% | 0.858% |
| pWISE10653 | 634 | 0.024% | 0.010% | 0.044% | 0.024% | 0.349% | 0.573% |
| pWISE10654 | 635 | 0.061% | 0.057% | 0.084% | 0.058% | 0.204% | 0.493% |
| pWISE10655 | 636 | 0.048% | 0.028% | 0.056% | 0.025% | 0.222% | 0.486% |
| pWISE10656 | 637 | 0.018% | 0.018% | 0.051% | 0.019% | 0.156% | 0.429% |
| pWISE10657 | 638 | 0.036% | 0.038% | 0.065% | 0.055% | 0.175% | 0.463% |

| | |
|---|---|
| | Standard Deviation of the average editing percent at the nucleotides |
| | numbered according to the position in the PWsp3630 spacer |
| Protein SEQ | sequence on the non-target, genomic DNA strand |

| pWISE | ID NO: | C.12 | C.15 | C.19 | C.30 | C.31 | C.33 |
|---|---|---|---|---|---|---|---|
| pWISE121 | 56 | 0.076% | 0.137% | 0.143% | 0.153% | 0.074% | 0.019% |
| pWISE9120 | 453 | 1.170% | 1.475% | 0.231% | 0.004% | 0.006% | 0.003% |
| pWISE10648 | 629 | 0.735% | 1.070% | 0.372% | 0.004% | 0.016% | 0.025% |
| pWISE10649 | 630 | 0.345% | 0.892% | 0.379% | 0.009% | 0.013% | 0.006% |
| pWISE10650 | 631 | 0.556% | 1.615% | 0.730% | 0.013% | 0.021% | 0.007% |
| pWISE10651 | 632 | 0.477% | 1.388% | 0.711% | 0.010% | 0.010% | 0.010% |
| pWISE10652 | 633 | 0.470% | 1.450% | 0.717% | 0.014% | 0.015% | 0.008% |
| pWISE10658 | 639 | 1.417% | 1.837% | 0.390% | 0.002% | 0.009% | 0.003% |
| pWISE10653 | 634 | 0.734% | 1.315% | 0.337% | 0.004% | 0.031% | 0.019% |
| pWISE10654 | 635 | 0.902% | 1.978% | 0.902% | 0.014% | 0.027% | 0.002% |
| pWISE10655 | 636 | 0.834% | 2.170% | 1.008% | 0.007% | 0.021% | 0.010% |
| pWISE10656 | 637 | 0.717% | 1.896% | 0.860% | 0.002% | 0.011% | 0.008% |
| pWISE10657 | 638 | 0.764% | 2.033% | 0.635% | 0.012% | 0.009% | 0.004% |

TABLE 95

| | | Average G to A editing percent at the nucleotides numbered | | | | |
|---|---|---|---|---|---|---|
| | | according to the position in the PWsp3630 spacer sequence on | | | | |
| | Protein | the opposite, target genomic DNA strand | | | | |
| pWISE | SEQ ID NO: | G.-4 | G.8 | G.9 | G.10 | G.14 |
| pWISE121 | 56 | 0.015% | 0.083% | 0.081% | 0.073% | 0.160% |
| pWISE9120 | 453 | 0.002% | 0.185% | 0.528% | 0.772% | 0.945% |
| pWISE10648 | 629 | 0.012% | 0.079% | 0.128% | 0.196% | 1.284% |
| pWISE10649 | 630 | 0.004% | 0.060% | 0.084% | 0.147% | 0.942% |
| pWISE10650 | 631 | 0.003% | 0.154% | 0.181% | 0.282% | 1.976% |
| pWISE10651 | 632 | 0.002% | 0.166% | 0.200% | 0.257% | 1.813% |
| pWISE10652 | 633 | 0.011% | 0.107% | 0.142% | 0.236% | 1.721% |
| pWISE10658 | 639 | 0.004% | 0.242% | 0.750% | 1.400% | 1.650% |
| pWISE10653 | 634 | 0.002% | 0.191% | 0.248% | 0.400% | 2.330% |
| pWISE10654 | 635 | 0.006% | 0.167% | 0.282% | 0.516% | 2.486% |
| pWISE10655 | 636 | 0.002% | 0.215% | 0.287% | 0.464% | 2.080% |
| pWISE10656 | 637 | 0.003% | 0.126% | 0.201% | 0.391% | 1.718% |
| pWISE10657 | 638 | 0.002% | 0.096% | 0.129% | 0.324% | 1.252% |
| | | Average G to A editing percent at the nucleotides numbered | | | | |
| | | according to the position in the PWsp3630 spacer sequence on | | | | |
| | Protein | the opposite, target genomic DNA strand | | | | |
| pWISE | SEQ ID NO: | G.16 | G.17 | G.18 | G.21 | G.22 |
| pWISE121 | 56 | 0.528% | 0.436% | 1.115% | 0.329% | 0.504% |
| pWISE9120 | 453 | 0.604% | 0.420% | 0.378% | 0.388% | 0.400% |
| pWISE10648 | 629 | 1.015% | 0.718% | 0.652% | 0.689% | 0.685% |
| pWISE10649 | 630 | 0.881% | 0.718% | 0.677% | 0.689% | 0.708% |
| pWISE10650 | 631 | 2.177% | 1.772% | 1.659% | 1.555% | 1.594% |
| pWISE10651 | 632 | 2.184% | 1.835% | 1.727% | 1.668% | 1.688% |
| pWISE10652 | 633 | 2.467% | 1.967% | 1.894% | 1.810% | 1.878% |
| pWISE10658 | 639 | 1.618% | 1.071% | 0.874% | 0.724% | 0.727% |
| pWISE10653 | 634 | 2.462% | 1.828% | 1.671% | 1.259% | 1.266% |
| pWISE10654 | 635 | 2.789% | 2.265% | 2.148% | 1.966% | 2.040% |
| pWISE10655 | 636 | 2.721% | 2.162% | 2.045% | 1.887% | 1.940% |
| pWISE10656 | 637 | 2.459% | 1.969% | 1.854% | 1.738% | 1.867% |
| pWISE10657 | 638 | 2.236% | 1.673% | 1.529% | 1.423% | 1.571% |

TABLE 96

| | | Standard deviation of the average G to A editing percent at the | | | | |
|---|---|---|---|---|---|---|
| | | nucleotides numbered according to the position in the PWsp3630 | | | | |
| | Protein | spacer sequence on the opposite, target genomic DNA strand | | | | |
| pWISE | SEQ ID NO: | G.-4 | G.8 | G.9 | G.10 | G.14 |
| pWISE121 | 56 | 0.023% | 0.032% | 0.019% | 0.026% | 0.059% |
| pWISE9120 | 453 | 0.002% | 0.156% | 0.322% | 0.411% | 0.503% |
| pWISE10648 | 629 | 0.014% | 0.053% | 0.067% | 0.086% | 0.614% |
| pWISE10649 | 630 | 0.001% | 0.030% | 0.022% | 0.054% | 0.381% |
| pWISE10650 | 631 | 0.003% | 0.055% | 0.071% | 0.113% | 0.712% |
| pWISE10651 | 632 | 0.002% | 0.078% | 0.088% | 0.121% | 0.747% |
| pWISE10652 | 633 | 0.015% | 0.036% | 0.066% | 0.110% | 0.664% |
| pWISE10658 | 639 | 0.003% | 0.239% | 0.705% | 1.301% | 1.542% |
| pWISE10653 | 634 | 0.002% | 0.236% | 0.213% | 0.319% | 1.124% |
| pWISE10654 | 635 | 0.012% | 0.104% | 0.169% | 0.318% | 1.583% |
| pWISE10655 | 636 | 0.003% | 0.161% | 0.230% | 0.380% | 1.690% |
| pWISE10656 | 637 | 0.002% | 0.109% | 0.164% | 0.320% | 1.422% |
| pWISE10657 | 638 | 0.002% | 0.080% | 0.097% | 0.247% | 0.974% |
| | | Standard deviation of the average G to A editing percent at the | | | | |
| | | nucleotides numbered according to the position in the PWsp3630 | | | | |
| | Protein | spacer sequence on the opposite, target genomic DNA strand | | | | |
| pWISE | SEQ ID NO: | G.16 | G.17 | G.18 | G.21 | G.22 |
| pWISE121 | 56 | 0.099% | 0.128% | 0.212% | 0.151% | 0.180% |
| pWISE9120 | 453 | 0.318% | 0.213% | 0.188% | 0.186% | 0.192% |
| pWISE10648 | 629 | 0.477% | 0.295% | 0.268% | 0.304% | 0.322% |
| pWISE10649 | 630 | 0.371% | 0.297% | 0.263% | 0.270% | 0.265% |
| pWISE10650 | 631 | 0.757% | 0.588% | 0.548% | 0.506% | 0.533% |
| pWISE10651 | 632 | 0.891% | 0.750% | 0.699% | 0.588% | 0.589% |
| pWISE10652 | 633 | 0.787% | 0.629% | 0.622% | 0.622% | 0.619% |
| pWISE10658 | 639 | 1.486% | 0.987% | 0.806% | 0.663% | 0.672% |
| pWISE10653 | 634 | 1.169% | 0.857% | 0.725% | 0.543% | 0.553% |
| pWISE10654 | 635 | 1.726% | 1.359% | 1.301% | 1.286% | 1.303% |
| pWISE10655 | 636 | 2.219% | 1.743% | 1.647% | 1.501% | 1.551% |
| pWISE10656 | 637 | 2.024% | 1.616% | 1.530% | 1.413% | 1.538% |
| pWISE10657 | 638 | 1.793% | 1.343% | 1.230% | 1.127% | 1.256% |

### Example 12

[0297] Circular permutants of an enzymatically inactive LbCas 12a enzyme (dLbCas12a (SEQ ID NO: 59)) were tested for adenine base editing by fusing an adenine deaminase to either the N-terminus or C-terminus of the circular permutant using a linker to provide a fusion protein. The tested linkers included a GS-XTEN-GS linker (SEQ ID NO:30); an XTEN linker (SEQ ID NO: 29); a four amino acid glycine-serine (4XGS) linker of SGGS (SEQ ID NO:26); a six amino acid glycine serine (6XGS) linker of (SGS)ₙ wherein n is 2 (SEQ ID NO:869); an eight amino acid glycine-serine (8XGS) linker of (SGGS)ₙ wherein n is 2 (SEQ ID NO:870); and a twelve amino acid glycine-serine (12XGS) linker of (SGGS)ₙ wherein n is 3. The fusion proteins and control (SEQ ID NO:56) are listed in Table 97 and the targets are in Table 98.

TABLE 97
Tested constructs.

| | Vector SEQ | DNA SEQ | Protein SEQ |
|---|---|---|---|
| pWISE | ID NO: | ID NO: | ID NO: |
| pWISE121 | 259 | 246 | 56 |
| pWISE9205 | 532 | 515 | 498 |
| pWISE9193 | 520 | 503 | 486 |
| pWISE10616 | 671 | 640 | 609 |
| pWISE10617 | 672 | 641 | 610 |
| pWISE10618 | 673 | 642 | 611 |
| pWISE10619 | 674 | 643 | 612 |
| pWISE10620 | 675 | 644 | 613 |
| pWISE9199 | 526 | 509 | 492 |
| pWISE10621 | 676 | 645 | 614 |
| pWISE10622 | 677 | 646 | 615 |
| pWISE10623 | 678 | 647 | 616 |
| pWISE10624 | 679 | 648 | 617 |
| pWISE10625 | 680 | 649 | 618 |
| pWISE9201 | 528 | 511 | 494 |
| pWISE10626 | 681 | 650 | 619 |
| pWISE10627 | 682 | 651 | 620 |
| pWISE10628 | 683 | 652 | 621 |
| pWISE10629 | 684 | 653 | 622 |
| pWISE10630 | 685 | 654 | 623 |

TABLE 98
Targets

| | Target | | Spacer | | Vector |
|---|---|---|---|---|---|
| Target Nucleic | SEQ ID | | SEQ ID | | SEQ ID |
| Acid | NO: | Spacer | NO: | pWISE | NO: |
| human DNMT1 | 272 | PWsp143 | 275 | pWISE264 | 278 |
| human RNF2 | 274 | PWsp453 | 277 | pWISE882 | 280 |
| human RNF2 | 274 | PWsp454 | 865 | pWISE883 | 867 |
| human RNF2 | 274 | PWsp455 | 866 | pWISE884 | 868 |

[0298] The fusion proteins and control were tested for their ability to perform base editing at four different sites in two target nucleic acids (SEQ ID NOs: 272 and 274) in HEK293T cells using four spacers (SEQ ID NOs: 275, 277, 865, and 866). A single biological replicate and two technical replicates were tested. HEK293T cells were seeded into 48-well collagen-coated plates (Corning) in the absence of an antibiotic using DMEM media. At 70-80% confluency, 10 cells were transfected with 1.5 μL of LTX (ThermoFisher Scientific) using 500 ng of the control or fusion protein plasmid and 500 ng of guide RNA plasmid according to manufacturer's protocol. After 3 days, the cells were lysed with a crude extraction method using TritonX buffer. Each control or fusion protein was scored based on the precise base pair editing in the DNMT1 and RNF2 genes using the guide RNAs (SEQ ID NOs: 275, 277, 865, and 866). Low, background levels of INDEL formation were seen, which was expected from using a dead LbCas12a. The results are provided in Tables 99-106. The values in Tables 99-106 that are below 0.1% are considered to be in the noise of the instrument (below the limit of detection) and are not indicative of editing. Values that are between 0.1% and 0.5% indicate that editing is present in the experiment at the specified location, but the assay is not sensitive enough to accurately quantify the amount of base editing. Similar to what was demonstrated in Example 10 for cytosine base editing, as seen in Tables 99-106, the fusion proteins provided efficient A to G editing over a wide editing window and changing the length and/or type of the linker between the adenine deaminase and the circular permutant did not significantly modify the editing window or efficiency at positions shown to be highly edited with the control. In addition, the fusion proteins containing shorter linkers (e.g., 6XGS linker) were found to have improved A to G editing towards the 3′ end of the spacer (e.g., at about the last 11-23 nucleotides of the spacer sequence).

TABLE 99

| | | Average A to G editing percent at the nucleotides | | | |
|---|---|---|---|---|---|
| | | numbered according to the position in the PWsp143 spacer | | | |
| | Protein SEQ | sequence on the opposite, target genomic DNA strand | | | |
| pWISE | ID NO: | A.5 | A.8 | A.12 | A.21 |
| pWISE121 | 56 | 0.049% | 0.454% | 0.361% | 0.141% |
| pWISE9205 | 498 | 0.017% | 10.881% | 6.116% | 0.021% |
| pWISE9193 | 486 | 0.008% | 6.988% | 8.961% | 0.335% |
| pWISE10616 | 609 | 0.012% | 5.531% | 7.466% | 0.292% |
| pWISE10617 | 610 | 0.010% | 5.564% | 8.150% | 0.225% |
| pWISE10618 | 611 | 0.016% | 9.120% | 10.199% | 0.470% |
| pWISE10619 | 612 | 0.007% | 10.127% | 10.751% | 0.416% |
| pWISE10620 | 613 | No data | No data | No data | No data |
| pWISE9199 | 492 | 0.012% | 11.264% | 7.690% | 0.096% |
| pWISE10621 | 614 | 0.015% | 12.532% | 9.651% | 0.152% |
| pWISE10622 | 615 | 0.024% | 12.238% | 10.625% | 0.204% |
| pWISE10623 | 616 | 0.027% | 9.530% | 10.037% | 0.606% |
| pWISE10624 | 617 | 0.018% | 6.966% | 9.839% | 0.667% |
| pWISE10625 | 618 | 0.018% | 6.658% | 9.787% | 0.725% |
| pWISE9201 | 494 | 0.005% | 9.097% | 8.061% | 0.131% |
| pWISE10626 | 619 | 0.015% | 13.655% | 11.997% | 0.058% |
| pWISE10627 | 620 | 0.015% | 10.271% | 9.656% | 0.045% |
| pWISE10628 | 621 | 0.015% | 12.506% | 12.122% | 0.102% |
| pWISE10629 | 622 | 0.014% | 11.561% | 11.607% | 0.056% |
| pWISE10630 | 623 | 0.016% | 8.140% | 9.604% | 0.055% |

TABLE 100

| | | Standard deviation of the average A to G editing percent at the | | | |
|---|---|---|---|---|---|
| | | nucleotides numbered according to the position in the PWsp143 | | | |
| | Protein SEQ | spacer sequence on the opposite, target genomic DNA strand | | | |
| pWISE | ID NO: | A.5 | A.8 | A.12 | A.21 |
| pWISE121 | 56 | 0.019% | 0.539% | 0.180% | 0.098% |
| pWISE9205 | 498 | 0.000% | 2.037% | 1.549% | 0.009% |
| pWISE9193 | 486 | 0.000% | 1.580% | 2.439% | 0.170% |
| pWISE10616 | 609 | 0.000% | 0.515% | 1.132% | 0.032% |
| pWISE10617 | 610 | 0.004% | 2.072% | 2.689% | 0.051% |
| pWISE10618 | 611 | 0.001% | 1.999% | 2.508% | 0.154% |
| pWISE10619 | 612 | 0.005% | 1.253% | 1.351% | 0.235% |
| pWISE10620 | 613 | No data | No data | No data | No data |
| pWISE9199 | 492 | 0.007% | 1.294% | 1.424% | 0.041% |
| pWISE10621 | 614 | No data | No data | No data | No data |
| pWISE10622 | 615 | 0.047% | 0.070% | 0.428% | 0.077% |
| pWISE10623 | 616 | 0.006% | 0.490% | 0.628% | 0.164% |
| pWISE10624 | 617 | 0.006% | 0.258% | 0.734% | 0.124% |
| pWISE10625 | 618 | 0.021% | 0.114% | 0.193% | 0.029% |
| pWISE9201 | 494 | 0.001% | 0.459% | 0.216% | 0.004% |
| pWISE10626 | 619 | 0.024% | 0.428% | 0.010% | 0.099% |
| pWISE10627 | 620 | 0.017% | 0.026% | 0.048% | 0.008% |
| pWISE10628 | 621 | 0.007% | 1.453% | 1.913% | 0.025% |
| pWISE10629 | 622 | 0.004% | 0.131% | 0.187% | 0.034% |
| pWISE10630 | 623 | 0.004% | 0.062% | 0.413% | 0.053% |

TABLE 101

| | | Average A to G editing percent at the nucleotides numbered | | | | |
|---|---|---|---|---|---|---|
| | | according to the position in the PWsp453 spacer sequence on | | | | |
| | Protein | the opposite, target genomic DNA strand | | | | |
| pWISE | SEQ ID NO: | A.2 | A.5 | A.9 | A.11 | A.12 |
| pWISE121 | 56 | 0.138% | 0.035% | 1.161% | 0.878% | 0.777% |
| pWISE9205 | 498 | 0.127% | 0.012% | 14.129% | 7.618% | 1.198% |
| pWISE9193 | 486 | 0.012% | 0.018% | 11.629% | 8.829% | 3.176% |
| pWISE10616 | 609 | 0.010% | 0.015% | 6.160% | 5.140% | 2.609% |
| pWISE10617 | 610 | 0.012% | 0.021% | 12.117% | 10.179% | 4.984% |
| pWISE10618 | 611 | 0.034% | 0.007% | 12.573% | 11.037% | 7.749% |
| pWISE10619 | 612 | 0.018% | 0.019% | 14.205% | 12.317% | 9.538% |
| pWISE10620 | 613 | 0.015% | 0.005% | 13.150% | 11.442% | 8.542% |
| pWISE9199 | 492 | 0.022% | 0.009% | 19.128% | 13.423% | 6.854% |
| pWISE10621 | 614 | 0.007% | 0.010% | 13.483% | 9.736% | 5.018% |
| pWISE10622 | 615 | 0.054% | 0.005% | 15.184% | 12.268% | 7.328% |
| pWISE10623 | 616 | 0.043% | 0.000% | 14.828% | 11.765% | 7.585% |
| pWISE10624 | 617 | 0.023% | 0.000% | 13.658% | 10.912% | 7.263% |
| pWISE10625 | 618 | 0.024% | 0.012% | 14.390% | 11.538% | 7.500% |
| pWISE9201 | 494 | 0.014% | 0.014% | 12.161% | 8.762% | 3.396% |
| pWISE10626 | 619 | 0.019% | 0.015% | 15.661% | 12.756% | 6.276% |
| pWISE10627 | 620 | 0.018% | 0.024% | 10.200% | 9.008% | 4.639% |
| pWISE10628 | 621 | 0.000% | 0.000% | 14.353% | 12.995% | 6.304% |
| pWISE10629 | 622 | 0.044% | 0.015% | 16.251% | 14.846% | 7.550% |
| pWISE10630 | 623 | 0.028% | 0.009% | 15.393% | 14.333% | 6.270% |

| | |
|---|---|
| | Average A to G editing percent at the nucleotides |
| | numbered according to the position in the PWsp453 spacer |
| Protein | sequence on the opposite, target genomic DNA strand |

| pWISE | SEQ ID NO: | A.15 | A.16 | A.18 | A.23 |
|---|---|---|---|---|---|
| pWISE121 | 56 | 0.552% | 0.743% | 1.054% | 0.165% |
| pWISE9205 | 498 | 0.106% | 0.249% | 1.538% | 0.017% |
| pWISE9193 | 486 | 0.436% | 1.612% | 7.737% | 0.024% |
| pWISE10616 | 609 | 0.471% | 1.094% | 4.119% | 0.010% |
| pWISE10617 | 610 | 0.815% | 2.195% | 8.928% | 0.005% |
| pWISE10618 | 611 | 1.779% | 4.469% | 10.096% | 0.112% |
| pWISE10619 | 612 | 2.408% | 5.715% | 11.579% | 0.090% |
| pWISE10620 | 613 | 2.315% | 5.327% | 10.147% | 0.094% |
| pWISE9199 | 492 | 0.746% | 3.337% | 9.253% | 0.033% |
| pWISE10621 | 614 | 0.445% | 2.418% | 6.582% | 0.041% |
| pWISE10622 | 615 | 0.922% | 4.262% | 9.635% | 0.029% |
| pWISE10623 | 616 | 1.863% | 6.573% | 12.093% | 0.091% |
| pWISE10624 | 617 | 2.155% | 6.661% | 11.814% | 0.100% |
| pWISE10625 | 618 | 2.420% | 7.991% | 13.011% | 0.105% |
| pWISE9201 | 494 | 0.361% | 0.851% | 2.037% | 0.006% |
| pWISE10626 | 619 | 0.378% | 1.315% | 3.752% | 0.010% |
| pWISE10627 | 620 | 0.294% | 0.977% | 3.272% | 0.006% |
| pWISE10628 | 621 | 0.745% | 1.508% | 4.553% | 0.000% |
| pWISE10629 | 622 | 0.681% | 2.299% | 5.520% | 0.005% |
| pWISE10630 | 623 | 0.817% | 2.121% | 5.463% | 0.019% |

TABLE 102

| | | Standard deviation of the average A to G editing percent at the | | | | |
|---|---|---|---|---|---|---|
| | | nucleotides numbered according to the position in the PWsp453 | | | | |
| | Protein | spacer sequence on the opposite, target genomic DNA strand | | | | |
| pWISE | SEQ ID NO: | A.2 | A.5 | A.9 | A.11 | A.12 |
| pWISE121 | 56 | 0.042% | 0.014% | 1.113% | 1.125% | 0.864% |
| pWISE9205 | 498 | 0.152% | 0.006% | 5.123% | 3.289% | 1.052% |
| pWISE9193 | 486 | No data | No data | No data | No data | No data |
| pWISE10616 | 609 | No data | No data | No data | No data | No data |
| pWISE10617 | 610 | 0.010% | 0.009% | 0.247% | 0.109% | 0.208% |
| pWISE10618 | 611 | No data | No data | No data | No data | No data |
| pWISE10619 | 612 | 0.011% | 0.015% | 0.325% | 0.280% | 0.196% |
| pWISE10620 | 613 | 0.021% | 0.007% | 2.091% | 2.091% | 1.872% |
| pWISE9199 | 492 | 0.025% | 0.002% | 0.832% | 0.263% | 0.241% |
| pWISE10621 | 614 | 0.010% | 0.000% | 2.954% | 2.654% | 1.135% |
| pWISE10622 | 615 | No data | No data | No data | No data | No data |
| pWISE10623 | 616 | 0.010% | 0.000% | 0.400% | 0.848% | 0.242% |
| pWISE10624 | 617 | 0.026% | 0.000% | 0.037% | 0.239% | 0.253% |
| pWISE10625 | 618 | 0.013% | 0.003% | 0.836% | 0.760% | 0.983% |
| pWISE9201 | 494 | 0.002% | 0.002% | 0.423% | 0.252% | 0.793% |
| pWISE10626 | 619 | 0.018% | 0.015% | 0.492% | 0.168% | 0.206% |
| pWISE10627 | 620 | No data | No data | No data | No data | No data |
| pWISE10628 | 621 | No data | No data | No data | No data | No data |
| pWISE10629 | 622 | 0.049% | 0.008% | 2.848% | 2.553% | 1.124% |
| pWISE10630 | 623 | No data | No data | No data | No data | No data |

| | | Standard deviation of the average A to G editing percent at the | | | |
|---|---|---|---|---|---|
| | | nucleotides numbered according to the position in the PWsp453 | | | |
| | Protein | spacer sequence on the opposite, target genomic DNA strand | | | |
| pWISE | SEQ ID NO: | A.15 | A.16 | A.18 | A.23 |
| pWISE121 | 56 | 0.312% | 0.453% | 0.869% | 0.036% |
| pWISE9205 | 498 | 0.150% | 0.342% | 1.025% | 0.013% |
| pWISE9193 | 486 | No data | No data | No data | No data |
| pWISE10616 | 609 | No data | No data | No data | No data |
| pWISE10617 | 610 | 0.030% | 0.048% | 0.053% | 0.007% |
| pWISE10618 | 611 | No data | No data | No data | No data |
| pWISE10619 | 612 | 0.055% | 0.067% | 0.517% | 0.057% |
| pWISE10620 | 613 | 0.526% | 0.971% | 2.537% | 0.059% |
| pWISE9199 | 492 | 0.097% | 0.281% | 0.124% | 0.010% |
| pWISE10621 | 614 | 0.135% | 0.515% | 1.823% | 0.023% |
| pWISE10622 | 615 | No data | No data | No data | No data |
| pWISE10623 | 616 | 0.076% | 0.261% | 0.259% | 0.047% |
| pWISE10624 | 617 | 0.014% | 0.079% | 0.177% | 0.007% |
| pWISE10625 | 618 | 0.469% | 0.685% | 0.737% | 0.040% |
| pWISE9201 | 494 | 0.236% | 0.161% | 0.716% | 0.009% |
| pWISE10626 | 619 | 0.028% | 0.089% | 0.395% | 0.005% |
| pWISE10627 | 620 | No data | No data | No data | No data |
| pWISE10628 | 621 | No data | No data | No data | No data |
| pWISE10629 | 622 | 0.261% | 0.362% | 1.299% | 0.007% |
| pWISE10630 | 623 | No data | No data | No data | No data |

TABLE 103

| | | Average A to G editing percent at the nucleotides | | | |
|---|---|---|---|---|---|
| | | numbered according to the position in the PWsp454 spacer | | | |
| | Protein SEQ | sequence on the opposite, target genomic DNA strand | | | |
| pWISE | ID NO: | A.2 | A.9 | A.11 | A.23 |
| pWISE121 | 56 | 0.015% | 0.119% | 0.104% | 0.327% |
| pWISE9205 | 498 | 0.002% | 12.330% | 13.245% | 0.013% |
| pWISE9193 | 486 | 0.003% | 8.383% | 12.081% | 0.077% |
| pWISE10616 | 609 | 0.003% | 5.482% | 7.900% | 0.025% |
| pWISE10617 | 610 | 0.009% | 8.076% | 11.812% | 0.055% |
| pWISE10618 | 611 | 0.001% | 10.544% | 12.643% | 0.136% |
| pWISE10619 | 612 | 0.017% | 10.483% | 12.245% | 0.017% |
| pWISE10620 | 613 | 0.000% | 10.423% | 11.549% | 0.037% |
| pWISE9199 | 492 | 0.000% | 11.850% | 13.364% | 0.028% |
| pWISE10621 | 614 | 0.000% | 9.153% | 10.414% | 0.013% |
| pWISE10622 | 615 | 0.005% | 9.612% | 11.191% | 0.026% |
| pWISE10623 | 616 | 0.004% | 7.718% | 10.349% | 0.019% |
| pWISE10624 | 617 | 0.004% | 7.277% | 10.815% | 0.031% |
| pWISE10625 | 618 | 0.000% | 7.675% | 12.356% | 0.028% |
| pWISE9201 | 494 | 0.004% | 7.780% | 8.839% | 0.004% |
| pWISE10626 | 619 | 0.000% | 3.932% | 3.932% | 0.000% |
| pWISE10627 | 620 | No data | No data | No data | No data |
| pWISE10628 | 621 | 0.000% | 8.934% | 9.852% | 0.018% |
| pWISE10629 | 622 | 0.000% | 10.551% | 11.525% | 0.005% |
| pWISE10630 | 623 | 0.009% | 8.006% | 8.940% | 0.004% |

TABLE 104

| | | Standard deviation of the average A to G editing percent at the | | | |
|---|---|---|---|---|---|
| | | nucleotides numbered according to the position in the PWsp454 | | | |
| | Protein SEQ | spacer sequence on the opposite, target genomic DNA strand | | | |
| pWISE | ID NO: | A.2 | A.9 | A.11 | A.23 |
| pWISE121 | 56 | No data | No data | No data | No data |
| pWISE9205 | 498 | 0.003% | 0.209% | 0.283% | 0.009% |
| pWISE9193 | 486 | 0.005% | 0.529% | 0.512% | 0.071% |
| pWISE10616 | 609 | 0.004% | 0.425% | 0.728% | 0.008% |
| pWISE10617 | 610 | 0.006% | 1.459% | 1.746% | 0.020% |
| pWISE10618 | 611 | 0.002% | 0.580% | 0.671% | 0.062% |
| pWISE10619 | 612 | No data | No data | No data | No data |
| pWISE10620 | 613 | 0.000% | 0.897% | 0.685% | 0.011% |
| pWISE9199 | 492 | 0.000% | 0.013% | 0.030% | 0.005% |
| pWISE10621 | 614 | 0.000% | 1.657% | 1.924% | 0.006% |
| pWISE10622 | 615 | 0.008% | 1.191% | 1.694% | 0.001% |
| pWISE10623 | 616 | 0.006% | 1.038% | 1.414% | 0.016% |
| pWISE10624 | 617 | 0.006% | 0.629% | 0.796% | 0.010% |
| pWISE10625 | 618 | 0.000% | 0.135% | 0.211% | 0.019% |
| pWISE9201 | 494 | 0.006% | 1.276% | 0.968% | 0.006% |
| pWISE10626 | 619 | No data | No data | No data | No data |
| pWISE10627 | 620 | No data | No data | No data | No data |
| pWISE10628 | 621 | No data | No data | No data | No data |
| pWISE10629 | 622 | No data | No data | No data | No data |
| pWISE10630 | 623 | No data | No data | No data | No data |

TABLE 105

| | | Average A to G editing percent at the nucleotides numbered | | | | | |
|---|---|---|---|---|---|---|---|
| | | according to the position in the PWsp455 spacer sequence on | | | | | |
| | Protein | the opposite, target genomic DNA strand | | | | | |
| pWISE | SEQ ID NO: | A.2 | A.3 | A.8 | A.9 | A.10 | A.11 |
| pWISE121 | 56 | 0.166% | 0.275% | 0.544% | 1.043% | 0.179% | 0.326% |
| pWISE9205 | 498 | 0.005% | 0.012% | 7.282% | 5.673% | 2.411% | 4.140% |
| pWISE9193 | 486 | No data | No data | No data | No data | No data | No data |
| pWISE10616 | 609 | No data | No data | No data | No data | No data | No data |
| pWISE10617 | 610 | 0.017% | 0.025% | 7.855% | 5.408% | 4.640% | 10.816% |
| pWISE10618 | 611 | 0.008% | 0.008% | 10.980% | 9.523% | 7.365% | 12.119% |
| pWISE10619 | 612 | No data | No data | No data | No data | No data | No data |
| pWISE10620 | 613 | 0.011% | 0.057% | 15.583% | 12.660% | 10.711% | 15.713% |
| pWISE9199 | 492 | 0.012% | 0.000% | 10.433% | 8.274% | 3.945% | 7.834% |
| pWISE10621 | 614 | 0.003% | 0.000% | 9.054% | 7.638% | 3.775% | 7.118% |
| pWISE10622 | 615 | 0.002% | 0.002% | 9.651% | 8.163% | 4.494% | 8.119% |
| pWISE10623 | 616 | 0.000% | 0.014% | 5.673% | 4.674% | 2.372% | 5.963% |
| pWISE10624 | 617 | 0.018% | 0.012% | 4.368% | 3.541% | 2.043% | 5.177% |
| pWISE10625 | 618 | 0.016% | 0.005% | 3.903% | 3.005% | 1.708% | 4.842% |
| pWISE9201 | 494 | 0.000% | 0.009% | 10.929% | 7.710% | 4.491% | 8.909% |
| pWISE10626 | 619 | 0.015% | 0.000% | 12.765% | 10.769% | 7.658% | 11.621% |
| pWISE10627 | 620 | 0.007% | 0.003% | 8.499% | 8.510% | 6.716% | 9.321% |
| pWISE10628 | 621 | 0.005% | 0.010% | 9.154% | 10.779% | 8.955% | 11.099% |
| pWISE10629 | 622 | 0.037% | 0.004% | 7.896% | 11.576% | 10.312% | 11.996% |
| pWISE10630 | 623 | 0.008% | 0.012% | 3.815% | 9.166% | 8.909% | 9.687% |

| | | Average A to G editing percent at the nucleotides numbered | | | | | |
|---|---|---|---|---|---|---|---|
| | | according to the position in the PWsp455 spacer sequence on | | | | | |
| | Protein | the opposite, target genomic DNA strand | | | | | |
| pWISE | SEQ ID NO: | A.15 | A.16 | A.17 | A.19 | A.21 | A.22 |
| pWISE121 | 56 | 0.941% | 0.614% | 0.442% | 0.557% | 0.102% | 0.416% |
| pWISE9205 | 498 | 0.883% | 0.040% | 0.007% | 0.260% | 0.012% | 0.100% |
| pWISE9193 | 486 | No data | No data | No data | No data | No data | No data |
| pWISE10616 | 609 | No data | No data | No data | No data | No data | No data |
| pWISE10617 | 610 | 2.885% | 0.084% | 0.084% | 0.768% | 0.337% | 0.059% |
| pWISE10618 | 611 | 3.026% | 0.135% | 0.135% | 1.330% | 0.072% | 0.000% |
| pWISE10619 | 612 | No data | No data | No data | No data | No data | No data |
| pWISE10620 | 613 | 4.424% | 0.206% | 0.248% | 2.383% | 0.065% | 0.070% |
| pWISE9199 | 492 | 0.958% | 0.015% | 0.031% | 0.219% | 0.040% | 0.020% |
| pWISE10621 | 614 | 1.091% | 0.013% | 0.045% | 0.218% | 0.011% | 0.012% |
| pWISE10622 | 615 | 1.663% | 0.018% | 0.043% | 0.349% | 0.009% | 0.030% |
| pWISE10623 | 616 | 2.550% | 0.023% | 0.030% | 0.525% | 0.033% | 0.033% |
| pWISE10624 | 617 | 3.218% | 0.090% | 0.090% | 0.659% | 0.072% | 0.018% |
| pWISE10625 | 618 | 3.382% | 0.107% | 0.083% | 0.561% | 0.053% | 0.039% |
| pWISE9201 | 494 | 0.938% | 0.225% | 0.063% | 0.126% | 0.000% | 0.054% |
| pWISE10626 | 619 | 1.097% | 0.056% | 0.072% | 0.222% | 0.053% | 0.054% |
| pWISE10627 | 620 | 1.135% | 0.047% | 0.056% | 0.345% | 0.026% | 0.034% |
| pWISE10628 | 621 | 1.640% | 0.075% | 0.069% | 0.552% | 0.026% | 0.068% |
| pWISE10629 | 622 | 2.282% | 0.125% | 0.165% | 0.638% | 0.024% | 0.069% |
| pWISE10630 | 623 | 2.195% | 0.119% | 0.104% | 0.573% | 0.023% | 0.036% |

TABLE 106

| | | Standard deviation of the average A to G editing percent at the | | | | | |
|---|---|---|---|---|---|---|---|
| | | nucleotides numbered according to the position in the PWsp455 | | | | | |
| | Protein | spacer sequence on the opposite, target genomic DNA strand | | | | | |
| pWISE | SEQ ID NO: | A.2 | A.3 | A.8 | A.9 | A.10 | A.11 |
| pWISE121 | 56 | No data | No data | No data | No data | No data | No data |
| pWISE9205 | 498 | No data | No data | No data | No data | No data | No data |
| pWISE9193 | 486 | No data | No data | No data | No data | No data | No data |
| pWISE10616 | 609 | No data | No data | No data | No data | No data | No data |
| pWISE10617 | 610 | No data | No data | No data | No data | No data | No data |
| pWISE10618 | 611 | No data | No data | No data | No data | No data | No data |
| pWISE10619 | 612 | No data | No data | No data | No data | No data | No data |
| pWISE10620 | 613 | 0.007% | 0.001% | 0.510% | 0.374% | 0.563% | 0.648% |
| pWISE9199 | 492 | 0.006% | 0.000% | 0.185% | 0.115% | 0.495% | 0.260% |
| pWISE10621 | 614 | 0.005% | 0.000% | 0.698% | 0.477% | 0.379% | 0.613% |
| pWISE10622 | 615 | 0.003% | 0.003% | 0.708% | 0.663% | 0.703% | 1.611% |
| pWISE10623 | 616 | 0.000% | 0.004% | 0.097% | 0.096% | 0.339% | 0.362% |
| pWISE10624 | 617 | No data | No data | No data | No data | No data | No data |
| pWISE10625 | 618 | 0.001% | 0.007% | 0.002% | 0.037% | 0.048% | 0.079% |
| pWISE9201 | 494 | No data | No data | No data | No data | No data | No data |
| pWISE10626 | 619 | 0.011% | 0.000% | 0.739% | 0.239% | 0.334% | 0.282% |
| pWISE10627 | 620 | 0.001% | 0.005% | 0.332% | 0.222% | 0.114% | 0.209% |
| pWISE10628 | 621 | 0.007% | 0.006% | 0.453% | 0.698% | 0.519% | 0.284% |
| pWISE10629 | 622 | 0.007% | 0.006% | 0.089% | 0.483% | 0.440% | 0.148% |
| pWISE10630 | 623 | 0.000% | 0.005% | 0.417% | 0.019% | 0.051% | 0.260% |
| | | Standard deviation of the average A to G editing percent at the | | | | | |
| | | nucleotides numbered according to the position in the PWsp455 | | | | | |
| | Protein | spacer sequence on the opposite, target genomic DNA strand | | | | | |
| pWISE | SEQ ID NO: | A.15 | A.16 | A.17 | A.19 | A.21 | A.22 |
| pWISE121 | 56 | No data | No data | No data | No data | No data | No data |
| pWISE9205 | 498 | No data | No data | No data | No data | No data | No data |
| pWISE9193 | 486 | No data | No data | No data | No data | No data | No data |
| pWISE10616 | 609 | No data | No data | No data | No data | No data | No data |
| pWISE10617 | 610 | No data | No data | No data | No data | No data | No data |
| pWISE10618 | 611 | No data | No data | No data | No data | No data | No data |
| pWISE10619 | 612 | No data | No data | No data | No data | No data | No data |
| pWISE10620 | 613 | 0.074% | 0.107% | 0.052% | 0.182% | 0.001% | 0.027% |
| pWISE9199 | 492 | 0.032% | 0.021% | 0.013% | 0.037% | 0.035% | 0.018% |
| pWISE10621 | 614 | 0.078% | 0.018% | 0.016% | 0.068% | 0.004% | 0.007% |
| pWISE10622 | 615 | 0.019% | 0.014% | 0.011% | 0.082% | 0.000% | 0.004% |
| pWISE10623 | 616 | 0.095% | 0.020% | 0.018% | 0.030% | 0.022% | 0.038% |
| pWISE10624 | 617 | No data | No data | No data | No data | No data | No data |
| pWISE10625 | 618 | 0.004% | 0.020% | 0.032% | 0.108% | 0.011% | 0.009% |
| pWISE9201 | 494 | No data | No data | No data | No data | No data | No data |
| pWISE10626 | 619 | 0.206% | 0.007% | 0.014% | 0.042% | 0.002% | 0.029% |
| pWISE10627 | 620 | 0.093% | 0.009% | 0.013% | 0.063% | 0.002% | 0.037% |
| pWISE10628 | 621 | 0.095% | 0.030% | 0.022% | 0.032% | 0.012% | 0.040% |
| pWISE10629 | 622 | 0.085% | 0.024% | 0.080% | 0.016% | 0.034% | 0.008% |
| pWISE10630 | 623 | 0.126% | 0.009% | 0.024% | 0.135% | 0.001% | 0.017% |

### Example 13

[0299] Circular permutants of an enzymatically inactive LbCas 12a enzyme (dLbCas12a (SEQ ID NO: 59)) were tested for adenine base editing by fusing an adenine deaminase to either the N-terminus or C-terminus of the circular permutant using a linker (e.g., GS-XTEN-GS linker (SEQ ID NO:30)) to provide a fusion protein. The fusion proteins and control (SEQ ID NO: 56) are listed in Table 107 and the targets are in Table 108.

TABLE 107
Tested constructs.

| | Vector SEQ | DNA SEQ | Protein SEQ |
|---|---|---|---|
| pWISE | ID NO: | ID NO: | ID NO: |
| pWISE121 | 259 | 246 | 56 |
| pWISE2918 | 534 | 517 | 498 |
| pWISE4922 | 535 | 518 | 501 |
| pWISE6854 | 536 | 519 | 502 |
| pWISE9193 | 520 | 503 | 486 |
| pWISE9194 | 521 | 504 | 487 |
| pWISE9195 | 522 | 505 | 488 |
| pWISE9196 | 523 | 506 | 489 |
| pWISE9197 | 524 | 507 | 490 |
| pWISE9198 | 525 | 508 | 491 |
| pWISE9199 | 526 | 509 | 492 |
| pWISE9200 | 527 | 510 | 493 |
| pWISE9201 | 528 | 511 | 494 |
| pWISE9202 | 529 | 512 | 495 |
| pWISE9203 | 530 | 513 | 496 |
| pWISE9204 | 531 | 514 | 497 |
| pWISE9205 | 532 | 515 | 498 |
| pWISE9206 | 533 | 516 | 499 |

TABLE 108
Targets

| Target Nucleic | Target SEQ | | Spacer SEQ | | Vector SEQ |
|---|---|---|---|---|---|
| Acid | ID NO: | Spacer | ID NO: | pWISE | ID NO: |
| human DNMT1 | 272 | PWsp143 | 275 | pWISE264 | 278 |
| human RNF2 | 274 | PWsp453 | 277 | pWISE882 | 280 |
| human RNF2 | 274 | PWsp454 | 865 | pWISE883 | 867 |
| human RNF2 | 274 | PWsp455 | 866 | pWISE884 | 868 |

[0300] The fusion proteins and controls were tested for their ability to perform base editing at four different sites in two target nucleic acids (SEQ ID NOs: 272 and 274) in HEK293T cells using four spacers (SEQ ID NOs: 275, 277, 865, and 866). A single biological replicate and two technical replicates were tested. HEK293T cells were seeded into 48-well collagen-coated plates (Corning) in the absence of an antibiotic using DMEM media. At 70-80% confluency, cells were transfected with 1.5 μL of LTX (ThermoFisher Scientific) using 500 ng of the control or fusion protein plasmid and 500 ng of guide RNA plasmid according to manufacturer's protocol. After 3 days, the cells were lysed with a crude extraction method using TritonX buffer. Each control or fusion protein was scored based on the precise base pair editing in the DNMT1 and RNF2 genes using the guide RNAs (SEQ ID NOs: 275, 277, 865, and 866). Low, background levels of INDEL formation were seen, which was expected from using a dead LbCas12a. The results are provided in Tables 109-116. The values in Tables 109-116 that are below 0.1% are considered to be in the noise of the instrument (below the limit of detection) and are not indicative of editing. Values that are between 0.1% and 0.5% indicate that editing is present in the experiment at the specified location, but the assay is not sensitive enough to accurately quantify the amount of base editing. As seen in Tables 109-116, the fusion proteins provided efficient A to G editing over a wide window and specifically had improved editing at positions at about 11-23 of the target sequence (e.g., towards the 3′ end of the spacer sequence such as about nucleotides 11-23).

TABLE 109

| | | Average A to G editing percent at the nucleotides numbered | | | | | | |
|---|---|---|---|---|---|---|---|---|
| | | according to the position in the PWsp143 spacer sequence on the | | | | | | |
| | Protein | opposite, target genomic DNA strand | | | | | | |
| pWISE | SEQ ID NO: | A.-5 | A.-4 | A.5 | A.8 | A.12 | A.21 | A.29 |
| pWISE121 | 56 | 0.040% | 0.027% | 0.074% | 0.041% | 0.125% | 0.178% | 0.068% |
| pWISE2918 | 498 | 0.011% | 0.007% | 0.016% | 11.995% | 6.888% | 0.022% | 0.003% |
| pWISE4922 | 501 | 0.007% | 0.008% | 0.012% | 9.682% | 5.775% | 0.015% | 0.005% |
| pWISE6854 | 502 | 0.008% | 0.009% | 0.003% | 9.957% | 8.127% | 0.017% | 0.002% |
| pWISE9193 | 486 | 0.011% | 0.005% | 0.006% | 7.469% | 9.656% | 0.428% | 0.006% |
| pWISE9194 | 487 | 0.007% | 0.009% | 0.005% | 0.263% | 0.743% | 0.011% | 0.004% |
| pWISE9195 | 488 | 0.009% | 0.009% | 0.005% | 6.490% | 4.719% | 0.116% | 0.003% |
| pWISE9196 | 489 | 0.014% | 0.006% | 0.008% | 0.018% | 0.037% | 0.005% | 0.007% |
| pWISE9197 | 490 | 0.009% | 0.004% | 0.002% | 0.200% | 0.253% | 0.024% | 0.003% |
| pWISE9198 | 491 | 0.012% | 0.008% | 0.013% | 3.181% | 4.674% | 0.730% | 0.007% |
| pWISE9199 | 492 | 0.010% | 0.007% | 0.007% | 12.833% | 9.471% | 0.154% | 0.005% |
| pWISE9200 | 493 | 0.011% | 0.008% | 0.005% | 1.576% | 2.793% | 0.014% | 0.003% |
| pWISE9201 | 494 | 0.012% | 0.006% | 0.014% | 15.834% | 12.845% | 0.041% | 0.004% |
| pWISE9202 | 495 | 0.013% | 0.004% | 0.007% | 0.064% | 0.097% | 0.008% | 0.004% |
| pWISE9203 | 496 | 0.011% | 0.010% | 0.010% | 0.188% | 0.149% | 0.024% | 0.004% |
| pWISE9204 | 497 | 0.011% | 0.005% | 0.011% | 2.930% | 3.058% | 0.040% | 0.005% |
| pWISE9205 | 498 | 0.016% | 0.009% | 0.009% | 10.916% | 6.529% | 0.031% | 0.001% |
| pWISE9206 | 499 | 0.011% | 0.008% | 0.013% | 13.570% | 9.223% | 0.038% | 0.007% |

TABLE 110

| | | Standard deviation of the average A to G editing percent at the | | | | | | |
|---|---|---|---|---|---|---|---|---|
| | | nucleotides numbered according to the position in the PWsp143 spacer | | | | | | |
| | Protein | sequence on the opposite, target genomic DNA strand | | | | | | |
| pWISE | SEQ ID NO: | A.-5 | A.-4 | A.5 | A.8 | A.12 | A.21 | A.29 |
| pWISE121 | 56 | 0.029% | 0.025% | 0.012% | 0.020% | 0.024% | 0.030% | 0.010% |
| pWISE2918 | 498 | 0.001% | 0.001% | 0.012% | 1.008% | 0.942% | 0.001% | 0.003% |
| pWISE4922 | 501 | 0.004% | 0.001% | 0.007% | 0.064% | 0.037% | 0.005% | 0.005% |
| pWISE6854 | 502 | 0.001% | 0.005% | 0.003% | 0.131% | 0.071% | 0.001% | 0.000% |
| pWISE9193 | 486 | 0.001% | 0.001% | 0.002% | 0.223% | 0.265% | 0.068% | 0.006% |
| pWISE9194 | 487 | 0.002% | 0.006% | 0.001% | 0.021% | 0.033% | 0.003% | 0.003% |
| pWISE9195 | 488 | 0.006% | 0.010% | 0.005% | 0.043% | 0.010% | 0.013% | 0.004% |
| pWISE9196 | 489 | 0.004% | 0.001% | 0.000% | 0.005% | 0.025% | 0.000% | 0.005% |
| pWISE9197 | 490 | 0.000% | 0.002% | 0.000% | 0.119% | 0.001% | 0.027% | 0.000% |
| pWISE9198 | 491 | 0.004% | 0.001% | 0.005% | 0.119% | 0.061% | 0.004% | 0.004% |
| pWISE9199 | 492 | 0.003% | 0.001% | 0.005% | 0.557% | 0.386% | 0.030% | 0.000% |
| pWISE9200 | 493 | 0.005% | 0.002% | 0.001% | 0.041% | 0.310% | 0.005% | 0.003% |
| pWISE9201 | 494 | No data | No data | No data | No data | No data | No data | No data |
| pWISE9202 | 495 | 0.002% | 0.005% | 0.003% | 0.005% | 0.036% | 0.003% | 0.001% |
| pWISE9203 | 496 | 0.009% | 0.007% | 0.004% | 0.032% | 0.047% | 0.021% | 0.000% |
| pWISE9204 | 497 | 0.001% | 0.001% | 0.003% | 0.297% | 0.345% | 0.011% | 0.001% |
| pWISE9205 | 498 | 0.002% | 0.002% | 0.008% | 0.480% | 0.399% | 0.006% | 0.001% |
| pWISE9206 | 499 | 0.002% | 0.000% | 0.006% | 1.112% | 1.163% | 0.022% | 0.001% |

TABLE 111

| | | Average A to G editing percent at the nucleotides | | | | |
|---|---|---|---|---|---|---|
| | | numbered according to the position in the PWsp453 spacer | | | | |
| | Protein | sequence on the opposite, target genomic DNA strand | | | | |
| pWISE | SEQ ID NO: | A.-9 | A.-5 | A.-1 | A.2 | A.5 |
| pWISE121 | 56 | 0.010% | 0.023% | 0.066% | 0.070% | 0.044% |
| pWISE2918 | 498 | 0.013% | 0.010% | 0.062% | 0.069% | 0.008% |
| pWISE4922 | 501 | 0.007% | 0.008% | 0.036% | 0.031% | 0.006% |
| pWISE6854 | 502 | 0.012% | 0.005% | 0.018% | 0.013% | 0.012% |
| pWISE9193 | 486 | 0.005% | 0.010% | 0.026% | 0.027% | 0.011% |
| pWISE9194 | 487 | 0.009% | 0.008% | 0.005% | 0.008% | 0.009% |
| pWISE9195 | 488 | 0.007% | 0.006% | 0.020% | 0.016% | 0.013% |
| pWISE9196 | 489 | 0.006% | 0.011% | 0.007% | 0.002% | 0.010% |
| pWISE9197 | 490 | 0.008% | 0.004% | 0.007% | 0.015% | 0.008% |
| pWISE9198 | 491 | 0.008% | 0.008% | 0.014% | 0.013% | 0.005% |
| pWISE9199 | 492 | 0.007% | 0.008% | 0.028% | 0.016% | 0.009% |
| pWISE9200 | 493 | 0.012% | 0.008% | 0.011% | 0.005% | 0.011% |
| pWISE9201 | 494 | 0.012% | 0.011% | 0.017% | 0.015% | 0.012% |
| pWISE9202 | 495 | 0.009% | 0.009% | 0.008% | 0.003% | 0.012% |
| pWISE9203 | 496 | 0.008% | 0.009% | 0.010% | 0.004% | 0.003% |
| pWISE9204 | 497 | 0.007% | 0.009% | 0.011% | 0.006% | 0.009% |
| pWISE9205 | 498 | 0.002% | 0.007% | 0.029% | 0.035% | 0.004% |
| pWISE9206 | 499 | 0.011% | 0.011% | 0.033% | 0.018% | 0.006% |

| | | Average A to G editing percent at the nucleotides | | | | |
|---|---|---|---|---|---|---|
| | | numbered according to the position in the PWsp453 spacer | | | | |
| | Protein | sequence on the opposite, target genomic DNA strand | | | | |
| pWISE | SEQ ID NO: | A.9 | A.11 | A.12 | A.15 | A.16 |
| pWISE121 | 56 | 0.167% | 0.202% | 0.133% | 0.288% | 0.468% |
| pWISE2918 | 498 | 15.699% | 8.331% | 1.175% | 0.125% | 0.346% |
| pWISE4922 | 501 | 8.769% | 4.554% | 0.679% | 0.056% | 0.233% |
| pWISE6854 | 502 | 17.069% | 8.802% | 1.183% | 0.034% | 0.080% |
| pWISE9193 | 486 | 9.895% | 6.919% | 2.544% | 0.383% | 1.229% |
| pWISE9194 | 487 | 0.274% | 0.083% | 0.035% | 0.016% | 0.023% |
| pWISE9195 | 488 | 4.762% | 1.886% | 0.494% | 0.045% | 0.191% |
| pWISE9196 | 489 | 0.036% | 0.017% | 0.008% | 0.015% | 0.038% |
| pWISE9197 | 490 | 0.115% | 0.035% | 0.020% | 0.023% | 0.020% |
| pWISE9198 | 491 | 0.733% | 0.301% | 0.138% | 0.022% | 0.046% |
| pWISE9199 | 492 | 13.056% | 9.143% | 4.276% | 0.517% | 2.073% |
| pWISE9200 | 493 | 1.157% | 0.413% | 0.103% | 0.021% | 0.015% |
| pWISE9201 | 494 | 16.951% | 12.556% | 5.241% | 0.311% | 0.957% |
| pWISE9202 | 495 | 0.121% | 0.056% | 0.008% | 0.012% | 0.011% |
| pWISE9203 | 496 | 0.087% | 0.043% | 0.015% | 0.018% | 0.025% |
| pWISE9204 | 497 | 3.333% | 2.669% | 1.116% | 0.081% | 0.210% |
| pWISE9205 | 498 | 12.136% | 6.316% | 0.861% | 0.101% | 0.298% |
| pWISE9206 | 499 | 13.817% | 9.508% | 3.601% | 0.191% | 0.610% |

| | | Average A to G editing percent at the nucleotides | | | | |
|---|---|---|---|---|---|---|
| | | numbered according to the position in the PWsp453 spacer | | | | |
| | Protein | sequence on the opposite, target genomic DNA strand | | | | |
| pWISE | SEQ ID NO: | A.18 | A.23 | A.27 | A.28 | A.31 |
| pWISE121 | 56 | 0.320% | 0.271% | 0.081% | 0.061% | 0.048% |
| pWISE2918 | 498 | 1.967% | 0.009% | 0.009% | 0.005% | 0.006% |
| pWISE4922 | 501 | 1.082% | 0.010% | 0.013% | 0.006% | 0.006% |
| pWISE6854 | 502 | 0.334% | 0.007% | 0.011% | 0.008% | 0.004% |
| pWISE9193 | 486 | 6.193% | 0.015% | 0.020% | 0.007% | 0.010% |
| pWISE9194 | 487 | 0.021% | 0.010% | 0.009% | 0.009% | 0.007% |
| pWISE9195 | 488 | 0.938% | 0.027% | 0.007% | 0.007% | 0.010% |
| pWISE9196 | 489 | 0.011% | 0.008% | 0.011% | 0.006% | 0.010% |
| pWISE9197 | 490 | 0.009% | 0.012% | 0.009% | 0.007% | 0.004% |
| pWISE9198 | 491 | 0.200% | 0.014% | 0.013% | 0.006% | 0.006% |
| pWISE9199 | 492 | 6.227% | 0.021% | 0.009% | 0.006% | 0.006% |
| pWISE9200 | 493 | 0.043% | 0.008% | 0.010% | 0.003% | 0.005% |
| pWISE9201 | 494 | 3.006% | 0.014% | 0.010% | 0.009% | 0.007% |
| pWISE9202 | 495 | 0.012% | 0.013% | 0.011% | 0.006% | 0.004% |
| pWISE9203 | 496 | 0.019% | 0.010% | 0.005% | 0.003% | 0.017% |
| pWISE9204 | 497 | 0.832% | 0.009% | 0.013% | 0.005% | 0.008% |
| pWISE9205 | 498 | 1.500% | 0.006% | 0.008% | 0.002% | 0.007% |
| pWISE9206 | 499 | 2.100% | 0.007% | 0.009% | 0.002% | 0.003% |

TABLE 112

| | | Standard deviation of the average A to G editing percent at the | | | | |
|---|---|---|---|---|---|---|
| | | nucleotides numbered according to the position in the PWsp453 | | | | |
| | Protein | spacer sequence on the opposite, target genomic DNA strand | | | | |
| pWISE | SEQ ID NO: | A.-9 | A.-5 | A.-1 | A.2 | A.5 |
| pWISE121 | 56 | 0.010% | 0.003% | 0.016% | 0.016% | 0.011% |
| pWISE2918 | 498 | 0.007% | 0.002% | 0.010% | 0.027% | 0.002% |
| pWISE4922 | 501 | 0.002% | 0.005% | 0.018% | 0.009% | 0.001% |
| pWISE6854 | 502 | 0.002% | 0.000% | 0.008% | 0.006% | 0.002% |
| pWISE9193 | 486 | 0.000% | 0.004% | 0.024% | 0.014% | 0.005% |
| pWISE9194 | 487 | 0.005% | 0.001% | 0.000% | 0.002% | 0.005% |
| pWISE9195 | 488 | 0.004% | 0.008% | 0.005% | 0.023% | 0.012% |
| pWISE9196 | 489 | 0.003% | 0.006% | 0.004% | 0.000% | 0.005% |
| pWISE9197 | 490 | No data | No data | No data | No data | No data |
| pWISE9198 | 491 | No data | No data | No data | No data | No data |
| pWISE9199 | 492 | 0.001% | 0.003% | 0.003% | 0.006% | 0.008% |
| pWISE9200 | 493 | 0.005% | 0.002% | 0.007% | 0.005% | 0.003% |
| pWISE9201 | 494 | 0.001% | 0.002% | 0.011% | 0.007% | 0.003% |
| pWISE9202 | 495 | 0.001% | 0.000% | 0.004% | 0.002% | 0.006% |
| pWISE9203 | 496 | 0.003% | 0.005% | 0.005% | 0.004% | 0.004% |
| pWISE9204 | 497 | 0.001% | 0.001% | 0.001% | 0.002% | 0.004% |
| pWISE9205 | 498 | 0.003% | 0.003% | 0.009% | 0.017% | 0.006% |
| pWISE9206 | 499 | 0.004% | 0.009% | 0.004% | 0.011% | 0.006% |
| | | Standard deviation of the average A to G editing percent at the | | | | |
| | | nucleotides numbered according to the position in the PWsp453 | | | | |
| | Protein | spacer sequence on the opposite, target genomic DNA strand | | | | |
| pWISE | SEQ ID NO: | A.9 | A.11 | A.12 | A.15 | A.16 |
| pWISE121 | 56 | 0.016% | 0.024% | 0.028% | 0.004% | 0.052% |
| pWISE2918 | 498 | 0.046% | 0.208% | 0.070% | 0.039% | 0.008% |
| pWISE4922 | 501 | 0.321% | 0.246% | 0.065% | 0.018% | 0.075% |
| pWISE6854 | 502 | 0.718% | 0.327% | 0.092% | 0.007% | 0.004% |
| pWISE9193 | 486 | 0.147% | 0.005% | 0.197% | 0.104% | 0.127% |
| pWISE9194 | 487 | 0.031% | 0.029% | 0.003% | 0.013% | 0.004% |
| pWISE9195 | 488 | 0.364% | 0.015% | 0.014% | 0.001% | 0.019% |
| pWISE9196 | 489 | 0.007% | 0.003% | 0.005% | 0.001% | 0.036% |
| pWISE9197 | 490 | No data | No data | No data | No data | No data |
| pWISE9198 | 491 | No data | No data | No data | No data | No data |
| pWISE9199 | 492 | 0.053% | 0.152% | 0.130% | 0.030% | 0.216% |
| pWISE9200 | 493 | 0.105% | 0.033% | 0.027% | 0.005% | 0.008% |
| pWISE9201 | 494 | 0.917% | 0.569% | 0.626% | 0.013% | 0.050% |
| pWISE9202 | 495 | 0.037% | 0.002% | 0.000% | 0.004% | 0.000% |
| pWISE9203 | 496 | 0.000% | 0.001% | 0.013% | 0.009% | 0.001% |
| pWISE9204 | 497 | 0.335% | 0.427% | 0.192% | 0.017% | 0.085% |
| pWISE9205 | 498 | 0.213% | 0.104% | 0.309% | 0.031% | 0.044% |
| pWISE9206 | 499 | 1.010% | 0.918% | 0.320% | 0.043% | 0.038% |
| | | Standard deviation of the average A to G editing percent at the | | | | |
| | | nucleotides numbered according to the position in the PWsp453 | | | | |
| | Protein | spacer sequence on the opposite, target genomic DNA strand | | | | |
| pWISE | SEQ ID NO: | A.18 | A.23 | A.27 | A.28 | A.31 |
| pWISE121 | 56 | 0.098% | 0.047% | 0.013% | 0.001% | 0.008% |
| pWISE2918 | 498 | 0.061% | 0.001% | 0.000% | 0.006% | 0.000% |
| pWISE4922 | 501 | 0.094% | 0.006% | 0.003% | 0.001% | 0.001% |
| pWISE6854 | 502 | 0.020% | 0.003% | 0.001% | 0.002% | 0.004% |
| pWISE9193 | 486 | 0.011% | 0.003% | 0.001% | 0.003% | 0.002% |
| pWISE9194 | 487 | 0.003% | 0.000% | 0.000% | 0.005% | 0.001% |
| pWISE9195 | 488 | 0.022% | 0.002% | 0.010% | 0.002% | 0.003% |
| pWISE9196 | 489 | 0.000% | 0.004% | 0.000% | 0.000% | 0.001% |
| pWISE9197 | 490 | No data | No data | No data | No data | No data |
| pWISE9198 | 491 | No data | No data | No data | No data | No data |
| pWISE9199 | 492 | 0.018% | 0.007% | 0.003% | 0.002% | 0.004% |
| pWISE9200 | 493 | 0.001% | 0.003% | 0.003% | 0.000% | 0.001% |
| pWISE9201 | 494 | 0.358% | 0.008% | 0.004% | 0.002% | 0.001% |
| pWISE9202 | 495 | 0.001% | 0.001% | 0.000% | 0.002% | 0.004% |
| pWISE9203 | 496 | 0.000% | 0.003% | 0.002% | 0.004% | 0.011% |
| pWISE9204 | 497 | 0.067% | 0.001% | 0.008% | 0.001% | 0.007% |
| pWISE9205 | 498 | 0.043% | 0.001% | 0.003% | 0.003% | 0.002% |
| pWISE9206 | 499 | 0.111% | 0.002% | 0.004% | 0.002% | 0.001% |

TABLE 113

| | | Average A to G editing percent at the nucleotides | | | | | | | |
|---|---|---|---|---|---|---|---|---|---|
| | | numbered according to the position in the PWsp454 spacer | | | | | | | |
| | Protein | sequence on the opposite, target genomic DNA strand | | | | | | | |
| pWISE | SEQ ID NO: | A.-5 | A.-1 | A.2 | A.9 | A.11 | A.23 | A.27 | A.32 |
| pWISE121 | 56 | 0.014% | 0.025% | 0.042% | 0.102% | 0.063% | 0.188% | 0.161% | 0.060% |
| pWISE2918 | 498 | 0.002% | 0.014% | 0.002% | 10.929% | 11.829% | 0.011% | 0.015% | 0.003% |
| pWISE4922 | 501 | 0.004% | 0.004% | 0.002% | 7.989% | 8.529% | 0.005% | 0.005% | 0.004% |
| pWISE6854 | 502 | 0.002% | 0.006% | 0.005% | 7.648% | 8.799% | 0.010% | 0.004% | 0.010% |
| pWISE9193 | 486 | 0.007% | 0.003% | 0.002% | 7.465% | 10.715% | 0.023% | 0.003% | 0.011% |
| pWISE9194 | 487 | 0.006% | 0.004% | 0.004% | 0.096% | 0.404% | 0.012% | 0.008% | 0.007% |
| pWISE9195 | 488 | 0.003% | 0.003% | 0.009% | 5.314% | 7.055% | 0.024% | 0.005% | 0.005% |
| pWISE9196 | 489 | 0.007% | 0.003% | 0.003% | 0.018% | 0.018% | 0.008% | 0.004% | 0.005% |
| pWISE9197 | 490 | 0.006% | 0.001% | 0.005% | 0.093% | 0.388% | 0.012% | 0.005% | 0.005% |
| pWISE9198 | 491 | 0.010% | 0.003% | 0.007% | 0.743% | 2.436% | 0.039% | 0.020% | 0.004% |
| pWISE9199 | 492 | 0.004% | 0.000% | 0.007% | 7.638% | 8.686% | 0.010% | 0.002% | 0.007% |
| pWISE9200 | 493 | 0.005% | 0.002% | 0.002% | 0.827% | 2.586% | 0.012% | 0.003% | 0.007% |
| pWISE9201 | 494 | 0.005% | 0.002% | 0.005% | 9.689% | 10.575% | 0.022% | 0.002% | 0.005% |
| pWISE9202 | 495 | 0.004% | 0.001% | 0.006% | 0.038% | 0.137% | 0.010% | 0.005% | 0.005% |
| pWISE9203 | 496 | 0.009% | 0.004% | 0.000% | 0.054% | 0.091% | 0.006% | 0.003% | 0.005% |
| pWISE9204 | 497 | 0.004% | 0.003% | 0.008% | 2.223% | 2.468% | 0.012% | 0.003% | 0.012% |
| pWISE9205 | 498 | 0.000% | 0.003% | 0.001% | 8.947% | 9.565% | 0.012% | 0.005% | 0.003% |
| pWISE9206 | 499 | 0.005% | 0.003% | 0.003% | 9.336% | 10.616% | 0.005% | 0.003% | 0.003% |

TABLE 114

| | | Standard deviation of the average A to G editing percent at the nucleotides | | | | | | | |
|---|---|---|---|---|---|---|---|---|---|
| | | numbered according to the position in the PWsp454 spacer sequence on the | | | | | | | |
| | Protein | opposite, target genomic DNA strand | | | | | | | |
| pWISE | SEQ ID NO: | A.-5 | A.-1 | A.2 | A.9 | A.11 | A.23 | A.27 | A.32 |
| pWISE121 | 56 | 0.002% | 0.009% | 0.015% | 0.005% | 0.016% | 0.013% | 0.001% | 0.003% |
| pWISE2918 | 498 | No data | No data | No data | No data | No data | No data | No data | No data |
| pWISE4922 | 501 | 0.001% | 0.003% | 0.003% | 0.309% | 0.327% | 0.008% | 0.001% | 0.000% |
| pWISE6854 | 502 | 0.001% | 0.000% | 0.007% | 1.032% | 1.063% | 0.007% | 0.002% | 0.002% |
| pWISE9193 | 486 | 0.001% | 0.002% | 0.004% | 0.781% | 0.522% | 0.000% | 0.002% | 0.007% |
| pWISE9194 | 487 | 0.001% | 0.001% | 0.001% | 0.005% | 0.061% | 0.006% | 0.006% | 0.002% |
| pWISE9195 | 488 | 0.005% | 0.005% | 0.011% | 0.207% | 0.137% | 0.019% | 0.000% | 0.000% |
| pWISE9196 | 489 | 0.000% | 0.002% | 0.001% | 0.015% | 0.002% | 0.001% | 0.004% | 0.000% |
| pWISE9197 | 490 | 0.004% | 0.001% | 0.001% | 0.001% | 0.029% | 0.003% | 0.002% | 0.003% |
| pWISE9198 | 491 | No data | No data | No data | No data | No data | No data | No data | No data |
| pWISE9199 | 492 | 0.001% | 0.000% | 0.001% | 0.465% | 0.453% | 0.003% | 0.001% | 0.004% |
| pWISE9200 | 493 | 0.003% | 0.001% | 0.003% | 0.062% | 0.045% | 0.006% | 0.002% | 0.001% |
| pWISE9201 | 494 | 0.001% | 0.001% | 0.001% | 0.125% | 0.162% | 0.009% | 0.001% | 0.001% |
| pWISE9202 | 495 | 0.000% | 0.002% | 0.001% | 0.010% | 0.031% | 0.001% | 0.000% | 0.001% |
| pWISE9203 | 496 | 0.004% | 0.003% | 0.000% | 0.040% | 0.038% | 0.008% | 0.004% | 0.001% |
| pWISE9204 | 497 | 0.004% | 0.004% | 0.007% | 0.072% | 0.174% | 0.001% | 0.005% | 0.012% |
| pWISE9205 | 498 | No data | No data | No data | No data | No data | No data | No data | No data |
| pWISE9206 | 499 | No data | No data | No data | No data | No data | No data | No data | No data |

TABLE 115

| | |
|---|---|
| | Average A to G editing percent at the nucleotides numbered |
| | according to the position in the PWsp455 spacer sequence on the |
| Protein | opposite, target genomic DNA strand |

| pWISE | SEQ ID NO: | A.-8 | A.-6 | A.-1 | A.2 | A.3 | A.5 | A.8 |
|---|---|---|---|---|---|---|---|---|
| pWISE121 | 56 | 0.037% | 0.045% | 0.091% | 0.133% | 0.169% | 0.059% | 0.156% |
| pWISE2918 | 498 | 0.007% | 0.006% | 0.002% | 0.009% | 0.016% | 0.064% | 9.360% |
| pWISE4922 | 501 | 0.008% | 0.006% | 0.008% | 0.005% | 0.009% | 0.060% | 7.634% |
| pWISE6854 | 502 | 0.005% | 0.006% | 0.006% | 0.007% | 0.010% | 0.010% | 3.180% |
| pWISE9193 | 486 | 0.007% | 0.006% | 0.003% | 0.008% | 0.017% | 0.046% | 5.543% |
| pWISE9194 | 487 | 0.004% | 0.012% | 0.010% | 0.009% | 0.009% | 0.010% | 0.023% |
| pWISE9195 | 488 | 0.009% | 0.005% | 0.015% | 0.006% | 0.011% | 0.029% | 2.109% |
| pWISE9196 | 489 | 0.004% | 0.006% | 0.004% | 0.007% | 0.008% | 0.013% | 0.024% |
| pWISE9197 | 490 | 0.004% | 0.006% | 0.004% | 0.003% | 0.011% | 0.009% | 0.035% |
| pWISE9198 | 491 | 0.007% | 0.002% | 0.005% | 0.011% | 0.007% | 0.008% | 1.761% |
| pWISE9199 | 492 | 0.015% | 0.006% | 0.009% | 0.003% | 0.011% | 0.055% | 9.347% |
| pWISE9200 | 493 | 0.007% | 0.013% | 0.008% | 0.009% | 0.010% | 0.012% | 0.126% |
| pWISE9201 | 494 | 0.018% | 0.004% | 0.007% | 0.003% | 0.017% | 0.075% | 13.795% |
| pWISE9202 | 495 | 0.010% | 0.004% | 0.006% | 0.008% | 0.010% | 0.005% | 0.139% |
| pWISE9203 | 496 | 0.009% | 0.005% | 0.003% | 0.011% | 0.008% | 0.011% | 0.030% |
| pWISE9204 | 497 | 0.012% | 0.008% | 0.006% | 0.009% | 0.006% | 0.019% | 1.933% |
| pWISE9205 | 498 | 0.008% | 0.004% | 0.004% | 0.007% | 0.011% | 0.034% | 5.608% |
| pWISE9206 | 499 | 0.016% | 0.005% | 0.015% | 0.019% | 0.011% | 0.118% | 10.168% |

| | | Average A to G editing percent at the nucleotides numbered | | | | | | |
|---|---|---|---|---|---|---|---|---|
| | | according to the position in the PWsp455 spacer sequence on the | | | | | | |
| | Protein | opposite, target genomic DNA strand | | | | | | |
| pWISE | SEQ ID NO: | A.9 | A.10 | A.11 | A.15 | A.16 | A.17 | A.19 |
| pWISE121 | 56 | 0.323% | 0.304% | 0.261% | 1.356% | 1.577% | 1.071% | 0.355% |
| pWISE2918 | 498 | 6.675% | 2.657% | 4.690% | 1.004% | 0.024% | 0.025% | 0.182% |
| pWISE4922 | 501 | 5.449% | 2.362% | 3.960% | 0.726% | 0.024% | 0.025% | 0.144% |
| pWISE6854 | 502 | 2.123% | 0.749% | 1.482% | 0.339% | 0.026% | 0.018% | 0.076% |
| pWISE9193 | 486 | 3.610% | 2.551% | 6.447% | 1.400% | 0.035% | 0.030% | 0.456% |
| pWISE9194 | 487 | 0.020% | 0.014% | 0.033% | 0.013% | 0.017% | 0.012% | 0.009% |
| pWISE9195 | 488 | 1.524% | 1.506% | 4.362% | 1.156% | 0.028% | 0.011% | 0.230% |
| pWISE9196 | 489 | 0.022% | 0.013% | 0.032% | 0.014% | 0.012% | 0.016% | 0.016% |
| pWISE9197 | 490 | 0.041% | 0.014% | 0.041% | 0.003% | 0.008% | 0.014% | 0.005% |
| pWISE9198 | 491 | 1.202% | 1.744% | 5.841% | 0.386% | 0.028% | 0.034% | 0.228% |
| pWISE9199 | 492 | 7.609% | 3.561% | 6.885% | 0.797% | 0.019% | 0.027% | 0.139% |
| pWISE9200 | 493 | 0.085% | 0.052% | 0.158% | 0.041% | 0.008% | 0.005% | 0.012% |
| pWISE9201 | 494 | 11.036% | 6.672% | 12.328% | 0.951% | 0.041% | 0.026% | 0.221% |
| pWISE9202 | 495 | 0.075% | 0.046% | 0.319% | 0.029% | 0.028% | 0.025% | 0.038% |
| pWISE9203 | 496 | 0.028% | 0.018% | 0.022% | 0.015% | 0.008% | 0.008% | 0.011% |
| pWISE9204 | 497 | 1.699% | 1.520% | 2.776% | 0.404% | 0.040% | 0.026% | 0.178% |
| pWISE9205 | 498 | 3.956% | 1.720% | 2.781% | 0.606% | 0.020% | 0.010% | 0.091% |
| pWISE9206 | 499 | 7.342% | 3.719% | 7.520% | 0.550% | 0.024% | 0.037% | 0.181% |
| | | Average A to G editing percent at the nucleotides numbered | | | | | | |
| | | according to the position in the PWsp455 spacer sequence on the | | | | | | |
| | Protein | opposite, target genomic DNA strand | | | | | | |
| pWISE | SEQ ID NO: | A.21 | A.22 | A.24 | A.26 | A.28 | A.31 | A.32 |
| pWISE121 | 56 | 0.290% | 0.354% | 0.153% | 0.102% | 0.047% | 0.045% | 0.043% |
| pWISE2918 | 498 | 0.017% | 0.064% | 0.046% | 0.005% | 0.005% | 0.005% | 0.007% |
| pWISE4922 | 501 | 0.024% | 0.044% | 0.025% | 0.003% | 0.009% | 0.009% | 0.008% |
| pWISE6854 | 502 | 0.020% | 0.028% | 0.005% | 0.006% | 0.010% | 0.007% | 0.012% |
| pWISE9193 | 486 | 0.197% | 0.051% | 0.220% | 0.027% | 0.007% | 0.016% | 0.007% |
| pWISE9194 | 487 | 0.006% | 0.012% | 0.009% | 0.011% | 0.010% | 0.005% | 0.005% |
| pWISE9195 | 488 | 0.116% | 0.086% | 0.116% | 0.029% | 0.008% | 0.015% | 0.005% |
| pWISE9196 | 489 | 0.011% | 0.018% | 0.027% | 0.009% | 0.008% | 0.007% | 0.004% |
| pWISE9197 | 490 | 0.015% | 0.021% | 0.009% | 0.005% | 0.015% | 0.001% | 0.003% |
| pWISE9198 | 491 | 0.222% | 0.117% | 0.341% | 0.093% | 0.013% | 0.007% | 0.002% |
| pWISE9199 | 492 | 0.022% | 0.034% | 0.021% | 0.011% | 0.004% | 0.003% | 0.006% |
| pWISE9200 | 493 | 0.010% | 0.006% | 0.004% | 0.007% | 0.010% | 0.008% | 0.009% |
| pWISE9201 | 494 | 0.056% | 0.074% | 0.066% | 0.017% | 0.011% | 0.010% | 0.006% |
| pWISE9202 | 495 | 0.029% | 0.021% | 0.030% | 0.014% | 0.013% | 0.008% | 0.005% |
| pWISE9203 | 496 | 0.012% | 0.014% | 0.013% | 0.006% | 0.009% | 0.010% | 0.006% |
| pWISE9204 | 497 | 0.021% | 0.017% | 0.045% | 0.022% | 0.005% | 0.010% | 0.005% |
| pWISE9205 | 498 | 0.012% | 0.025% | 0.021% | 0.006% | 0.010% | 0.007% | 0.005% |
| pWISE9206 | 499 | 0.030% | 0.050% | 0.032% | 0.015% | 0.004% | 0.006% | 0.003% |

TABLE 116

| | | Standard deviation of the average A to G editing percent at the | | | | | | |
|---|---|---|---|---|---|---|---|---|
| | | nucleotides numbered according to the position in the PWsp455 | | | | | | |
| | Protein | spacer sequence on the opposite, target genomic DNA strand | | | | | | |
| pWISE | SEQ ID NO: | A.-8 | A.-6 | A.-1 | A.2 | A.3 | A.5 | A.8 |
| pWISE121 | 56 | 0.000% | 0.025% | 0.050% | 0.041% | 0.000% | 0.011% | 0.009% |
| pWISE2918 | 498 | No data | No data | No data | No data | No data | No data | No data |
| pWISE4922 | 501 | 0.004% | 0.001% | 0.007% | 0.005% | 0.001% | 0.021% | 1.149% |
| pWISE6854 | 502 | 0.001% | 0.005% | 0.000% | 0.008% | 0.001% | 0.006% | 0.301% |
| pWISE9193 | 486 | 0.001% | 0.003% | 0.002% | 0.002% | 0.002% | 0.024% | 0.837% |
| pWISE9194 | 487 | 0.002% | 0.002% | 0.002% | 0.004% | 0.002% | 0.009% | 0.006% |
| pWISE9195 | 488 | No data | No data | No data | No data | No data | No data | No data |
| pWISE9196 | 489 | 0.002% | 0.003% | 0.000% | 0.003% | 0.002% | 0.004% | 0.006% |
| pWISE9197 | 490 | 0.005% | 0.003% | 0.005% | 0.004% | 0.006% | 0.013% | 0.028% |
| pWISE9198 | 491 | 0.010% | 0.002% | 0.004% | 0.006% | 0.010% | 0.001% | 0.002% |
| pWISE9199 | 492 | 0.007% | 0.002% | 0.009% | 0.000% | 0.005% | 0.001% | 0.222% |
| pWISE9200 | 493 | 0.001% | 0.002% | 0.002% | 0.001% | 0.005% | 0.001% | 0.002% |
| pWISE9201 | 494 | 0.002% | 0.003% | 0.003% | 0.002% | 0.006% | 0.026% | 0.261% |
| pWISE9202 | 495 | 0.007% | 0.001% | 0.002% | 0.002% | 0.008% | 0.004% | 0.015% |
| pWISE9203 | 496 | 0.003% | 0.003% | 0.001% | 0.004% | 0.002% | 0.009% | 0.004% |
| pWISE9204 | 497 | 0.002% | 0.002% | 0.001% | 0.000% | 0.003% | 0.001% | 0.136% |
| pWISE9205 | 498 | 0.003% | 0.001% | 0.001% | 0.003% | 0.001% | 0.003% | 0.431% |
| pWISE9206 | 499 | 0.012% | 0.006% | 0.004% | 0.002% | 0.009% | 0.044% | 0.103% |
| | | Standard deviation of the average A to G editing percent at the | | | | | | |
| | | nucleotides numbered according to the position in the PWsp455 | | | | | | |
| | Protein | spacer sequence on the opposite, target genomic DNA strand | | | | | | |
| pWISE | SEQ ID NO: | A.9 | A.10 | A.11 | A.15 | A.16 | A.17 | A.19 |
| pWISE121 | 56 | 0.029% | 0.045% | 0.035% | 0.017% | 0.039% | 0.096% | 0.023% |
| pWISE2918 | 498 | No data | No data | No data | No data | No data | No data | No data |
| pWISE4922 | 501 | 0.778% | 0.267% | 0.559% | 0.074% | 0.005% | 0.012% | 0.038% |
| pWISE6854 | 502 | 0.163% | 0.059% | 0.284% | 0.064% | 0.004% | 0.007% | 0.002% |
| pWISE9193 | 486 | 0.837% | 0.486% | 1.261% | 0.322% | 0.015% | 0.022% | 0.133% |
| pWISE9194 | 487 | 0.007% | 0.007% | 0.012% | 0.001% | 0.003% | 0.004% | 0.004% |
| pWISE9195 | 488 | No data | No data | No data | No data | No data | No data | No data |
| pWISE9196 | 489 | 0.019% | 0.010% | 0.009% | 0.005% | 0.011% | 0.006% | 0.000% |
| pWISE9197 | 490 | 0.019% | 0.012% | 0.026% | 0.004% | 0.012% | 0.012% | 0.006% |
| pWISE9198 | 491 | 0.046% | 0.068% | 0.458% | 0.001% | 0.007% | 0.025% | 0.038% |
| pWISE9199 | 492 | 0.056% | 0.150% | 0.063% | 0.030% | 0.001% | 0.002% | 0.019% |
| pWISE9200 | 493 | 0.016% | 0.011% | 0.007% | 0.005% | 0.004% | 0.002% | 0.010% |
| pWISE9201 | 494 | 0.169% | 0.228% | 0.261% | 0.055% | 0.006% | 0.019% | 0.026% |
| pWISE9202 | 495 | 0.036% | 0.009% | 0.071% | 0.008% | 0.012% | 0.004% | 0.002% |
| pWISE9203 | 496 | 0.002% | 0.010% | 0.001% | 0.004% | 0.002% | 0.001% | 0.009% |
| pWISE9204 | 497 | 0.118% | 0.087% | 0.271% | 0.019% | 0.000% | 0.003% | 0.012% |
| pWISE9205 | 498 | 0.062% | 0.078% | 0.065% | 0.004% | 0.010% | 0.006% | 0.069% |
| pWISE9206 | 499 | 0.079% | 0.003% | 0.111% | 0.040% | 0.009% | 0.015% | 0.012% |
| | | Standard deviation of the average A to G editing percent at the | | | | | | |
| | | nucleotides numbered according to the position in the PWsp455 | | | | | | |
| | Protein | spacer sequence on the opposite, target genomic DNA strand | | | | | | |
| pWISE | SEQ ID NO: | A.21 | A.22 | A.24 | A.26 | A.28 | A.31 | A.32 |
| pWISE121 | 56 | 0.015% | 0.041% | 0.099% | 0.049% | 0.018% | 0.001% | 0.016% |
| pWISE2918 | 498 | No data | No data | No data | No data | No data | No data | No data |
| pWISE4922 | 501 | 0.000% | 0.005% | 0.013% | 0.002% | 0.001% | 0.003% | 0.003% |
| pWISE6854 | 502 | 0.005% | 0.012% | 0.006% | 0.000% | 0.001% | 0.003% | 0.011% |
| pWISE9193 | 486 | 0.033% | 0.017% | 0.023% | 0.010% | 0.002% | 0.002% | 0.003% |
| pWISE9194 | 487 | 0.004% | 0.000% | 0.004% | 0.008% | 0.004% | 0.002% | 0.000% |
| pWISE9195 | 488 | No data | No data | No data | No data | No data | No data | No data |
| pWISE9196 | 489 | 0.002% | 0.004% | 0.010% | 0.002% | 0.002% | 0.001% | 0.003% |
| pWISE9197 | 490 | 0.001% | 0.003% | 0.008% | 0.006% | 0.001% | 0.001% | 0.004% |
| pWISE9198 | 491 | 0.083% | 0.018% | 0.020% | 0.068% | 0.002% | 0.001% | 0.002% |
| pWISE9199 | 492 | 0.004% | 0.014% | 0.016% | 0.001% | 0.000% | 0.000% | 0.005% |
| pWISE9200 | 493 | 0.008% | 0.002% | 0.001% | 0.001% | 0.008% | 0.004% | 0.001% |
| pWISE9201 | 494 | 0.007% | 0.005% | 0.007% | 0.009% | 0.002% | 0.002% | 0.005% |
| pWISE9202 | 495 | 0.011% | 0.009% | 0.014% | 0.017% | 0.000% | 0.000% | 0.002% |
| pWISE9203 | 496 | 0.007% | 0.002% | 0.007% | 0.001% | 0.004% | 0.008% | 0.002% |
| pWISE9204 | 497 | 0.001% | 0.004% | 0.003% | 0.007% | 0.002% | 0.010% | 0.000% |
| pWISE9205 | 498 | 0.008% | 0.005% | 0.007% | 0.005% | 0.002% | 0.002% | 0.000% |
| pWISE9206 | 499 | 0.017% | 0.039% | 0.003% | 0.004% | 0.005% | 0.000% | 0.004% |

### Example 14

[0301] Arginine substitution variants of circular permutants described in Example 1 were tested in HEK293T cells to examine their ability to target different PAM site sequences. The arginine mutations were analogous to G532R and K595R mutations in LbCas12a. The circular permutants and the control are listed in Table 117. The arginine mutations are numbered according to the protein sequence listed in the fourth column of Table 31.

TABLE 117
Tested constructs.

| | Vector SEQ | DNA SEQ | | Protein SEQ |
|---|---|---|---|---|
| pWISE | ID NO: | ID NO: | Description | ID NO: |
| pWISE121 | 259 | 246 | WT − LbCas12a (control) | 56 |
| pWISE3559 | 713 | 709 | G532R + K595R − LbCas12a | 705 |
| pWISE10850 | 710 | 706 | G447R + K510R − CP02 | 702 |
| pWISE10851 | 711 | 707 | G619R + K682R − CP06 | 703 |
| pWISE10852 | 712 | 708 | G15R + K78R − CP08 | 704 |

TABLE 118

| | Target | | Spacer | | Vector | |
|---|---|---|---|---|---|---|
| Target | SEQ | | SEQ | | SEQ | PAM |
| Nucleic Acid | ID NO: | Spacer | ID NO: | pWISE | ID NO: | target |
| EMX1 | 887 | PWsp837 | 889 | pWISE2457 | 918 | ACCG |
| EMX1 | 887 | PWsp836 | 890 | pWISE2458 | 919 | ACCG |
| EMX1 | 887 | PWsp815 | 891 | pWISE2479 | 920 | ACCG |
| EMX1 | 887 | PWsp811 | 892 | pWISE2483 | 921 | CCCA |
| DNMT1 | 272 | PWsp786 | 893 | pWISE2508 | 922 | CCCA |
| DNMT1 | 272 | PWsp781 | 894 | pWISE2513 | 923 | CCCA |
| HEK2 | 872 | PWsp985 | 895 | pWISE2309 | 924 | GCCC |
| FANCF | 273 | PWsp972 | 896 | pWISE2322 | 925 | GCCC |
| FANCF | 273 | PWsp946 | 897 | pWISE2348 | 926 | GCCC |
| RNF2 | 274 | PWsp1292 | 898 | pWISE3611 | 927 | ACTA |
| HEK3 | 883 | PWsp1295 | 899 | pWISE3614 | 928 | ACTA |
| FANCF | 273 | PWsp1317 | 900 | pWISE3636 | 929 | ACTA |
| HEK3 | 883 | PWsp1298 | 901 | pWISE3617 | 930 | GTCG |
| FANCF | 273 | PWsp1326 | 902 | pWISE3645 | 931 | GTCG |
| FANCF | 273 | PWsp1341 | 903 | pWISE3658 | 932 | GTCG |
| DNMT1 | 272 | PWsp2381 | 904 | pWISE7545 | 933 | CTTA |
| AAVS1 | 863 | PWsp1940 | 905 | pWISE5966 | 934 | CTTA |
| AAVS1 | 863 | PWsp1943 | 906 | pWISE5969 | 935 | CTTA |
| FANCF | 273 | PWsp869 | 907 | pWISE2425 | 936 | GCCG |
| EMX1 | 887 | PWsp802 | 908 | pWISE2492 | 937 | GCCG |
| DNMT1 | 272 | PWsp766 | 909 | pWISE2529 | 938 | GCCG |
| DNMT1 | 272 | PWsp2463 | 910 | pWISE7860 | 939 | TTCA |
| FANCF | 273 | PWsp2464 | 911 | pWISE7861 | 940 | TTCA |
| HEK2 | 872 | PWsp2465 | 912 | pWISE7862 | 941 | TTCA |
| AAVS1 | 863 | PWsp2444 | 913 | pWISE7841 | 942 | CCCC |
| AAVS1 | 863 | PWsp2445 | 914 | pWISE7842 | 943 | CCCC |
| DNMT1 | 272 | PWsp2447 | 915 | pWISE7844 | 944 | CCCC |
| DNMT1 | 272 | PWsp143 | 275 | pWISE264 | 278 | TTTG |
| DNMT1 | 272 | PWsp137 | 916 | pWISE2360 | 945 | TTTC |
| DNMT1 | 272 | PWsp139 | 917 | pWISE258 | 946 | TTTC |

[0302] The circular permutants and control were tested for their ability to generate INDELS in the AAVS1, DNMT1, EMX1, FANCF, HEK2, HEK3, and RNF2 genes (SEQ ID NOs: 272-274, 863, 872, 887, and 888) in HEK293T cells using the spacers according to SEQ ID NOs: 275 and 889-917. Three biological replicates and one technical replicate were tested. HEK293T cells were seeded into 48-well collagen-coated plates (Corning) in the absence of an antibiotic using DMEM media. At 70-80% confluency, cells were transfected with 1.5 μL of LTX (ThermoFisher Scientific) using 500 ng of the control or circular permutant plasmid and 500 ng of guide RNA plasmid according to manufacturer's protocol. After 3 days, the cells were lysed with a crude extraction method using TritonX buffer. Each control or circular permutant was scored based on the precise base pair editing and indel placement percentage in the AAVS1, DNMT1, EMX1, FANCF, HEK2, HEK3, and RNF2 genes using the guide RNAs. Results are provided in FIGS. 24 and 25 and demonstrate that the two arginine mutations enabled recognition of non-canonical (e.g., non-TTTV) PAM sequences similar to the linear LbCas12a comprising the arginine mutations (SEQ ID NO:705).

[0303] The foregoing is illustrative of the present invention, and is not to be construed as limiting thereof. The invention is defined by the following claims, with equivalents of the claims to be included therein.

1. A polypeptide comprising a circular permutant of a Cas12a or an engineered protein that comprises a Cas12a polypeptide,
wherein the circular permutant binds to a nucleic acid.

2. The polypeptide of claim 1, wherein the circular permutant comprises a linker between two amino acid residues of the circular permutant.

3. The polypeptide of claim 2, wherein one of the two amino acid residues is located at the N-terminal end of the Cas12a or engineered protein and the other of the two amino acid residues is located at the C-terminal end of the Cas12a or engineered protein.

4. The polypeptide of claim 2, wherein the linker has a length of 1 amino acid to 20 amino acids.

5. (canceled)

6. The polypeptide of claim 1, wherein the circular permutant has a different editing window than that of the Cas12a or engineered protein.

7. The polypeptide of claim 1, wherein the circular permutant has increased nuclease activity compared to the Cas12a or engineered protein.

8.-9. (canceled)

10. The polypeptide of claim 1, wherein the circular permutant binds a target nucleic acid.

11. The polypeptide of claim 1, wherein the circular permutant has increased stability compared to the Cas12a or engineered protein, increased RNase activity compared to the Cas12a or engineered protein, modified crRNA binding compared to the Cas12a or engineered protein, and/or modified PAM access compared to the Cas12a or engineered protein.

12.-14. (canceled)

15. The polypeptide of claim 1, wherein the circular permutant has at least one improvement compared to a protein comprising an amino acid sequence of any one of SEQ ID NOs: 39-65, 69-132, 159-182, 281-284, 298, 400-401, 741, 761, and 850-861.

16. The polypeptide of claim 1, further comprising a cytosine deaminase.

17. The polypeptide of claim 1, further comprising a glycosylase inhibitor.

18. The polypeptide of claim 1, further comprising an adenine deaminase.

19. The polypeptide of claim 1, further comprising a reverse transcriptase.

20. The polypeptide of claim 1, wherein the polypeptide comprises having an amino acid sequence comprising at least 70% sequence identity to one or more of SEQ ID NOs: 234-245, 299-310, 351-362, 390-399, 450-461, 486-497, 537-560, 609-639, 702-704, 735-740, and 757-760.

21. A polypeptide comprising a first amino acid sequence having at least 70% sequence identity to a portion of one of SEQ ID NOs: 39-65, 69-132, 159-182, 281-284, 298, 400-401, 741, 761, and 850-861, wherein the portion of the one of SEQ ID NOs: 39-65, 69-132, 159-182, 281-284, 298, 400-401, 741, 761, and 850-861 includes the N-terminus of the one of SEQ ID NOs: 39-65, 69-132, 159-182, 281-284, 298, 400-401, 741, 761, and 850-861 and is less than the entire amino acid sequence of SEQ ID NOs: 39-65, 69-132, 159-182, 281-284, 298, 400-401, 741, 761, and 850-861 and the N-terminus of the one of SEQ ID NOs: 39-65, 69-132, 159-182, 281-284, 298, 400-401, 741, 761, and 850-861 is at or after amino acid residue 70 of the polypeptide.

22.-40. (canceled)

41. A complex comprising:
the polypeptide of claim 1; and
a guide nucleic acid.

42.-50. (canceled)

51. An expression cassette comprising:
a polynucleotide encoding a promoter sequence, and
a polynucleotide having at least 70% sequence identity to one or more of SEQ ID NOs: 247-258, 286-297, 327-338, 364-375, 402-411, 462-473, 503-514, 561-584, 640-670, 706-708, 742-747, 763-766, 784, and 787 and/or encoding a polypeptide that has at least 70% sequence identity to one or more of SEQ ID NOs: 234-245, 299-310, 351-362, 390-399, 450-461, 486-497, 537-560, 609-639, 702-704, 735-740, and 757-760,
optionally wherein the polynucleotide encoding the polypeptide is codon-optimized for expression in the organism.

52.-56. (canceled)

57. A method for producing the polypeptide of claim 1, the method comprising:
culturing a cell or group of cells that have been transformed with a nucleic acid encoding the polypeptide; and
isolating said polypeptide, thereby producing the polypeptide.

58. A method of modifying a target nucleic acid, the method comprising:
contacting the target nucleic acid with:
the polypeptide of claim 1; and
a guide nucleic acid, thereby modifying the target nucleic acid.

59.-60. (canceled)

61. The polypeptide of claim 1, wherein the circular permutant has nuclease activity.

The application's sequence listing, which the Patent Office published only in electronic form, follows.

SEQUENCE LISTING (951 sequences)

SEQ ID NO: 1 - protein, 36 aa, synthetic construct
EKSKNDRSKPQPSDDRDRQPPSGEDYPEWKAPGEYE

SEQ ID NO: 2 - protein, 34 aa, synthetic construct
QEPKPQDQSSEVPPPPGSQKPGTKEPHDSKSSGP

SEQ ID NO: 3 - protein, 34 aa, synthetic construct
PDNSSGQKLQLPQPSDKPQDSREKSDSLPSDKRD

SEQ ID NO: 4 - protein, 36 aa, synthetic construct
PDNSTLQTLQLPQPTPSSTDTQQTSDTDPEDTTDVI

SEQ ID NO: 5 - protein, 30 aa, synthetic construct
STSQSDGSSVPADIDQSSDSDQSSSQGQPG

SEQ ID NO: 6 - protein, 14 aa, synthetic construct
AKPDDESQKPPQDD

SEQ ID NO: 7 - protein, 14 aa, synthetic construct
LQLEPGPTTPEYPI

SEQ ID NO: 8 - protein, 14 aa, synthetic construct
IQLPPSDTTPENPI

SEQ ID NO: 9 - protein, 12 aa, synthetic construct
ESNDNSQVPPSL

SEQ ID NO: 10 - protein, 10 aa, synthetic construct
SEQQEYPGSG

SEQ ID NO: 11 - protein, 10 aa, synthetic construct
NNSEQQENPA

SEQ ID NO: 12 - protein, 12 aa, synthetic construct
STDGSGQPKHKP

SEQ ID NO: 13 - protein, 20 aa, synthetic construct
PKPSSESGERYEQQPEPPPP

SEQ ID NO: 14 - protein, 16 aa, synthetic construct
KGGGGEPDEKRPSQSS

SEQ ID NO: 15 - protein, 14 aa, synthetic construct
YAGGTPKEPPPPNS

SEQ ID NO: 16 - protein, 14 aa, synthetic construct
PLVAGGTPFEPPPP

SEQ ID NO: 17 - protein, 14 aa, synthetic construct
PQPDERSQIPDNKE

SEQ ID NO: 18 - protein, 10 aa, synthetic construct
YTDEKPLPRS

SEQ ID NO: 19 - protein, 12 aa, synthetic construct
SHPPQEPPQSNL

SEQ ID NO: 20 - protein, 16 aa, synthetic construct
SESPSKQQPEPKSSKG

SEQ ID NO: 21 - protein, 16 aa, synthetic construct
SESPTNQQPEPQWTTD

SEQ ID NO: 22 - protein, 16 aa, synthetic construct
GGSKGPPPSPPPPQPE

SEQ ID NO: 23 - protein, 16 aa, synthetic construct
GPLPAPPPQPPPPQPN

SEQ ID NO: 24 - protein, 14 aa, synthetic construct
RPLPHDNNKQDYSK

SEQ ID NO: 25 - protein, 61 aa, synthetic construct
  VARIANT 5..61: note = up to 19 copies of GGS may be absent
SGGSGGSGGSGGSGGSGGSGGSGGSGGSGGSGGSGGSGGSGGSGGSGGSGGSGGSGGSGGS

SEQ ID NO: 26 - protein, 4 aa, synthetic construct
SGGS

SEQ ID NO: 27 - protein, 100 aa, synthetic construct
  VARIANT 6..100: note = up to 19 copies of GGGGS may be absent
GGGGSGGGGSGGGGSGGGGSGGGGSGGGGSGGGGSGGGGSGGGGSGGGGSGGGGSGGGGSGGGGSGGGGSGGGGSGGGGSGGGGSGGGGSGGGGSGGGGS

SEQ ID NO: 28 - protein, 10 aa, synthetic construct
SGGSGGSGGS

SEQ ID NO: 29 - protein, 16 aa, synthetic construct
SGSETPGTSESATPES

SEQ ID NO: 30 - protein, 32 aa, synthetic construct
SGGSSGGSSGSETPGTSESATPESSGGSSGGS

SEQ ID NO: 31 - protein, 4 aa, synthetic construct
GSSG

SEQ ID NO: 32 - protein, 6 aa, synthetic construct
GSSGSS

SEQ ID NO: 33 - protein, 8 aa, synthetic construct
GSSGSSGS

SEQ ID NO: 34 - protein, 60 aa, synthetic construct
  VARIANT 4..60: note = up to 19 copies of GSS may be absent
GSSGSSGSSGSSGSSGSSGSSGSSGSSGSSGSSGSSGSSGSSGSSGSSGSSGSSGSSGSS

SEQ ID NO: 35 - protein, 62 aa, synthetic construct
  VARIANT 4..60: note = up to 19 copies of GSS may be absent
GSSGSSGSSGSSGSSGSSGSSGSSGSSGSSGSSGSSGSSGSSGSSGSSGSSGSSGSSGSSGS

SEQ ID NO: 36 - protein, 61 aa, synthetic construct
  VARIANT 4..60: note = up to 19 copies of GSS may be absent
GSSGSSGSSGSSGSSGSSGSSGSSGSSGSSGSSGSSGSSGSSGSSGSSGSSGSSGSSGSSG

SEQ ID NO: 37 - DNA, 1592 bp, Medicago truncatula
  source 1..1592: mol_type = other DNA
actgttaataatttttaaacgtcagcgcactaaaaaaacgaaaagacggacacgtgaaaataaaaaacacacactagtttatgacgcaatactattttacttatgatttgggtacattagacaaaaccgtgaaagagatgtatcagctatgaaacctgtatacttcaatacagagacttactcatatcggatacgtacgcacgaagtatcatattaattattttaatttttaataaatattttatcggatacttatgtgatactctacatatacacaaggatatttctaagatactttatagatacgtatcctagaaaaacatgaagagtaaaaaagtgagacaatgttgtaaaaattcattataaatgtatatgattcaattttagatatgcatcagtataattgattctcgatgaaacacttaaaattatatttcttgtggaagaacgtagcgagagaggtgattcagttagacaacattaaataaaattaatgttaagttcttttaatgatgtttctctcaatatcacatcatatgaaaatgtaatatgatttataagaaaatttttaaaaaatttattttaataatcacatgtactattttttaaaaattgtatcttttataataatacaataataaagagtaatcagtgttaatttttcttcaaatataagttttattataaatcattgttaacgtatcataagtcattaccgtatcgtatcttaatttttttttaaaaaccgctaattcacgtacccgtattgtattgtacccgcacctgtatcacaatcgatcttagttagaagaattgtctcgaggcggtgcaagacagcatataatagacgtggactctcttataccaaacgttgtcgtatcacaaagggttaggtaacaagtcacagtttgtccacgtgtcacgttttaattggaagaggtgccgttggcgtaatataacagccaatcgatttttgctataaaagcaaatcaggtaaactaaacttcttcattcttttcttccccatcgctacaaaaccggttcctttggaaaagagattcattcaaacctagcacccaattccgtttcaaggtataatctactttctattcttcgattattttattattattagctactatcgtttaatcgatcttttcttttgatccgtcaaatttaaattcaattagggttttgttcttttctttcatctgattgaaatccttctgaattgaaccgtttacttgattttactgtttattgtatgatttaatcctttgtttttcaaagacagtctttagattgtgattaggggttcatataaatttttagatttggatttttgtattgtatgattcaaaaaatacgtcctttaattagattagtacatggatattttttacccgatttattgattgtcagggagaatttgatgagcaagtttttttgatgtctgttgtaaattgaattgattataattgctgatctgctgcttccagttttcataacccatattcttttaaccttgttgtacacacaatgaaaaattggtgattgattcatttgtttttctttgttttggattatacagg

SEQ ID NO: 38 - DNA, 2000 bp, Zea mays
  source 1..2000: mol_type = other DNA
gtcgtgcccctctctagagataaagagcattgcatgtctaaagtataaaaaattaccacatatttttttgtcacacttatttgaagtgtagtttatctatctctatacatatatttaaacttcactctacaaataatatagtctataatactaaaataatattagtgttttagaggatcatataaataaactgctagacatggtctaaaggataattgaatattttgacaatctacagttttatctttttagtgtgcatgtgatctctctgttttttttgcaaatagcttgacctatataatacttcatccattttattagtacatccatttaggatttagggttgatggtttctatagactaatttttagtacatccattttattctttttagtctctaaattttttaaaactaaaactctattttagttttttatttaataatttagatataaaatgaaataaaataaattgactacaaataaaacaaataccctttaagaaataaaaaaactaagcaaacatttttcttgtttcgagtagataatgacaggctgttcaacgccgtcgacgagtctaacggacaccaaccagcgaaccagcagcgtcgcgtcgggccaagcgaagcagacggcacggcatctctgtagctgcctctggacccctctcgagagttccgctccaccgttggacttgctccgctgtcggcatccagaaattgcgtggcggagcggcagacgtgaggcggcacggcaggcggcctcttcctcctctcacggcaccggcagctacgggggattcctttcccaccgctccttcgctttcccttcctcgcccgccgtaataaatagacaccccctccacaccctctttccccaacctcgtgttcgttcggagcgcacacacacgcaaccagatctcccccaaatccagccgtcggcacctccgcttcaaggtacgccgctcatcctccccccccccctctctctaccttctctagatcggcgatccggtccatggttagggcccggtagttctacttctgttcatgtttgtgttagagcaaacatgttcatgttcatgtttgtgatgatgtggtctggttgggcggtcgttctagatcggagtaggatactgtttcaagctacctggtggatttattaattttgtatctgtatgtgtgtgccatacatcttcatagttacgagtttaagatgatggatggaaatatcgatctaggataggtatacatgttgatgcgggttttactgatgcatatacagagatgctttttttctcgcttggttgtgatgatatggtctggttgggcggtcgttctagatcggagtagaatactgtttcaaactacctggtggatttattaaaggataaagggtcgttctagatcggagtagaatactgtttcaaactacctggtggatttattaaaggatctgtatgtatgtgcctacatcttcatagttacgagtttaagatgatggatggaaatatcgatctaggataggtatacatgttgatgcgggttttactgatgcatatacagagatgctttttttcgcttggttgtgatgatgtggtctggttgggcggtcgttctagatcggagtagaatactgtttcaaactacctggtggatttattaattttgtatctttatgtgtgtgccatacatcttcatagttacgagtttaagatgatggatggaaatattgatctaggataggtatacatgttgatgtgggttttactgatgcatatacatgatggcatatgcggcatctattcatatgctctaaccttgagtacctatctattataataaacaagtatgttttataattattttgatcttgatatacttggatgatggcatatgcagcagctatatgtggattttttagccctgccttcatacgctatttatttgcttggtactgtttcttttgtccgatgctcaccctgttgtttggtgatacttc

SEQ ID NO: 39 - protein, 1307 aa, Acidaminococcus sp.
MTQFEGFTNLYQVSKTLRFELIPQGKTLKHIQEQGFIEEDKARNDHYKELKPIIDRIYKTYADQCLQLVQLDWENLSAAIDSYRKEKTEETRNALIEEQATYRNAIHDYFIGRTDNLTDAINKRHAEIYKGLFKAELFNGKVLKQLGTVTTTEHENALLRSFDKFTTYFSGFYENRKNVFSAEDISTAIPHRIVQDNFPKFKENCHIFTRLITAVPSLREHFENVKKAIGIFVSTSIEEVFSFPFYNQLLTQTQIDLYNQLLGGISREAGTEKIKGLNEVLNLAIQKNDETAHIIASLPHRFIPLFKQILSDRNTLSFILEEFKSDEEVIQSFCKYKTLLRNENVLETAEALFNELNSIDLTHIFISHKKLETISSALCDHWDTLRNALYERRISELTGKITKSAKEKVQRSLKHEDINLQEIISAAGKELSEAFKQKTSEILSHAHAALDQPLPTTLKKQEEKEILKSQLDSLLGLYHLLDWFAVDESNEVDPEFSARLTGIKLEMEPSLSFYNKARNYATKKPYSVEKFKLNFQMPTLASGWDVNKEKNNGAILFVKNGLYYLGIMPKQKGRYKALSFEPTEKTSEGFDKMYYDYFPDAAKMIPKCSTQLKAVTAHFQTHTTPILLSNNFIEPLEITKEIYDLNNPEKEPKKFQTAYAKKTGDQKGYREALCKWIDFTRDFLSKYTKTTSIDLSSLRPSSQYKDLGEYYAELNPLLYHISFQRIAEKEIMDAVETGKLYLFQIYNKDFAKGHHGKPNLHTLYWTGLFSPENLAKTSIKLNGQAELFYRPKSRMKRMAHRLGEKMLNKKLKDQKTPIPDTLYQELYDYVNHRLSHDLSDEARALLPNVITKEVSHEIIKDRRFTSDKFFFHVPITLNYQAANSPSKFNQRVNAYLKEHPETPIIGIDRGERNLIYITVIDSTGKILEQRSLNTIQQFDYQKKLDNREKERVAARQAWSVVGTIKDLKQGYLSQVIHEIVDLMIHYQAVVVLENLNFGFKSKRTGIAEKAVYQQFEKMLIDKLNCLVLKDYPAEKVGGVLNPYQLTDQFTSFAKMGTQSGFLFYVPAPYTSKIDPLTGFVDPFVWKTIKNHESRKHFLEGFDFLHYDVKTGDFILHFKMNRNLSFQRGLPGFMPAWDIVFEKNETQFDAKGTPFIAGKRIVPVIENHRFTGRYRDLYPANELIALLEEKGIVFRDGSNILPKLLENDDSHAIDTMVALIRSVLQMRNSNAATGEDYINSPVRDLNGVCFDSRFQNPEWPMDADANGAYHIALKGQLLLNHLKESKDLKLQNGISNQDWLAYIQELRN

SEQ ID NO: 40 - protein, 1241 aa, Butyrivibrio proteoclasticus
MLLYENYTKRNQITKSLRLELRPQGKTLRNIKELNLLEQDKAIYALLERLKPVIDEGIKDIARDTLKNCELSFEKLYEHFLSGDKKAYAKESERLKKEIVKTLIKNLPEGIGKISEINSAKYLNGVLYDFIDKTHKDSEEKQNILSDILETKGYLALFSKFLTSRITTLEQSMPKRVIENFEIYAANIPKMQDALERGAVSFAIEYESICSVDYYNQILSQEDIDSYNRLISGIMDEDGAKEKGINQTISEKNIKIKSEHLEEKPFRILKQLHKQILEEREKAFTIDHIDSDEEVVQVTKEAFEQTKEQWENIKKINGFYAKDPGDITLFIVVGPNQTHVLSQLIYGEHDRIRLLLEEYEKNTLEVLPRRTKSEDARYDKFVNAVPKKVAKESHTFDGLQKMTGDDRLFILYRDELARNYMRIKEAYGTFERDILKSRRGIKGNRDVQESLVSFYDELTKFRSALRIINSGNDEKADPIFYNTFDGIFEKANRTYKAENLCRNYVTKSPADDARIMASCLGTPARLRTHWWNGEENFAINDVAMIRRGDEYYYFVLTPDVKPVDLKTKDETDAQIFVQRKGAKSFLGLPKALFKCILEPYFESPEHKNDKNCVIEEYVSKPLTIDRRAYDIFKNGTFKKTNIGIDGLTEEKFKDDCRYLIDVYKEFIAVYTRYSCFNMSGLKRADEYNDIGEFFSDVDTRLCTMEWIPVSFERINDMVDKKEGLLFLVRSMFLYNRPRKPYERTFIQLFSDSNMEHTSMLLNSRAMIQYRAASLPRRVTHKKGSILVALRDSNGEHIPMHIREAIYKMKNNFDISSEDFIMAKAYLAEHDVAIKKANEDIIRNRRYTEDKFFLSLSYTKNADISARTLDYINDKVEEDTQDSRMAVIVTRNLKDLTYVAVVDEKNNVLEEKSLNEIDGVNYRELLKERTKIKYHDKTRLWQYDVSSKGLKEAYVELAVTQISKLATKYNAVVVVESMSSTFKDKFSFLDEQIFKAFEARLCARMSDLSFNTIKEGEAGSISNPIQVSNNNGNSYQDGVIYFLNNAYTRTLCPDTGFVDVFDKTRLITMQSKRQFFAKMKDIRIDDGEMLFTFNLEEYPTKRLLDRKEWTVKIAGDGSYFDKDKGEYVYVNDIVREQIIPALLEDKAVFDGNMAEKFLDKTAISGKSVELIYKWFANALYGIITKKDGEKIYRSPITGTEIDVSKNTTYNFGKKFMFKQEYRGDGDFLDAFLNYMQAQDIAV

SEQ ID NO: 41 - protein, 1238 aa, Methanoplasma termitum
MNNYDEFTKLYPIQKTIRFELKPQGRTMEHLETFNFFEEDRDRAEKYKILKEAIDEYHKKFIDEHLTNMSLDWNSLKQISEKYYKSREEKDKKVFLSEQKRMRQEIVSEFKKDDRFKDLFSKKLFSELLKEEIYKKGNHQEIDALKSFDKFSGYFIGLHENRKNMYSDGDEITAISNRIVNENFPKFLDNLQKYQEARKKYPEWIIKAESALVAHNIKMDIVFSLEYFNKVLNQEGIQRYNLALGGYVTKSGEKMMGLNDALNLAHQSEKSSKGRIHMTPLFKQILSEKESFSYIPDVFTEDSQLLPSIGGFFAQIENDKDGNIFDRALELISSYAEYDTERIYIRQADINRVSNVIFGEWGTLGGLMREYKADSINDINLERTCKKVDKWLDSKEFALSDVLEAIDRTGNNDAFNEYISKMRTAREKIDAARKEMKFISEKISGDEESIHIIKTLLDSVQQFLHFFNLFKARQDIPLDGAFYAEFDEVHSKLFAIVPLYNKVRNYLTKNNLNTKKIKLNFKNPTLANGWDQNKVYDYASLIFLRDGNYYLGIINPKRKKNIKFEQGSGNGPFYRKMVYKQIPGPNKNLRPVFLTSTKGKKEYKPSKEIIEGYEADKHIRGDKFDLDFCHKLIDFFKESIEKHKDWSKFNFYFSPTESYGDISEFYLDVEKQGYRMHFENISAETIDEYVEKGDLFLFQIYNKDFVKAATGKKDMHTIYWNAAFSPENLQDVVVKLNGEAELFYRDKSDIKEIVHREGEILVNRTYNGRTPVPDKIHKKLTDYHNGRTKDLGEAKEYLDKVRYFKAHYDITKDRRYLNDKIYFHVPLTLNFKANGKKNLNKMVIEKFLSDEKAHIIGIDRGERNLLYYSIIDRSGKIIDQQSLNVIDGFDYREKLNQREIEMKDARQSWNAIGKIKDLKEGYLSKAVHEITKMAIQYNAIVVMEELNYGFKRGRFKVEKQIYQKFENMLIDKMNYLVFKDAPDESPGGVLNAYQLTNPLESFAKLGKQTGILFYVPAAYTSKIDPTTGFVNLFNTSSKTNAQERKEFLQKFESISYSAKDGGIFAFAFDYRKFGTSKTDHKNVWTAYTNGERMRYIKEKKRNELFDPSKEIKEALTSSGIKYDGGQNILPDILRSNNNGLIYTMYSSFIAAIQMRVYDGKEDYIISPIKNSKGEFFRTDPKRRELPIDADANGAYNIALRGELTMRAIAEKFDPDSEKMAKLELKHKDWFEFMQTRGD

SEQ ID NO: 42 - protein, 1281 aa, Eubacterium eligens
MNGNRSIVYREFVGVIPVAKTLRNELRPVGHTQEHIIQNGLIQEDELRQEKSTELKNIMDDYYREYIDKSLSGVTDLDFTLLFELMNLVQSSPSKDNKKALEKEQSKMREQICTHLQSDSNYKNIFNAKLLKEILPDFIKNYNQYDVKDKAGKLETLALFNGFSTYFTDFFEKRKNVFTKEAVSTSIAYRIVHENSLIFLANMTSYKKISEKALDEIEVIEKNNQDKMGDWELNQIFNPDFYNMVLIQSGIDFYNEICGVVNAHMNLYCQQTKNNYNLFKMRKLHKQILAYTSTSFEVPKMFEDDMSVYNAVNAFIDETEKGNIIGKLKDIVNKYDELDEKRIYISKDFYETLSCFMSGNWNLITGCVENFYDENIHAKGKSKEEKVKKAVKEDKYKSINDVNDLVEKYIDEKERNEFKNSNAKQYIREISNIITDTETAHLEYDDHISLIESEEKADEMKKRLDMYMNMYHWAKAFIVDEVLDRDEMFYSDIDDIYNILENIVPLYNRVRNYVTQKPYNSKKIKLNFQSPTLANGWSQSKEFDNNAIILIRDNKYYLAIFNAKNKPDKKIIQGNSDKKNDNDYKKMVYNLLPGANKMLPKVFLSKKGIETFKPSDYIISGYNAHKHIKTSENFDISFCRDLIDYFKNSIEKHAEWRKYEFKFSATDSYSDISEFYREVEMQGYRIDWTYISEADINKLDEEGKIYLFQIYNKDFAENSTGKENLHTMYFKNIFSEENLDKIIKLNGQAELFYRRASVKNPVKHKKDSVLVNKTYKNQLDNGDVVRIPIPDDIYNEIYKMYNGYIKESDLSEAAKEYLDKVEVRTAQKDIVKDYRYTVDKYFIHTPITINYKVTARNNVNDMVVKYIAQNDDIHVIGIDRGERNLIYISVIDSHGNIVKQKSYNILNNYDYKKKLVEKEKTREYARKNWKSIGNIKELKEGYISGVVHEIAMLIVEYNAIIAMEDLNYGFKRGRFKVERQVYQKFESMLINKLNYFASKEKSVDEPGGLLKGYQLTYVPDNIKNLGKQCGVIFYVPAAFTSKIDPSTGFISAFNFKSISTNASRKQFFMQFDEIRYCAEKDMFSFGFDYNNFDTYNITMGKTQWTVYTNGERLQSEFNNARRTGKTKSINLTETIKLLLEDNEINYADGHDIRIDMEKMDEDKKSEFFAQLLSLYKLTVQMRNSYTEAEEQENGISYDKIISPVINDEGEFFDSDNYKESDDKECKMPKDADANGAYCIALKGLYEVLKIKSEWTEDGFDRNCLKLPHAEWLDFIQNKRYE

SEQ ID NO: 43 - protein, 1300 aa, Francisella tularensis
MSIYQEFVNKYSLSKTLRFELIPQGKTLENIKARGLILDDEKRAKDYKKAKQIIDKYHQFFIEEILSSVCISEDLLQNYSDVYFKLKKSDDDNLQKDFKSAKDTIKKQISEYIKDSEKFKNLFNQNLIDAKKGQESDLILWLKQSKDNGIELFKANSDITDIDEALEIIKSFKGWTTYFKGFHENRKVNYSSNDIPTSIIYRIVDDNLPKFLENKAKYESLKDKAPEAINYEQIKKDLAEELTFDIDYKTSEVNQRVFSLDEVFEIANFNNYLNQSGITKFNTIIGGKFVNGENTKRKGINEYINLYSQQINDKTLKKYKMSVLFKQILSDTESKSFVIDKLEDDSDVVTTMQSFYEQIAAFKTVEEKSIKETLSLLFDDLKAQKLDLSKIYFKNDKSLTDLSQQVFDDYSVIGTAVLEYITQQIAPKNLDNPSKKEQELIAKKTEKAKYLSLETIKLALEEFNKHRDIDKQCRFEEILANFAAIPMIFDEIAQNKDNLAQISIKYQNQGKKDLLQASAEDDVKAIKDLLDQTNNLLHKLKIFHISQSEDKANILDKDEHFYLVFEECYFELANIVPLYNKIRNYITQKPYSDEKFKLNFENSTLANGWDKNKEPDNTAILFIKDDKYYLGVMNKKNNKIFDDKAIKENKGEGYKKIVYKLLPGANKMLPKVFFSAKSIKFYNPSEDILRIRNHSTHTKNGSPQKGYEKFEFNIEDCRKFIDFYKQSISKHPEWKDFGFRFSDTQRYNSIDEFYREVENQGYKLTFENISESYIDSVVNQGKLYLFQIYNKDFSAYSKGRPNLHTLYWKALFDERNLQDVVYKLNGEAELFYRKQSIPKKITHPAKEAIANKNKDNPKKESVFEYDLIKDKRFTEDKFFFHCPITINFKSSGANKFNDEINLLLKEKANDVHILSIDRGERHLAYYTLVDGKGNIIKQDTFNIIGNDRMKTNYHDKLAAIEKDRDSARKDWKKINNIKEMKEGYLSQVVHEIAKLVIEYNAIVVFEDLNFGFKRGRFKVEKQVYQKLEKMLIEKLNYLVFKDNEFDKTGGVLRAYQLTAPFETFKKMGKQTGIIYYVPAGFTSKICPVTGFVNQLYPKYESVSKSQEFFSKFDKICYNLDKGYFEFSFDYKNFGDKAAKGKWTIASFGSRLINFRNSDKNHNWDTREVYPTKELEKLLKDYSIEYGHGECIKAAICGESDKKFFAKLTSVLNTILQMRNSKTGTELDYLISPVADVNGNFFDSRQAPKNMPQDADANGAYHIGLKGLMLLGRIKNNQEGKKLNLVIKNEEYFEFVQNRNN

SEQ ID NO: 44 - protein, 1206 aa, unidentified
  source 1..1206: note = Lachnospiraceae bacterium
MYYESLTKQYPVSKTIRNELIPIGKTLDNIRQNNILESDVKRKQNYEHVKGILDEYHKQLINEALDNCTLPSLKIAAEIYLKNQKEVSDREDFNKTQDLLRKEVVEKLKAHENFTKIGKKDILDLLEKLPSISEDDYNALESFRNFYTYFTSYNKVRENLYSDKEKSSTVAYRLINENFPKFLDNVKSYRFVKTAGILADGLGEEEQDSLFIVETFNKTLTQDGIDTYNSQVGKINSSINLYNQKNQKANGFRKIPKMKMLYKQILSDREESFIDEFQSDEVLIDNVESYGSVLIESLKSSKVSAFFDALRESKGKNVYVKNDLAKTAMSVIVFENWRTFDDLLNQEYDLANENKKKDDKYFEKRQKELKKNKSYSLEHLCNLSEDSCNLIENYIHQISDDIENIIINNETFLRIVINEHDRSRKLAKNRKAVKAIKDFLDSIKVLERELKLINSSGQELEKDLIVYSAHEELLVELKQVDSLYNMTRNYLTKKPFSTEKVKLNFNRSTLLNGWDRNKETDNLGVLLLKDGKYYLGIMNTSANKAFVNPPVAKTEKVFKKVDYKLLPVPNQMLPKVFFAKSNIDFYNPSSEIYSNYKKGTHKKGNMFSLEDCHNLIDFFKESISKHEDWSKFGFKFDTQASYNDISEFYREVEKQGYKLTYTDIDETYINDLIERNELYLFQIYNKDFSMYSKGKLNLHTLYFMMLFDQRNIDDVVYKLNGEAEVFYRPASISEDELIIHKAGEEIKNKNPNRARTKETSTFSYDIVKDKRYSKDKFTLHIPITMNFGVDEVKRFNDAVNSAIRIDENVNVIGIDRGERNLLYVVVIDSKGNILEQISLNSIINKEYDIETDYHALLDEREGGRDKARKDWNTVENIRDLKAGLYLQVVNVVAKLVLKYNAIICLEDLNFGFKRGRQKVEKQVYQKFEKMLIDKLNYLVIDKSREQTSPKELGGALNALQLTSKFKSFKELGKQSGVIYYVPAYLTSKIDPTTGFANLFYMKCENVEKSKRFFDGFDFIRFNALENVFEFGFDYRSFTQRACGINSKWTVCTNGERIIKYRNPDKNNMFDEKVVVVTDEMKNLFEQYKIPYEDGRNVKDMIISNEEAEFYRRLYRLLQQTLQMRNSTSDGTRDYIISPVKNKREAYFNSELSDGSVPKDADANGAYNIARKGLWVLEQIRQKSEGEKINLAMTNAEWLEYAQTHLL

SEQ ID NO: 45 - protein, 1233 aa, unidentified
  source 1..1233: note = Lachnospiraceae bacterium
MDYGNGQFERRAPLTKTITLRLKPIGETRETIREQKLLEQDAAFRKLVETVTPIVDDCIRKIADNALCHFGTEYDFSCLGNAISKNDSKAIKKETEKVEKLLAKVLTENLPDGLRKVNDINSAAFIQDTLTSFVQDDADKRVLIQELKGKTVLMQRFLTTRITALTVWLPDRVFENFNIFIENAEKMRILLDSPLNEKIMKFDPDAEQYASLEFYGQCLSQKDIDSYNLIISGIYADDEVKNPGINEIVKEYNQQIRGDKDESPLPKLKKLHKQILMPVEKAFFVRVLSNDSDARSILEKILKDTEMLPSKIIEAMKEADAGDIAVYGSRLHELSHVIYGDHGKLSQIIYDKESKRISELMETLSPKERKESKKRLEGLEEHIRKSTYTFDELNRYAEKNVMAAYIAAVEESCAEIMRKEKDLRTLLSKEDVKIRGNRHNTLIVKNYFNAWTVFRNLIRILRRKSEAEIDSDFYDVLDDSVEVLSLTYKGENLCRSYITKKIGSDLKPEIATYGSALRPNSRWWSPGEKFNVKFHTIVRRDGRLYYFILPKGAKPVELEDMDGDIECLQMRKIPNPTIFLPKLVFKDPEAFFRDNPEADEFVFLSGMKAPVTITRETYEAYRYKLYTVGKLRDGEVSEEEYKRALLQVLTAYKEFLENRMIYADLNFGFKDLEEYKDSSEFIKQVETHNTFMCWAKVSSSQLDDLVKSGNGLLFEIWSERLESYYKYGNEKVLRGYEGVLLSILKDENLVSMRTLLNSRPMLVYRPKESSKPMVVHRDGSRVVDRFDKDGKYIPPEVHDELYRFFNNLLIKEKLGEKARKILDNKKVKVKVLESERVKWSKFYDEQFAVTFSVKKNADCLDTTKDLNAEVMEQYSESNRLILIRNTTDILYYLVLDKNGKVLKQRSLNIINDGARDVDWKERFRQVTKDRNEGYNEWDYSRTSNDLKEVYLNYALKEIAEAVIEYNAILIIEKMSNAFKDKYSFLDDVTFKGFETKKLAKLSDLHFRGIKDGEPCSFTNPLQLCQNDSNKILQDGVIFMVPNSMTRSLDPDTGFIFAINDHNIRTKKAKLNFLSKFDQLKVSSEGCLIMKYSGDSLPTHNTDNRVWNCCCNHPITNYDRETKKVEFIEEPVEELSRVLEENGIETDTELNKLNERENVPGKVVDAIYSLVLNYLRGTVSGVAGQRAVYYSPVTGKKYDISFIQAMNLNRKCDYYRIGSKERGEWTDFVAQLIN

SEQ ID NO: 46 - protein, 1227 aa, unidentified
  source 1..1227: note = Lachnospiraceae bacterium
MSKLEKFTNCYSLSKTLRFKAIPVGKTQENIDNKRLLVEDEKRAEDYKGVKKLLDRYYLSFINDVLHSIKLKNLNNYISLFRKKTRTEKENKELENLEINLRKEIAKAFKGNEGYKSLFKKDIIETILPEFLDDKDEIALVNSFNGFTTAFTGFFDNRENMFSEEAKSTSIAFRCINENLTRYISNMDIFEKVDAIFDKHEVQEIKEKILNSDYDVEDFFEGEFFNFVLTQEGIDVYNAIIGGFVTESGEKIKGLNEYINLYNQKTKQKLPKFKPLYKQVLSDRESLSFYGEGYTSDEEVLEVFRNTLNKNSEIFSSIKKLEKLFKNFDEYSSAGIFVKNGPAISTISKDIFGEWNVIRDKWNAEYDDIHLKKKAVVTEKYEDDRRKSFKKIGSFSLEQLQEYADADLSVVEKLKEIIIQKVDEIYKVYGSSEKLFDADFVLEKSLKKNDAVVAIMKDLLDSVKSFENYIKAFFGEGKETNRDESFYGDFVLAYDILLKVDHIYDAIRNYVTQKPYSKDKFKLYFQNPQFMGGWDKDKETDYRATILRYGSKYYLAIMDKKYAKCLQKIDKDDVNGNYEKINYKLLPGPNKMLPKVFFSKKWMAYYNPSEDIQKIYKNGTFKKGDMFNLNDCHKLIDFFKDSISRYPKWSNAYDFNFSETEKYKDIAGFYREVEEQGYKVSFESASKKEVDKLVEEGKLYMFQIYNKDFSDKSHGTPNLHTMYFKLLFDENNHGQIRLSGGAELFMRRASLKKEELVVHPANSPIANKNPDNPKKTTTLSYDVYKDKRFSEDQYELHIPIANINKCPKNIFKINTEVRVLLKHDDNPYVIGIDRGERNLLYIVVVDGKGNIVEQYSLNEIINNFNGIRIKTDYHSLLDKKEKERFEARQNWTSIENIKELKAGYISQVVHKICELVEKYDAVIALEDLNSGFKNSRVKVEKQVYQKFEKMLIDKLNYMVDKKSNPCATGGALKGYQITNKFESFKSMSTQNGFIFYIPAWLTSKIDPSTGFVNLLKTKYTSIADKKFISSFDRIMYVPEEDLFEFALDYKNFSRTDADYIKKWKLYSYGNRIRIFRNPKKNNVFDWEEVCLTSAYKELFNKYGINYQQGDIRALLCEQSDKAFYSSFMALMSLMLQMRNSITGRTDVDFLISPVKNSDGIFYDSRNYEAQENAILPKNADANGAYNIARKVLWAIGQFKKAEDEKLDKVKIASNKEWLEYAQTSVKH

SEQ ID NO: 47 - protein, 1264 aa, Leptospira inadai
MEDYSGFVNIYSIQKTLRFELKPVGKTLEHIEKKGFLKKDKIRAEDYKAVKKIIDKYHRAYIEEVFDSVLHQKKKKDKTRFSTQFIKEIKEFSELYYKTEKNIPDKERLEALSEKLRKMLVGAFKGEFSEEVAEKYNKNLFSKELIRNEIEKFCETDEERKQVSNFKSFTTYFTGFHSNRQNIYSDEKKSTAIGYRIIHQNLPKFLDNLKIIESIQRRFKDFPWSDLKKNLKKIDKNIKLTEYFSIDGFVNVLNQKGIDAYNTILGGKSEESGEKIQGLNEYINLYRQKNNIDRKNPLNVKILFKQILGDRETKSFIPEAFPDDQSVLNSITEFAKYLKLDKKKKSIIAELKKFLSSFNRYELDGIYLANDNSLASISTFLFDDWSFIKKSVSFKYDESVGDPKKKIKSPLKYEKEKEKWLKQKYYTISFLNDAIESYSKSQDEKRVKIRLEAYFAEFKSKDDAKKQFDLLERIEEAYAIVEPLLGAEYPRDRNLKADKKEVGKIKDFLDSIKSLQFFLKPLLSAEIFDEKDLGFYNQLEGYYEEIDISGHLYNKVRNYLTGKIYSKEKFKLNFENSTLLKGWDENREVANLCVIFREDQKYYLGVMDKENNTILSDIPKVKPNELFYEKMVYKLIPTPHMQLPRIIFSSDNLSIYNPSKSILKIREAKSFKEGKNFKLKDCHKFIDFYKESISKNEDWSRFDFKFSKTSSYENISEFYREVERQGYNLDFKKVSKFYIDSLVEDGKLYLFQIYNKDFSIFSKGKPNLHTIYFRSLFSKENLKDVCLKLNGEAEMFFRKKSINYDEKKKREGHHPELFEKLKYPILKDKRYSEDKFQFHLPISLNFKSKERLNFNLKVNEFLKRNKDINIIGIDRGERNLLYLVMINQKGEILKQTLLDSMQSGKGRPEINYKEKLQEKEIERDKARKSWGTVENIKELKEGYLSIVIHQISKLMVENNAIVVLEDLNIGFKRGRQKVERQVYQKFEKMLIDKLNFLVFKENKPTEPGGVLKAYQLTDEFQSFEKLSKQTGFLFYVPSWNTSKIDPRTGFIDFLHPAYENIEKAKQWINKFDSIRFNSKMDWFEFTADTRKFSENLMLGKNRVWVICTTNVERYFTSKTANSSIQYNSIQITEKLKELFVDIPFSNGQDLKPEILRKNDAVFFKSLLFYIKTTLSLRQNNGKKGEEEKDFILSPVVDSKGRFFNSLEASDDEPKDADANGAYHIALKGLMNLLVLNETKEENLSRPKWKIKNKDWLEFVWERNR

SEQ ID NO: 48 - protein, 1373 aa, Moraxella bovoculi
MLFQDFTHLYPLSKTVRFELFIDRTLEHIHAKNFLSQDETMADMHQKVKVILDDYHRDFIADMMGEVKLTKLAEFYDVYLKFRKNPKDDELQKAQLKDLQAVLRKEIVKPIGNGGKYKAGYDRLFGAKLFKDGKELGDLAKFVIAQEGESSPKLAHLAHFEKFSTYFTGFHDNRKNMYSDEDKHTAIAYRLIHENLPRFIDNLQILTTIKQKHSALYDQIINELTASGLDVSLASHLDGYHKLLTQEGITAYNTLLGGISGEAGSPKIQGINELINSHHNQHCHKSERIAKLRPLHKQILSDGMSVSFLPSKFADDSEMCQAVNEFYRHYADVFAKVQSLFDGFDDHQKDGIYVEHKNLNELSKQAFGDFALLGRVLDGYYVDVVNPEFNERFAKAKTDNAKAKLTKEKDKFIKGVHSLASLEQAIEHYTARHDDESVQAGKLGQYFKHGLAGVDNPIQKIHNNHSTIKGFLERERPAGERALPKIKSGKNPEMTQLRQLKELLDNALNVAHFAKLLTTKTTLDNQDGNFYGEFGVLYDELAKIPTLYNKVRDYLSQKPFSTEKYKLNFGNPTLLNGWDLNKEKDNFGVILQKDGCYYLALLDKAHKKVFDNAPNTGKSIYQKMIYKYLEVRKQFPKVFFSKEAIAINYHPSKELVEIKDKGRQRSDDERLKLYRFILECLKIHPKYDKKFEGAIGDIQLFKKDKKGREVPISEKDLFKDINGIFSSKPKLEMEDFFIGEFKRYNPSQDLVDQYNIYKKIDSNDNRKKENFYNNHPKFKKDLVRYYYESMCKHEEWEESFEFSKKLQDIGCYVDVNELFTEIETRRLNYKISFCNINADYIDELVEQGQLYLFQIYNKDFSPKAHGKPNLHTLYFKALFSEDNLADPIYKLNGEAQIFYRKASLDMNETTIHRAGEVLENKNPDNPKKRQFVYDIIKDKRYTQKDFMLHVPITMNFGVQGMTIKEFNKKVNQSIQQYDEVNVIGIDRGERHLLYLTVINSKGEILEQCSLNDITTASANGTQMTTPYHKILDKREIERLNARVGWGEIETIKELKSGYLSHVVHQISQLMLKYNAIVVLEDLNFGFKRGRFKVEKQIYQNFENALIKKLNHLVLKDKADDEIGSYKNALQLTNNFTDLKSIGKQTGFLFYVPAWNTSKIDPETGFVDLLKPRYENIQASQAFFGKFDKICYNADKDYFEFHIDYAKFTDKAKNSRQIWTICSHGDKRYVYDKTANQNKGAAKGINVNDILKSLFARHHINEKQPNLVMDICQNNDKEFHKSLMYLLKTLLALRYSNASSDEDFILSPVANDEGVFFNSALADDTQPQNADANGAYHIALKGLWLLNELKNSDDLNKVKLAIDNQTWLNFAQNR

SEQ ID NO: 49 - protein, 1352 aa, unidentified
  source 1..1352: note = Parcubacteria bacterium
MENIFDQFIGKYSLSKTLRFELKPVGKTEDFLKINKVFEKDQTIDDSYNQAKFYFDSLHQKFIDAALASDKTSELSFQNFADVLEKQNKIILDKKREMGALRKRDKNAVGIDRLQKEINDAEDIIQKEKEKIYKDVRTLFDNEAESWKTYYQEREVDGKKITESKADLKQKGADFLTAAGILKVLKYEFPEEKEKEFQAKNQPSLFVEEKENPGQKRYIFDSFDKFAGYLTKFQQTKKNLYAADGTSTAVATRIADNFIIFHQNTKVFRDKYKNNHTDLGFDEENIFEIERYKNCLLQREIEHIKNENSYNKIIGRINKKIKEYRDQKAKDTKLTKSDFPFFKNLDKQILGEVEKEKQLIEKTREKTEEDVLIERFKEFIENNEERFTAAKKLMNAFCNGEFESEYEGIYLKNKAINTISRRWFVSDRDFELKLPQQKSKNKSEKNEPKVKKFISIAEIKNAVEELDGDIFKAVFYDKKIIAQGGSKLEQFLVIWKYEFEYLFRDIERENGEKLLGYDSCLKIAKQLGIFPQEKEAREKATAVIKNYADAGLGIFQMMKYFSLDDKDRKNTPGQLSTNFYAEYDGYYKDFEFIKYYNEFRNFITKKPFDEDKIKLNFENGALLKGWDENKEYDFMGVILKKEGRLYLGIMHKNHRKLFQSMGNAKGDNANRYQKMIYKQIADASKDVPRLLLTSKKAMEKFKPSQEILRIKKEKTFKRESKNFSLRDLHALIEYYRNCIPQYSNWSFYDFQFQDTGKYQNIKEFTDDVQKYGYKISFRDIDDEYINQALNEGKMYLFEVVNKDIYNTKNGSKNLHTLYFEHILSAENLNDPVFKLSGMAEIFQRQPSVNEREKITTQKNQCILDKGDRAYKYRRYTEKKIMFHMSLVLNTGKGEIKQVQFNKIINQRISSSDNEMRVNVIGIDRGEKNLLYYSVVKQNGEIIEQASLNEINGVNYRDKLIEREKERLKNRQSWKPVVKIKDLKKGYISHVIHKICQLIEKYSAIVVLEDLNMRFKQIRGGIERSVYQQFEKALIDKLGYLVFKDNRDLRAPGGVLNGYQLSAPFVSFEKMRKQTGILFYTQAEYTSKTDPITGFRKNVYISNSASLDKIKEAVKKFDAIGWDGKEQSYFFKYNPYNLADEKYKNSTVSKEWAIFASAPRIRRQKGEDGYWKYDRVKVNEEFEKLLKVWNFVNPKATDIKQEIIKKIKAGDLQGEKELDGRLRNFWHSFIYLFNLVLELRNSFSLQIKIKAGEVIAVDEGVDFIASPVKPFFTTPNPYIPSNLCWLAVENADANGAYNIARKGVMILKKIREHAKKDPEFKKLPNLFISNAEWDEAARDWGKYAGTTALNLDH

SEQ ID NO: 50 - protein, 1260 aa, Porphyromonas crevioricanis
MDSLKDFTNLYPVSKTLRFELKPVGKTLENIEKAGILKEDEHRAESYRRVKKIIDTYHKVFIDSSLENMAKMGIENEIKAMLQSFCELYKKDHRTEGEDKALDKIRAVLRGLIVGAFTGVCGRRENTVQNEKYESLFKEKLIKEILPDFVLSTEAESLPFSVEEATRSLKEFDSFTSYFAGFYENRKNIYSTKPQSTAIAYRLIHENLPKFIDNILVFQKIKEPIAKELEHIRADFSAGGYIKKDERLEDIFSLNYYIHVLSQAGIEKYNALIGKIVTEGDGEMKGLNEHINLYNQQRGREDRLPLFRPLYKQILSDREQLSYLPESFEKDEELLRALKEFYDHIAEDILGRTQQLMTSISEYDLSRIYVRNDSQLTDISKKMLGDWNAIYMARERAYDHEQAPKRITAKYERDRIKALKGEESISLANLNSCIAFLDNVRDCRVDTYLSTLGQKEGPHGLSNLVENVFASYHEAEQLLSFPYPEENNLIQDKDNVVLIKNLLDNISDLQRFLKPLWGMGDEPDKDERFYGEYNYIRGALDQVIPLYNKVRNYLTRKPYSTRKVKLNFGNSQLLSGWDRNKEKDNSCVILRKGQNFYLAIMNNRHKRSFENKMLPEYKEGEPYFEKMDYKFLPDPNKMLPKVFLSKKGIEIYKPSPKLLEQYGHGTHKKGDTFSMDDLHELIDFFKHSIEAHEDWKQFGFKFSDTATYENVSSFYREVEDQGYKLSFRKVSESYVYSLIDQGKLYLFQIYNKDFSPCSKGTPNLHTLYWRMLFDERNLADVIYKLDGKAEIFFREKSLKNDHPTHPAGKPIKKKSRQKKGEESLFEYDLVKDRRYTMDKFQFHVPITMNFKCSAGSKVNDMVNAHIREAKDMHVIGIDRGERNLLYICVIDSRGTILDQISLNTINDIDYHDLLESRDKDRQQEHRNWQTIEGIKELKQGYLSQAVHRIAELMVAYKAVVALEDLNMGFKRGRQKVESSVYQQFEKQLIDKLNYLVDKKKRPEDIGGLLRAYQFTAPFKSFKEMGKQNGFLFYIPAWNTSNIDPTTGFVNLFHVQYENVDKAKSFFQKFDSISYNPKKDWFEFAFDYKNFTKKAEGSRSMWILCTHGSRIKNFRNSQKNGQWDSEEFALTEAFKSLFVRYEIDYTADLKTAIVDEKQKDFFVDLLKLFKLTVQMRNSWKEKDLDYLISPVAGADGRFFDTREGNKSLPKDADANGAYNIALKGLWALRQIRQTSEGGKLKLAISNKEWLQFVQERSYEKD

SEQ ID NO: 51 - protein, 1324 aa, Prevotella disiens
MENYQEFTNLFQLNKTLRFELKPIGKTCELLEEGKIFASGSFLEKDKVRADNVSYVKKEIDKKHKIFIEETLSSFSISNDLLKQYFDCYNELKAFKKDCKSDEEEVKKTALRNKCTSIQRAMREAISQAFLKSPQKKLLAIKNLIENVFKADENVQHFSEFTSYFSGFETNRENFYSDEEKSTSIAYRLVHDNLPIFIKNIYIFEKLKEQFDAKTLSEIFENYKLYVAGSSLDEVFSLEYFNNTLTQKGIDNYNAVIGKIVKEDKQEIQGLNEHINLYNQKHKDRRLPFFISLKKQILSDREALSWLPDMFKNDSEVIDALKGFYIEDGFENNVLTPLATLLSSLDKYNLNGIFIRNNEALSSLSQNVYRNFSIDEAIDAQNAELQTFNNYELIANALRAKIKKETKQGRKSFEKYEEYIDKKVKAIDSLSIQEINELVENYVSEFNSNSGNMPRKVEDYFSLMRKGDFGSNDLIENIKTKLSAAEKLLGTKYQETAKDIFKKDENSKLIKELLDATKQFQHFIKPLLGTGEEADRDLVFYGDFLPLYEKFEELTLLYNKVRNRLTQKPYSKDKIRLCFNKPKLMTGWVDSKTEKSDNGTQYGGYLFRKKNEIGEYDYFLGISSKAQLFRKNEAVIGDYERLDYYQPKANTIYGSAYEGENSYKEDKKRLNKVIIAYIEQIKQTNIKKSIIESISKYPNISDDDKVTPSSLLEKIKKVSIDSYNGILSFKSFQSVNKEVIDNLLKTISPLKNKAEFLDLINKDYQIFTEVQAVIDEICKQKTFIYFPISNVELEKEMGDKDKPLCLFQISNKDLSFAKTFSANLRKKRGAENLHTMLFKALMEGNQDNLDLGSGAIFYRAKSLDGNKPTHPANEAIKCRNVANKDKVSLFTYDIYKNRRYMENKFLFHLSIVQNYKAANDSAQLNSSATEYIRKADDLHIIGIDRGERNLLYYSVIDMKGNIVEQDSLNIIRNNDLETDYHDLLDKREKERKANRQNWEAVEGIKDLKKGYLSQAVHQIAQLMLKYNAIIALEDLGQMFVTRGQKIEKAVYQQFEKSLVDKLSYLVDKKRPYNELGGILKAYQLASSITKNNSDKQNGFLFYVPAWNTSKIDPVTGFTDLLRPKAMTIKEAQDFFGAFDNISYNDKGYFEFETNYDKFKIRMKSAQTRWTICTFGNRIKRKKDKNYWNYEEVELTEEFKKLFKDSNIDYENCNLKEEIQNKDNRKFFDDLIKLLQLTLQMRNSDDKGNDYIISPVANAEGQFFDSRNGDKKLPLDADANGAYNIARKGLWNIRQIKQTKNKDDLNLSISSTEWLDFVREKPYLK

SEQ ID NO: 52 - protein, 1484 aa, unidentified
  VARIANT 1073: note = Xaa can be any naturally occurring amino acid
  source 1..1484: note = Peregrinibacteria bacterium
MSNFFKNFTNLYELSKTLRFELKPVGDTLTNMKDHLEYDEKLQTFLKDQNIDDAYQALKPQFDEIHEEFITDSLESKKAKEIDFSEYLDLFQEKKELNDSEKKLRNKIGETFNKAGEKWKKEKYPQYEWKKGSKIANGADILSCQDMLQFIKYKNPEDEKIKNYIDDTLKGFFTYFGGFNQNRANYYETKKEASTAVATRIVHENLPKFCDNVIQFKHIIKRKKDGTVEKTERKTEYLNAYQYLKNNNKITQIKDAETEKMIESTPIAEKIFDVYYFSSCLSQKQIEEYNRIIGHYNLLINLYNQAKRSEGKHLSANEKKYKDLPKFKTLYKQIGCGKKKDLFYTIKCDTEEEANKSRNEGKESHSVEEIINKAQEAINKYFKSNNDCENINTVPDFINYILTKENYEGVYWSKAAMNTISDKYFANYHDLQDRLKEAKVFQKADKKSEDDIKIPEAIELSGLFGVLDSLADWQTTLFKSSILSNEKLKIITDSQTPSEALLKMIFNDIEKNMESFLKETNDIITLKKYKGNKEGTEKIKQWFDYTLAINRMLKYFLVKENKIKGNSLDTNISEALKTLIYSDDAEWFKWYDALRNYLTQKPQDEAKENKLKLNFDNPSLAGGWDVNKECSNFCVILKDKNEKKYLAMIKKGENTLFQKEWTEGRGKNLTKKSNPLFEINNCEILSKMEYDFWADVSKMIPKCSTQLKAVVNHFKQSDNEFIFPIGYKVTSGEKFREECKISKQDFELNNKVFNKNELSVTAMRYDLSSTQEKQYIKAFQKEYWELLFKQEKRDTKLTNNEIFNEWINFCNKKYSELLSWERKYKDALTNWINFCKYFLSKYPKTTLFNYSFKESENYNSLDEFYRDVDICSYKLNINTTINKSILDRLVEEGKLYLFEIKNQDSNDGKSIGHKNNLHTIYWNAIFENFDNRPKLNGEAEIFYRKAISKDKLGIVKGKKTKNGTWIIKNYRFSKEKFILHVPITLNFCSNNEYVNDIVNTKFYNFSNLHFLGIDRGEKHLAYYSLVNKNGEIVDQGTLNLPFTDKDGNQRSIKKEKYFYNKQEDKWEAKEVDXWNYNDLLDAMASNRDMARKNWQRIGTIKEAKNGYVSLVIRKIADLAVNNERPAFIVLEDLNTGFKRSRQKIDKSVYQKFELALAKKLNFLVDKNAKRDEIGSPTKALQLTPPVNNYGDIENKKQAGIMLYTRANYTSQTDPATGWRKTIYLKAGPEETTYKKDGKIKNKSVKDQIIETFTDIGFDGKDYYFEYDKGEFVDEKTGEIKPKKWRLYSGENGKSLDRFRGEREKDKYEWKIDKIDIVKILDDLFVNFDKNISLLKQLKEGVELTRNNEHGTGESLRFAINLIQQIRNTGNNERDNDFILSPVRDENGKHFDSREYWDKETKGEKISMPSSGDANGAFNIARKGIIMNAHILANSDSKDLSLFVSDEEWDLHLNNKTEWKKQLNIFSSRKAMAKRKKKRPAATKK

SEQ ID NO: 53 - protein, 1245 aa, Porphyromonas macacae
MKTQHFFEDFTSLYSLSKTIRFELKPIGKTLENIKKNGLIRRDEQRLDDYEKLKKVIDEYHEDFIANILSSFSFSEEILQSYIQNLSISEARAKIEKTMRDTLAKAFSEDERYKSIFKKELVKKDIPVWCPAYKSLCKKFDNFTTSLVPFHENRKNLYTSNEITASIPYRIVHVNLPKFIQNIEALCELQKKMGADLYLEMMENLRNVWPSFVKTPDDLCNLKTYNHLMVQSSISEYNRFVGGYSTEDGTKHQGINEWINIYRQRNKEMRLPGLVFLHKQILAKVDSSSFISDTLENDDQVFCVLRQFRKLFWNTVSSKEDDAASLKDLFCGLSGYDPEAIYVSDAHLATISKNIFDRWNYISDAIRRKTEVLMPRKKESVERYAEKISKQIKKRQSYSLAELDDLLAHYSEESLPAGFSLLSYFTSLGGQKYLVSDGEVILYEEGSNIWDEVLIAFRDLQVILDKDFTEKKLGKDEEAVSVIKKALDSALRLRKFFDLLSGTGAEIRRDSSFYALYTDRMDKLKGLLKMYDKVRNYLTKKPYSIEKFKLHFDNPSLLSGWDKNKELNNLSVIFRQNGYYYLGIMTPKGKNLFKTLPKLGAEEMFYEKMEYKQIAEPMLMLPKVFFPKKTKPAFAPDQSVVDIYNKKTFKTGQKGFNKKDLYRLIDFYKEALTVHEWKLFNFSFSPTEQYRNIGEFFDEVREQAYKVSMVNVPASYIDEAVENGKLYLFQIYNKDFSPYSKGIPNLHTLYWKALFSEQNQSRVYKLCGGGELFYRKASLHMQDTTVHPKGISIHKKNLNKKGETSLFNYDLVKDKRFTEDKFFFHVPISINYKNKKITNVNQMVRDYIAQNDDLQHGIDRGERNLLYISRIDTRGNLLEQFSLNVIESDKGDLRTDYQKILGDREQERLRRRQEWKSIESIKDLKDGYMSQVVHKICNMVVEHKAIVVLENLNLSFMKGRKKVEKSVYEKFERMLVDKLNYLVVDKKNLSNEPGGLYAAYQLTNPLFSFEELHRYPQSGILFFVDPWNTSLTDPSTGFVNLLGRINYTNVGDARKFFDRFNAIRYDGKGNILFDLDLSRFDVRVETQRKLWTLTTFGSRIAKSKKSGKWMVERIENLSLCFLELFEQFNIGYRVEKDLKKAILSQDRKEFYVRLIYLFNLMMQIRNSDGEEDYILSPALNEKNLQFDSRLIEAKDLPVDADANGAYNVARKGLMVVQRIKRGDHESIHRIGRAQWLRYVQEGIVE

SEQ ID NO: 54 - protein, 1250 aa, Smithella sp.
MQTLFENFTNQYPVSKTLRFELIPQGKTKDFIEQKGLLKKDEDRAEKYKKVKNIIDEYHKDFIEKSLNGLKLDGLEKYKTLYLKQEKDDKDKKAFDKEKENLRKQIANAFRNNEKFKTLFAKELIKNDLMSFACEEDKKNVKEFEAFTTYFTGFHQNRANMYVADEKRTAIASRLIHENLPKFIDNIKIFEKMKKEAPELLSPFNQTLKDMKDVIKGTTLEEIFSLDYFNKTLTQSGIDIYNSVIGGRTPEEGKTKIKGLNEYINTDFNQKQTDKKKRQPKFKQLYKQILSDRQSLSFIAEAFKNDTEILEAIEKFYVNELLHFSNEGKSTNVLDAIKNAVSNLESFNLTKMYFRSGASLTDVSRKVFGEWSIINRALDNYYATTYPIKPREKSEKYEERKEKWLKQDFNVSLIQTAIDEYDNETVKGKNSGKVIADYFAKFCDDKETDLIQKVNEGYIAVKDLLNTPCPENEKLGSNKDQVKQIKAFMDSIMDIMHFVRPLSLKDTDKEKDETFYSLFTPLYDHLTQTIALYNKVRNYLTQKPYSTEKIKLNFENSTLLGGWDLNKETDNTAIILRKDNLYYLGIMDKRHNRIFRNVPKADKKDFCYEKMVYKLLPGANKMLPKVFFSQSRIQEFTPSAKLLENYANETHKKGDNFNLNHCHKLIDFFKDSINKHEDWKNFDFRFSATSTYADLSGFYHEVEHQGYKISFQSVADSFIDDLVNEGKLYLFQIYNKDFSPFSKGKPNLHTLYWKMLFDENNLKDVVYKLNGEAEVFYRKKSIAEKNTTIHKANESIINKNPDNPKATSTFNYDIVKDKRYTIDKFQFHIPITMNFKAEGIFNMNQRVNQFLKANPDINIIGIDRGERHLLYYALINQKGKILKQDTLNVIANEKQKVDYHNLLDKKEGDRATARQEWGVIETIKELKEGYLSQVIHKLTDLMIENNAIIVMEDLNFGFKRGRQKVEKQVYQKFEKMLIDKLNYLVDKNKKANELGGLLNAFQLANKFESFQKMGKQNGFIFYVPAWNTSKTDPATGFIDFLKPRYENLNQAKDFFEKFDSIRLNSKADYFEFAFDFKNFTEKADGGRTKWTVCTTNEDRYQWNRALNNNRGSQEKYDITAELKSLFDGKVDYKSGKDLKQQIASQESADFFKALMKNLSITLSLRHNNGEKGDNEQDYILSPVADSKGRFFDSRKADDDMPKNADANGAYHIALKGLWCLEQISKTDDLKKVKLAISNKEWLEFVQTLKG

SEQ ID NO: 55 - protein, 1228 aa, unidentified
  source 1..1228: note = Lachnospiraceae bacterium
MSKLEKFTNCYSLSKTLRFKAIPVGKTQENIDNKRLLVEDEKRAEDYKGVKKLLDRYYLSFINDVLHSIKLKNLNNYISLFRKKTRTEKENKELENLEINLRKEIAKAFKGNEGYKSLFKKDIIETILPEFLDDKDEIALVNSFNGFTTAFTGFFDNRENMFSEEAKSTSIAFRCINENLTRYISNMDIFEKVDAIFDKHEVQEIKEKILNSDYDVEDFFEGEFFNFVLTQEGIDVYNAIIGGFVTESGEKIKGLNEYINLYNQKTKQKLPKFKPLYKQVLSDRESLSFYGEGYTSDEEVLEVFRNTLNKNSEIFSSIKKLEKLFKNFDEYSSAGIFVKNGPAISTISKDIFGEWNVIRDKWNAEYDDIHLKKKAVVTEKYEDDRRKSFKKIGSFSLEQLQEYADADLSVVEKLKEIIIQKVDEIYKVYGSSEKLFDADFVLEKSLKKNDAVVAIMKDLLDSVKSFENYIKAFFGEGKETNRDESFYGDFVLAYDILLKVDHIYDAIRNYVTQKPYSKDKFKLYFQNPQFMGGWDKDKETDYRATILRYGSKYYLAIMDKKYAKCLQKIDKDDVNGNYEKINYKLLPGPNKMLPKVFFSKKWMAYYNPSEDIQKIYKNGTFKKGDMFNLNDCHKLIDFFKDSISRYPKWSNAYDFNFSETEKYKDIAGFYREVEEQGYKVSFESASKKEVDKLVEEGKLYMFQIYNKDFSDKSHGTPNLHTMYFKLLFDENNHGQIRLSGGAELFMRRASLKKEELVVHPANSPIANKNPDNPKKTTTLSYDVYKDKRFSEDQYELHIPIAINKCPKNIFKINTEVRVLLKHDDNPYVIGIDRGERNLLYIVVVDGKGNIVEQYSLNEIINNFNGIRIKTDYHSLLDKKEKERFEARQNWTSIENIKELKAGYISQVVHKICELVEKYDAVIALEDLNSGFKNSRVKVEKQVYQKFEKMLIDKLNYMVDKKSNPCATGGALKGYQITNKFESFKSMSTQNGFIFYIPAWLTSKIDPSTGFVNLLKTKYTSIADSKKFISSFDRIMYVPEEDLFEFALDYKNFSRTDADYIKKWKLYSYGNRIRIFRNPKKNNVFDWEEVCLTSAYKELFNKYGINYQQGDIRALLCEQSDKAFYSSFMALMSLMLQMRNSITGRTDVDFLISPVKNSDGIFYDSRNYEAQENAILPKNADANGAYNIARKVLWAIGQFKKAEDEKLDKVKIAISNKEWLEYAQTSVKH

SEQ ID NO: 56 - protein, 1227 aa, unidentified
  source 1..1227: note = Lachnospiraceae bacterium
SKLEKFTNCYSLSKTLRFKAIPVGKTQENIDNKRLLVEDEKRAEDYKGVKKLLDRYYLSFINDVLHSIKLKNLNNYISLFRKKTRTEKENKELENLEINLRKEIAKAFKGNEGYKSLFKKDIIETILPEFLDDKDEIALVNSFNGFTTAFTGFFDNRENMFSEEAKSTSIAFRCINENLTRYISNMDIFEKVDAIFDKHEVQEIKEKILNSDYDVEDFFEGEFFNFVLTQEGIDVYNAIIGGFVTESGEKIKGLNEYINLYNQKTKQKLPKFKPLYKQVLSDRESLSFYGEGYTSDEEVLEVFRNTLNKNSEIFSSIKKLEKLFKNFDEYSSAGIFVKNGPAISTISKDIFGEWNVIRDKWNAEYDDIHLKKKAVVTEKYEDDRRKSFKKIGSFSLEQLQEYADADLSVVEKLKEIIIQKVDEIYKVYGSSEKLFDADFVLEKSLKKNDAVVAIMKDLLDSVKSFENYIKAFFGEGKETNRDESFYGDFVLAYDILLKVDHIYDAIRNYVTQKPYSKDKFKLYFQNPQFMGGWDKDKETDYRATILRYGSKYYLAIMDKKYAKCLQKIDKDDVNGNYEKINYKLLPGPNKMLPKVFFSKKWMAYYNPSEDIQKIYKNGTFKKGDMFNLNDCHKLIDFFKDSISRYPKWSNAYDFNFSETEKYKDIAGFYREVEEQGYKVSFESASKKEVDKLVEEGKLYMFQIYNKDFSDKSHGTPNLHTMYFKLLFDENNHGQIRLSGGAELFMRRASLKKEELVVHPANSPIANKNPDNPKKTTTLSYDVYKDKRFSEDQYELHIPIAINKCPKNIFKINTEVRVLLKHDDNPYVIGIDRGERNLLYIVVVDGKGNIVEQYSLNEIINNFNGIRIKTDYHSLLDKKEKERFEARQNWTSIENIKELKAGYISQVVHKICELVEKYDAVIALEDLNSGFKNSRVKVEKQVYQKFEKMLIDKLNYMVDKKSNPCATGGALKGYQITNKFESFKSMSTQNGFIFYIPAWLTSKIDPSTGFVNLLKTKYTSIADSKKFISSFDRIMYVPEEDLFEFALDYKNFSRTDADYIKKWKLYSYGNRIRIFRNPKKNNVFDWEEVCLTSAYKELFNKYGINYQQGDIRALLCEQSDKAFYSSFMALMSLMLQMRNSITGRTDVDFLISPVKNSDGIFYDSRNYEAQENAILPKNADANGAYNIARKVLWAIGQFKKAEDEKLDKVKIAISNKEWLEYAQTSVKH

SEQ ID NO: 57 - protein, 1107 aa, Bacillus hisashii
ATRSFILKIEPNEEVKKGLWKTHEVLNHGIAYYMNILKLIRQEAIYEHHEQDPKNPKKVSKAEIQAELWDFVLKMQKCNSFTHEVDKDEVFNILRELYEELVPSSVEKKGEANQLSNKFLYPLVDPNSQSGKGTASSGRKPRWYNLKIAGDPSWEEEKKKWEEDKKKDPLAKILGKLAEYGLIPLFIPYTDSNEPIVKEIKWMEKSRNQSVRRLDKDMFIQALERFLSWESWNLKVKEEYEKVEKEYKTLEERIKEDIQALKALEQYEKERQEQLLRDTLNTNEYRLSKRGLRGWREIIQKWLKMDENEPSEKYLEVFKDYQRKHPREAGDYSVYEFLSKKENHFIWRNHPEYPYLYATFCEIDKKKKDAKQQATFTLADPINHPLWVRFEERSGSNLNKYRILTEQLHTEKLKKKLTVQLDRLIYPTESGGWEEKGKVDIVLLPSRQFYNQIFLDIEEKGKHAFTYKDESIKFPLKGTLGGARVQFDRDHLRRYPHKVESGNVGRIYFNMTVNIEPTESPVSKSLKIHRDDFPKVVNFKPKELTEWIKDSKGKKLKSGIESLEIGLRVMSIDLGQRQAAAASIFEVVDQKPDIEGKLFFPIKGTELYAVHRASFNIKLPGETLVKSREVLRKAREDNLKLMNQKLNFLRNVLHFQQFEDITEREKRVTKWISRQENSDVPLVYQDELIQIRELMYKPYKDWVAFLKQLHKRLEVEIGKEVKHWRKSLSDGRKGLYGISLKNIDEIDRTRKFLLRWSLRPTEPGEVRRLEPGQRFAIDQLNHLNALKEDRLKKMANTIIMHALGYCYDVRKKKWQAKNPACQIILFEDLSNYNPYGERSRFENSRLMKWSRREIPRQVALQGEIYGLQVGEVGAQFSSRFHAKTGSPGIRCRVVTKEKLQDNRFFKNLQREGRLTLDKIAVLKEGDLYPDKGGEKFISLSKDRKCVTTHADINAAQNLQKRFWTRTHGFYKVYCKAYQVDGQTVYIPESKDQKQKIIEEFGEGYFILKDGVYEWVNAGKLKIKKGSSKQSSSELVDSDILKDSFDLASELKGEKLMLYRDPSGNVFPSDKWMAAGVFFGKLERILISKLTNQYSISTIEDDSSKQSM

SEQ ID NO: 58 - protein, 1300 aa, Francisella tularensis
MSIYQEFVNKYSLSKTLRFELIPQGKTLENIKARGLILDDEKRAKDYKKAKQIIDKYHQFFIEEILSSVCISEDLLQNYSDVYFKLKKSDDDNLQKDFKSAKDTIKKQISEYIKDSEKFKNLFNQNLIDAKKGQESDLILWLKQSKDNGIELFKANSDITDIDEALEIIKSFKGWTTYFKGFHENRKNVYSSNDIPTSIIYRIVDDNLPKFLENKAKYESLKDKAPEAINYEQIKKDLAEELTFDIDYKTSEVNQRVFSLDEVFEIANFNNYLNQSGITKFNTIIGGKFVNGENTKRKGINEYINLYSQQINDKTLKKYKMSVLFKQILSDTESKSFVIDKLEDDSDVVTTMQSFYEQIAAFKTVEEKSIKETLSLLFDDLKAQKLDLSKIYFKNDKSLTDLSQQVFDDYSVIGTAVLEYITQQIAPKNLDNPSKKEQELIAKKTEKAKYLSLETIKLALEEFNKHRDIDKQCRFEEILANFAAIPMIFDEIAQNKDNLAQISIKYQNQGKKDLLQASAEDDVKAIKDLLDQTNNLLHKLKIFHISQSEDKANILDKDEHFYLVFEECYFELANIVPLYNKIRNYITQKPYSDEKFKLNFENSTLANGWDKNKEPDNTAILFIKDDKYYLGVMNKKNNKIFDDKAIKENKGEGYKKIVYKLLPGANKMLPKVFFSAKSIKFYNPSEDILRIRNHSTHTKNGSPQKGYEKFEFNIEDCRKFIDFYKQSISKHPEWKDFGFRFSDTQRYNSIDEFYREVENQGYKLTFENISESYIDSVVNQGKLYLFQIYNKDFSAYSKGRPNLHTLYWKALFDERNLQDVVYKLNGEAELFYRKQSIPKKITHPAKEAIANKNKDNPKKESVFEYDLIKDKRFTEDKFFFHCPITINFKSSGANKFNDEINLLLKEKANDVHILSIDRGERHLAYYTLVDGKGNIIKQDTFNIIGNDRMKTNYHDKLAAIEKDRDSARKDWKKINNIKEMKEGYLSQVVHEIAKLVIEYNAIVVFEDLNFGFKRGRFKVEKQVYQKLEKMLIEKLNYLVFKDNEFDKTGGVLRAYQLTAPFETFKKMGKQTGIIYYVPAGFTSKICPVTGFVNQLYPKYESVSKSQEFFSKFDKICYNLDKGYFEFSFDYKNFGDKAAKGKWTIASFGSRLINFRNSDKNHNWDTREVYPTKELEKLLKDYSIEYGHGECIKAAICGESDKKFFAKLTSVLNTILQMRNSKTGTELDYLISPVADVNGNFFDSRQAPKNMPQDADANGAYHIGLKGLMLLGRIKNNQEGKKLNLVIKNEEYFEFVQNRNN

SEQ ID NO: 59 - protein, 1227 aa, synthetic construct
SKLEKFTNCYSLSKTLRFKAIPVGKTQENIDNKRLLVEDEKRAEDYKGVKKLLDRYYLSFINDVLHSIKLKNLNNYISLFRKKTRTEKENKELENLEINLRKEIAKAFKGNEGYKSLFKKDIIETILPEFLDDKDEIALVNSFNGFTTAFTGFFDNRENMFSEEAKSTSIAFRCINENLTRYISNMDIFEKVDAIFDKHEVQEIKEKILNSDYDVEDFFEGEFFNFVLTQEGIDVYNAIIGGFVTESGEKIKGLNEYINLYNQKTKQKLPKFKPLYKQVLSDRESLSFYGEGYTSDEEVLEVFRNTLNKNSEIFSSIKKLEKLFKNFDEYSSAGIFVKNGPAISTISKDIFGEWNVIRDKWNAEYDDIHLKKKAVVTEKYEDDRRKSFKKIGSFSLEQLQEYADADLSVVEKLKEIIIQKVDEIYKVYGSSEKLFDADFVLEKSLKKNDAVVAIMKDLLDSVKSFENYIKAFFGEGKETNRDESFYGDFVLAYDILLKVDHIYDAIRNYVTQKPYSKDKFKLYFQNPQFMGGWDKDKETDYRATILRYGSKYYLAIMDKKYAKCLQKIDKDDVNGNYEKINYKLLPGPNKMLPKVFFSKKWMAYYNPSEDIQKIYKNGTFKKGDMFNLNDCHKLIDFFKDSISRYPKWSNAYDFNFSETEKYKDIAGFYREVEEQGYKVSFESASKKEVDKLVEEGKLYMFQIYNKDFSDKSHGTPNLHTMYFKLLFDENNHGQIRLSGGAELFMRRASLKKEELVVHPANSPIANKNPDNPKKTTTLSYDVYKDKRFSEDQYELHIPIAINKCPKNIFKINTEVRVLLKHDDNPYVIGIARGERNLLYIVVVDGKGNIVEQYSLNEIINNFNGIRIKTDYHSLLDKKEKERFEARQNWTSIENIKELKAGYISQVVHKICELVEKYDAVIALEDLNSGFKNSRVKVEKQVYQKFEKMLIDKLNYMVDKKSNPCATGGALKGYQITNKFESFKSMSTQNGFIFYIPAWLTSKIDPSTGFVNLLKTKYTSIADSKKFISSFDRIMYVPEEDLFEFALDYKNFSRTDADYIKKWKLYSYGNRIRIFRNPKKNNVFDWEEVCLTSAYKELFNKYGINYQQGDIRALLCEQSDKAFYSSFMALMSLMLQMRNSITGRTDVDFLISPVKNSDGIFYDSRNYEAQENAILPKNADANGAYNIARKVLWAIGQFKKAEDEKLDKVKIAISNKEWLEYAQTSVKH

SEQ ID NO: 60 - protein, 1228 aa, synthetic construct
MSKLEKFTNCYSLSKTLRFKAIPVGKTQENIDNKRLLVEDEKRAEDYKGVKKLLDRYYLSFINDVLHSIKLKNLNNYISLFRKKTRTEKENKELENLEINLRKEIAKAFKGNEGYKSLFKKDIIETILPEFLDDKDEIALVNSFNGFTTAFTGFFDNRENMFSEEAKSTSIAFRCINENLTRYISNMDIFEKVDAIFDKHEVQEIKEKILNSDYDVEDFFEGEFFNFVLTQEGIDVYNAIIGGFVTESGEKIKGLNEYINLYNQKTKQKLPKFKPLYKQVLSDRESLSFYGEGYTSDEEVLEVFRNTLNKNSEIFSSIKKLEKLFKNFDEYSSAGIFVKNGPAISTISKDIFGEWNVIRDKWNAEYDDIHLKKKAVVTEKYEDDRRKSFKKIGSFSLEQLQEYADADLSVVEKLKEIIIQKVDEIYKVYGSSEKLFDADFVLEKSLKKNDAVVAIMKDLLDSVKSFENYIKAFFGEGKETNRDESFYGDFVLAYDILLKVDHIYDAIRNYVTQKPYSKDKFKLYFQNPQFMGGWDKDKETDYRATILRYGSKYYLAIMDKKYAKCLQKIDKDDVNGNYEKINYKLLPGPNKMLPKVFFSKKWMAYYNPSEDIQKIYKNGTFKKGDMFNLNDCHKLIDFFKDSISRYPKWSNAYDFNFSETEKYKDIAGFYREVEEQGYKVSFESASKKEVDKLVEEGKLYMFQIYNKDFSDKSHGTPNLHTMYFKLLFDENNHGQIRLSGGAELFMRRASLKKEELVVHPANSPIANKNPDNPKKTTTLSYDVYKDKRFSEDQYELHIPIAINKCPKNIFKINTEVRVLLKHDDNPYVIGIARGERNLLYIVVVDGKGNIVEQYSLNEIINNFNGIRIKTDYHSLLDKKEKERFEARQNWTSIENIKELKAGYISQVVHKICELVEKYDAVIALEDLNSGFKNSRVKVEKQVYQKFEKMLIDKLNYMVDKKSNPCATGGALKGYQITNKFESFKSMSTQNGFIFYIPAWLTSKIDPSTGFVNLLKTKYTSIADSKKFISSFDRIMYVPEEDLFEFALDYKNFSRTDADYIKKWKLYSYGNRIRIFRNPKKNNVFDWEEVCLTSAYKELFNKYGINYQQGDIRALLCEQSDKAFYSSFMALMSLMLQMRNSITGRTDVDFLISPVKNSDGIFYDSRNYEAQENAILPKNADANGAYNIARKVLWAIGQFKKAEDEKLDKVKIAISNKEWLEYAQTSVKH

SEQ ID NO: 61 - protein, 1228 aa, synthetic construct
MSKLEKFTNCYSLSKTLRFKAIPVGKTQENIDNKRLLVEDEKRAEDYKGVKKLLDRYYLSFINDVLHSIKLKNLNNYISLFRKKTRTEKENKELENLEINLRKEIAKAFKGNEGYKSLFKKDIIETILPEFLDDKDEIALVNSFNGFTTAFTGFFDNRENMFSEEAKSTSIAFRCINENLTRYISNMDIFEKVDAIFDKHEVQEIKEKILNSDYDVEDFFEGEFFNFVLTQEGIDVYNAIIGGFVTESGEKIKGLNEYINLYNQKTKQKLPKFKPLYKQVLSDRESLSFYGEGYTSDEEVLEVFRNTLNKNSEIFSSIKKLEKLFKNFDEYSSAGIFVKNGPAISTISKDIFGEWNVIRDKWNAEYDDIHLKKKAVVTEKYEDDRRKSFKKIGSFSLEQLQEYADADLSVVEKLKEIIIQKVDEIYKVYGSSEKLFDADFVLEKSLKKNDAVVAIMKDLLDSVKSFENYIKAFFGEGKETNRDESFYGDFVLAYDILLKVDHIYDAIRNYVTQKPYSKDKFKLYFQNPQFMGGWDKDKETDYRATILRYGSKYYLAIMDKKYAKCLQKIDKDDVNGNYEKINYKLLPGPNKMLPKVFFSKKWMAYYNPSEDIQKIYKNGTFKKGDMFNLNDCHKLIDFFKDSISRYPKWSNAYDFNFSETEKYKDIAGFYREVEEQGYKVSFESASKKEVDKLVEEGKLYMFQIYNKDFSDKSHGTPNLHTMYFKLLFDENNHGQIRLSGGAELFMRRASLKKEELVVAPANSPIANKNPDNPKKTTTLSYDVYKDKRFSEDQYELHIPIAINKCPKNIFKINTEVRVLLKHDDNPYVIGIDRGERNLLYIVVVDGKGNIVEQYSLNEIINNFNGIRIKTDYHSLLDKKEKERFEARQNWTSIENIKELKAGYISQVVHKICELVEKYDAVIALEDLNSGFKNSRVKVEKQVYQKFEKMLIDKLNYMVDKKSNPCATGGALKGYQITNKFESFKSMSTQNGFIFYIPAWLTSKIDPSTGFVNLLKTKYTSIADSKKFISSFDRIMYVPEEDLFEFALDYKNFSRTDADYIKKWKLYSYGNRIRIFRNPKKNNVFDWEEVCLTSAYKELFNKYGINYQQGDIRALLCEQSDKAFYSSFMALMSLMLQMRNSITGRTDVDFLISPVKNSDGIFYDSRNYEAQENAILPKNADANGAYNIARKVLWAIGQFKKAEDEKLDKVKIAISNKEWLEYAQTSVKH

SEQ ID NO: 62 - protein, 1227 aa, synthetic construct; identical to SEQ ID NO: 59

SEQ ID NO: 63 - protein, 1228 aa, synthetic construct
MSKLEKFTNCYSLSKTLRFKAIPVGKTQENIDNKRLLVEDEKRAEDYKGVKKLLDRYYLSFINDVLHSIKLKNLNNYISLFRKKTRTEKENKELENLEINLRKEIAKAFKGNEGYKSLFKKDIIETILPEFLDDKDEIALVNSFNGFTTAFTGFFDNRENMFSEEAKSTSIAFRCINENLTRYISNMDIFEKVDAIFDKHEVQEIKEKILNSDYDVEDFFEGEFFNFVLTQEGIDVYNAIIGGFVTESGEKIKGLNEYINLYNQKTKQKLPKFKPLYKQVLSDRESLSFYGEGYTSDEEVLEVFRNTLNKNSEIFSSIKKLEKLFKNFDEYSSAGIFVKNGPAISTISKDIFGEWNVIRDKWNAEYDDIHLKKKAVVTEKYEDDRRKSFKKIGSFSLEQLQEYADADLSVVEKLKEIIIQKVDEIYKVYGSSEKLFDADFVLEKSLKKNDAVVAIMKDLLDSVKSFENYIKAFFGEGKETNRDESFYGDFVLAYDILLKVDHIYDAIRNYVTQKPYSKDKFKLYFQNPQFMGGWDKDKETDYRATILRYGSKYYLAIMDKKYAKCLQKIDKDDVNGNYEKINYKLLPGPNKMLPKVFFSKKWMAYYNPSEDIQKIYKNGTFKKGDMFNLNDCHKLIDFFKDSISRYPKWSNAYDFNFSETEKYKDIAGFYREVEEQGYKVSFESASKKEVDKLVEEGKLYMFQIYNKDFSDKSHGTPNLHTMYFKLLFDENNHGQIRLSGGAELFMRRASLKKEELVVHPANSPIANKNPDNPKKTTTLSYDVYKDKRFSEDQYELHIPIAINKCPKNIFKINTEVRVLLKHDDNPYVIGIDRGERNLLYIVVVDGKGNIVEQYSLNEIINNFNGIRIKTDYHSLLDKKEKERFEARQNWTSIENIKELKAGYISQVVHKICELVEKYDAVIALEDLNSGFKNSRVKVEKQVYQKFEKMLIDKLNYMVDKKSNPCATGGALKGYQITNKFESFKSMSTQNGFIFYIPAWLTSKIDPSTGFVNLLKTKYTSIADSKKFISSFDRIMYVPEEDLFEFALDYKNFSRTDADYIKKWKLYSYGNRIRIFRNPKKNNVFDWEEVCLTSAYKELFNKYGINYQQGDIRALLCEQSDKAFYSSFMALMSLMLQMANSITGRTDVDFLISPVKNSDGIFYDSRNYEAQENAILPKNADANGAYNIARKVLWAIGQFKKAEDEKLDKVKIAISNKEWLEYAQTSVKH

SEQ ID NO: 64 - protein, 1307 aa, synthetic construct
MTQFEGFTNLYQVSKTLRFELIPQGKTLKHIQEQGFIEEDKARNDHYKELKPIIDRIYKTYADQCLQLVQLDWENLSAAIDSYRKEKTEETRNALIEEQATYRNAIHDYFIGRTDNLTDAINKRHAEIYKGLFKAELFNGKVLKQLGTVTTTEHENALLRSFDKFTTYFSGFYRNRKNVFSAEDISTAIPHRIVQDNFPKFKENCHIFTRLITAVPSLREHFENVKKAIGIFVSTSIEEVFSFPFYNQLLTQTQIDLYNQLLGGISREAGTEKIKGLNEVLNLAIQKNDETAHIIASLPHRFIPLFKQILSDRNTLSFILEEFKSDEEVIQSFCKYKTLLRNENVLETAEALFNELNSIDLTHIFISHKKLETISSALCDHWDTLRNALYERRISELTGKITKSAKEKVQRSLKHEDINLQEIISAAGKELSEAFKQKTSEILSHAHAALDQPLPTTLKKQEEKEILKSQLDSLLGLYHLLDWFAVDESNEVDPEFSARLTGIKLEMEPSLSFYNKARNYATKKPYSVEKFKLNFQMPTLARGWDVNREKNNGAILFVKNGLYYLGIMPKQKGRYKALSFEPTEKTSEGFDKMYYDYFPDAAKMIPKCSTQLKAVTAHFQTHTTPILLSNNFIEPLEITKEIYDLNNPEKEPKKFQTAYAKKTGDQKGYREALCKWIDFTRDFLSKYTKTTSIDLSSLRPSSQYKDLGEYYAELNPLLYHISFQRIAEKEIMDAVETGKLYLFQIYNKDFAKGHHGKPNLHTLYWTGLFSPENLAKTSIKLNGQAELFYRPKSRMKRMAARLGEKMLNKKLKDQKTPIPDTLYQELYDYVNHRLSHDLSDEARALLPNVITKEVSHEIIKDRRFTSDKFFFHVPITLNYQAANSPSKFNQRVNAYLKEHPETPIIGIDRGERNLIYITVIDSTGKILEQRSLNTIQQFDYQKKLDNREKERVAARQAWSVVGTIKDLKQGYLSQVIHEIVDLMIHYQAVVVLENLNFGFKSKRTGIAEKAVYQQFEKMLIDKLNCLVLKDYPAEKVGGVLNPYQLTDQFTSFAKMGTQSGFLFYVPAPYTSKIDPLTGFVDPFVWKTIKNHESRKHFLEGFDFLHYDVKTGDFILHFKMNRNLSFQRGLPGFMPAWDIVFEKNETQFDAKGTPFIAGKRIVPVIENHRFTGRYRDLYPANELIALLEEKGIVFRDGSNILPKLLENDDSHAIDTMVALIRSVLQMRNSNAATGEDYINSPVRDLNGVCFDSRFQNPEWPMDADANGAYHIALKGQLLLNHLKESKDLKLQNGISNQDWLAYIQELRN

SEQ ID NO: 65 - protein, 1307 aa, synthetic construct
MTQFEGFTNLYQVSKTLRFELIPQGKTLKHIQEQGFIEEDKARNDHYKELKPIIDRIYKTYADQCLQLVQLDWENLSAAIDSYRKEKTEETRNALIEEQATYRNAIHDYFIGRTDNLTDAINKRHAEIYKGLFKAELFNGKVLKQLGTVTTTEHENALLRSFDKFTTYFSGFYRNRKNVFSAEDISTAIPHRIVQDNFPKFKENCHIFTRLITAVPSLREHFENVKKAIGIFVSTSIEEVFSFPFYNQLLTQTQIDLYNQLLGGISREAGTEKIKGLNEVLNLAIQKNDETAHIIASLPHRFIPLFKQILSDRNTLSFILEEFKSDEEVIQSFCKYKTLLRNENVLETAEALFNELNSIDLTHIFISHKKLETISSALCDHWDTLRNALYERRISELTGKITKSAKEKVQRSLKHEDINLQEIISAAGKELSEAFKQKTSEILSHAHAALDQPLPTTLKKQEEKEILKSQLDSLLGLYHLLDWFAVDESNEVDPEFSARLTGIKLEMEPSLSFYNKARNYATKKPYSVEKFKLNFQMPTLARGWDVNREKNNGAILFVKNGLYYLGIMPKQKGRYKALSFEPTEKTSEGFDKMYYDYFPDAAKMIPKCSTQLKAVTAHFQTHTTPILLSNNFIEPLEITKEIYDLNNPEKEPKKFQTAYAKKTGDQKGYREALCKWIDFTRDFLSKYTKTTSIDLSSLRPSSQYKDLGEYYAELNPLLYHISFQRIAEKEIMDAVETGKLYLFQIYNKDFAKGHHGKPNLHTLYWTGLFSPENLAKTSIKLNGQAELFYRPKSRMKRMAHRLGEKMLNKKLKDQKTPIPDTLYQELYDYVNHRLSHDLSDEARALLPNVITKEVSHEIIKDRRFTSDKFFFHVPITLNYQAANSPSKFNQRVNAYLKEHPETPIIGIDRGERNLIYITVIDSTGKILEQRSLNTIQQFDYQKKLDNREKERVAARQAWSVVGTIKDLKQGYLSQVIHEIVDLMIHYQAVVVLENLNFGFKSKRTGIAEKAVYQQFEKMLIDKLNCLVLKDYPAEKVGGVLNPYQLTDQFTSFAKMGTQSGFLFYVPAPYTSKIDPLTGFVDPFVWKTIKNHESRKHFLEGFDFLHYDVKTGDFILHFKMNRNLSFQRGLPGFMPAWDIVFEKNETQFDAKGTPFIAGKRIVPVIENHRFTGRYRDLYPANELIALLEEKGIVFRDGSNILPKLLENDDSHAIDTMVALIRSVLQMRNSNAATGEDYINSPVRDLNGVCFDSRFQNPEWPMDADANGAYHIALKGQLLLNHLKESKDLKLQNGISNQDWLAYIQELRN

SEQ ID NO: 66 - DNA, 3987 bp, synthetic construct
  source 1..3987: mol_type = other DNA
atggccgggagcaagaagcgccggataaagcaggacacgcagttcgagggcttcaccaacctgtaccaagtctccaagacgctccggttcgagcttatcccgcaagggaagaccctgaaacacatccaggaacaaggtttcatcgaggaggacaaggcccgcaacgaccactacaaggagctcaagcccataatcgatcggatctacaagacgtacgccgaccagtgcctccaactggtgcagctcgactgggagaacctgagcgccgccattgacagctaccgcaaggaaaagacggaggagacgcgcaacgcccttattgaggagcaagccacctaccgcaacgccatccacgactacttcatcgggcgcaccgacaacctgacggacgcgatcaacaagcgccacgcggaaatctacaagggccttttcaaggccgagctcttcaacgggaaggtcctaaaacagctcgggactgtcacgacaaccgagcatgagaacgccctccttcgcagcttcgacaagttcaccacatacttctcgggcttctaccggaaccgcaagaacgttttcagcgccgaggacatctccaccgccatcccgcacaggatcgtccaggacaacttccccaagttcaaggagaactgccacatcttcacgcgcctgattacagccgtaccttcacttcgtgagcacttcgagaacgtcaaaaaggccatcgggatcttcgtctccacgtccatcgaggaggtattctctttcccgttctataaccagctcctgacccagacgcagatcgacctctacaaccagctactgggcggcatcagccgggaggccgggaccgagaaaataaagggcctcaacgaagttctcaacctggccatccagaagaacgacgagaccgcgcatatcatcgcatccctgccgcatcgcttcattcctttgttcaagcagatattgagcgaccggaacaccctctcgttcatcctcgaagaattcaagagcgacgaggaggtcattcagtctttctgcaagtacaagacgctcctacggaatgagaatgtgctggagaccgcggaggcactcttcaatgagctgaactccattgacctgacccacatcttcattagccacaagaaactggagacgatctccagcgccctgtgcgaccactgggacactctccgcaacgccctctacgaacgccggatctccgaacttaccggcaagataactaagtcggctaaggagaaggtgcaacggagcctcaagcacgaggacatcaaccttcaggaaatcatctcagccgcgggcaaggagctgagcgaggcgtttaagcagaaaacatcggagatactgagccacgcgcacgcggccctggatcaaccgctgccgacgactctcaagaagcaagaggagaaggaaatccttaagtcccagctcgactcgctgctcggcctctatcacttgctcgactggttcgcggttgatgagtccaacgaggtggacccggagttctccgcgcgcctcacgggtattaagctggagatggagccaagcttaagcttctacaacaaggcccgcaactacgcgaccaaaaaaccgtactcagtcgagaaattcaagctgaatttccagatgcctacattggcgagggggtgggacgtgaaccgcgagaagaacaatggagccatcctgttcgtcaaaaatgggttgtactacctgggcatcatgcccaagcagaagggccgttacaaggccctgtcattcgagcctaccgagaagacctcggagggcttcgacaagatgtactacgactatttcccggacgccgccaagatgatcccgaagtgctccacgcagctcaaagccgtcacggcccacttccagacgcataccacgccgatacttctgagcaacaacttcattgagccgctagagatcacgaaggagatatacgacctaaacaaccccgaaaaggagcccaagaagttccagacagcctacgctaagaagacaggtgatcagaagggatatagggaggcactctgcaagtggatcgacttcacgcgcgacttcctgtcgaaatatacaaagacgaccagcattgacctaagttctctccgcccatcctcccagtacaaggatctgggcgagtattatgcggagctgaacccattgctgtaccacatcagcttccagaggatcgccgagaaggagattatggacgcggtggagacggggaaactatacctgttccaaatatataacaaggacttcgctaaagggcaccacgggaagcccaacctgcacacactctactggacgggcttgttttcgccagaaaatttggccaagacttcgatcaagctcaacggccaggcggagttgttttaccgtcccaagtctcgcatgaagcgcatggcgcatcgcctcggagagaaaatgcttaacaagaagctcaaggatcagaagacgcccatacctgatacgttgtaccaggaattgtacgactacgtgaaccaccgcctatcgcacgacctctcagacgaggcccgcgccctcctcccaaacgtgattactaaggaggtttcccatgaaataatcaaggaccgacggttcaccagcgacaaattttttttccacgtgcctatcacgctcaattaccaggcggccaactccccatcgaagttcaaccagcgcgtgaacgcctaccttaaggagcacccggagaccccaatcatcgggatcgaccgtggcgagcggaacctgatctatattacggtgatcgatagcaccgggaagatcctggagcagcgctccctgaacacaatccagcagtttgactaccagaagaaactcgacaaccgggagaaggagcgcgtcgcagcccggcaagcatggagtgtggtcggcaccataaaggacctgaaacagggttacctaagtcaagttatccacgagatcgttgacctgatgatacactatcaagccgtagtcgtgctggagaacctcaacttcgggtttaagtccaagcgcaccggcatcgcggagaaggcggtgtaccagcagttcgagaagatgctgatcgacaagctgaactgcctggtgctcaaggactaccctgcggagaaggtcggcggggtcttgaacccgtaccagctaaccgaccagttcacgagcttcgccaaaatgggcacgcagtccggattcttgttttatgtcccggctccatatacaagtaagatcgacccgctgacagggtttgttgacccattcgtgtggaagaccatcaagaaccacgagagcaggaaacacttcttagagggcttcgacttcctgcattacgacgttaagacaggcgacttcatcctgcacttcaagatgaaccgcaacctgtcgttccagaggggcctgcccggcttcatgcccgcctgggatatcgtctttgagaagaatgagacgcagttcgacgcgaaggggacgccgttcatcgctggaaagcggatcgtgccggtcatcgagaaccaccgcttcacgggtcgctaccgagatttataccccgccaacgaactaattgcgctgctggaggagaaggggatcgtgttccgagatggcagcaacattctcccgaagctgctggagaacgacgactcgcacgctattgacacgatggtcgccctcatacggagcgtgcttcagatgcggaacagtaacgctgccacgggcgaggactacattaactcccccgtccgcgacctcaacggggtctgcttcgatagccgcttccagaacccggagtggcctatggatgcggacgcgaacggggcctaccacatcgccctcaagggccaactcctgctcaaccacttgaaggaaagcaaagacctcaaattgcagaatggcatcagtaaccaggactggctcgcgtacatccaggaactgagaaacgggtccaagaagcggcgtatcaagcaagattga

SEQ ID NO: 67 - DNA, 3987 bp, synthetic construct
  source 1..3987: mol_type = other DNA
atggcgggaagcaaaaagcgccggattaagcaagacacgcagttcgagggcttcacgaacctctaccaagtcagcaagaccctccggttcgagctgataccacagggaaagacgctcaagcacatccaggaacagggcttcatcgaggaggacaaggcgcgcaacgaccactacaaggagttgaaaccgatcatcgaccgcatctacaagacgtacgccgaccagtgcctccagctcgtgcagctcgactgggagaacctctccgccgccattgactcgtaccggaaggagaagactgaggagacccgcaacgccctgatcgaggagcaagcaacctaccggaacgccatccacgactacttcatcggccgcaccgacaacctcaccgacgcgatcaacaagcggcacgcggagatatacaaagggctgttcaaggcggagctgttcaacggcaaggtgctcaagcagctagggacggtgaccacgaccgagcacgagaacgcgctcctccgcagcttcgacaagttcaccacctacttcagcggcttctaccggaaccgcaagaatgtgttcagcgcggaggacatcagcacggccatcccgcaccgcatcgtccaggacaacttcccgaagttcaaggagaactgccacatcttcacccgcctgataaccgccgtcccctccctgcgggagcacttcgagaacgtcaaaaaggcaattgggatcttcgtctcgaccagcattgaggaggtgttcagcttccccttctacaaccagctcctcacccagacgcagatcgacctgtacaatcagttgctcggcgggataagccgcgaggcgggaaccgaaaaaatcaaggggctgaacgaagtgttgaacctcgccatccagaagaacgacgagaccgcgcacatcatcgcctccctgccccaccggttcatcccgctgttcaagcagatcctctctgaccggaacaccctgtccttcattcttgaggagttcaagtcggacgaggaggtcatccagagcttctgcaagtacaagacgctgctacggaacgagaacgtgctggagacggcggaggcactgttcaacgagctaaacagcatcgacctcacgcacatcttcatcagtcacaagaaactggagaccatctcctccgcgctgtgcgaccactgggacacgctcaggaacgcgctctacgagcgccgaatcagtgagctgacgggcaagatcacgaagtccgcgaaggagaaggtgcagcggtccctcaagcacgaggacatcaacctccaggagatcatctcagcggctgggaaagagctgtccgaggcgttcaagcagaaaacgagcgaaatcctgtcccacgcgcacgcggccctggatcagcctctgccgacgaccctcaagaaacaagaagaaaaggaaatcctcaagtcgcagctcgactcgctgctgggcctgtaccatctcctcgactggttcgccgtggacgagagcaacgaggtggaccccgagttctccgcgcggcttacggggatcaagctggagatggagcccagcctgtccttctacaacaaggcgcgcaactacgccaccaagaagccctacagcgtggagaagttcaagctcaacttccagatgcccactctcgcacgtgggtgggacgtcaaccgcgaaaaaaataatggggcgatcctgttcgtcaagaacggcctgtactacttgggcatcatgccgaaacagaagggccgctacaaggccctgagcttcgaaccgaccgagaaaacgagcgaggggttcgacaagatgtactacgactacttccccgacgccgcgaagatgattccaaagtgctccacgcagcttaaggccgtgacggcccacttccagacgcacacgaccccgatcctcctcagcaacaacttcatcgagcccctggagatcacgaaggagatatacgacctgaacaacccggagaaggagcccaagaaattccagaccgcctacgccaagaagacaggcgaccaaaagggttacagggaggccctctgcaagtggatcgacttcactagggacttcctgtccaagtacaccaagactacctctatcgacctgtccagcctccgcccgtcgtcccagtacaaagatttgggcgagtattacgcggagctgaacccactgctctaccacatcagcttccagcgcatcgcggagaaggagatcatggacgcagtggagacgggcaagctatacctatttcagatatacaacaaagacttcgctaagggacaccacggcaagcctaacctgcacaccctctactggacggggctcttcagcccggagaacctcgccaagacctcgatcaagctcaacggccaggccgagctgttctaccggcccaagtcccgcatgaagcggatggcccaccggctcggggagaaaatgctcaacaagaaattgaaggaccaaaaaacgccgatacccgacaccctataccaggagctgtacgactatgtgaaccaccgcctgagccacgacctcagcgacgaggcgcgggccctcctgccgaacgtcatcacaaaggaggtcagccacgagatcatcaaggaccggcgcttcacctccgacaagtttttctttcacgtgcccatcacgctcaactaccaggccgccaactcgccgtccaagttcaaccagcgcgtgaacgcctacctcaaggagcaccccgagaccccgatcatcgggattgaccgaggggagcggaacctcatctacatcaccgtcatcgacagcaccgggaagatccttgaacagcggtcgctcaacaccatccagcagttcgactaccagaagaaactcgacaaccgggagaaggagagagtggcggcccgccaggcttggtccgtcgtcgggacgattaaggacttgaaacaaggttacctgtcgcaagtgatccacgagatcgttgacctgatgatccactaccaagccgtcgtggtcctggagaacctcaacttcggcttcaagagcaaacgaaccggcatcgcggagaaggccgtgtaccagcagttcgaaaaaatgctgatcgacaagctgaactgcctcgtgctcaaggactaccccgctgagaaggtcggcggggtgctgaacccgtaccagctcactgaccagttcaccagcttcgcaaagatgggcacccagtccggcttcctgttctacgtgcctgcgccatacacctcgaagatcgacccgctcaccgggttcgtggaccccttcgtctggaagaccatcaagaaccacgagagccgcaagcacttcctggagggcttcgacttcctccactacgacgtcaagaccggggacttcatcctgcacttcaagatgaaccgcaacctcagtttccagcgcggcctgccggggttcatgcccgcttgggatatagtcttcgagaagaatgagacgcagttcgacgcgaagggcaccccgttcatcgccgggaagcgcatcgtgccggtcatcgagaaccaccggttcaccgggcgctaccgcgacctatacccggcgaacgagttgatcgccctcctggaggagaagggcatcgtgttccgcgacggctccaacatcctcccgaagctgctcgaaaacgacgactcccacgccatcgacacgatggtcgcgctgatccggtcggtgctccagatgcggaactccaacgccgcgacgggcgaggactacatcaacagtccggtccgcgatctgaacggcgtctgcttcgactcccggttccagaaccccgagtggccgatggacgcggacgcgaacggcgcataccacatcgccctaaaagggcaattgctgctcaaccacctcaaggaatccaaagacctaaagctccagaacggcatctccaaccaggactggctggcgtacatccaggaactgcggaacgggagcaaaaaacgtcggatcaagcaagattga

SEQ ID NO: 68 - DNA, 3987 bp, synthetic construct
  source 1..3987: mol_type = other DNA
atggcgggctccaagaaacgccggattaagcaagatacccagttcgaggggttcacgaacctctaccaagtgagcaagaccctccgattcgaactgattcctcaggggaagaccctcaagcacatccaggagcaagggttcatcgaggaggacaaggcgcggaacgaccactacaaggaactcaaacccatcatcgaccgcatctacaagacctacgccgatcagtgcctccagctcgtgcagttggactgggagaacctcagcgcggccattgactcctaccggaaggagaaaacggaggagacgcgcaacgcgctcatcgaggaacaggcaacctatcgcaacgccatccacgactacttcatcgggaggactgacaacctcactgacgcgattaacaagcgccacgcggagatatacaagggactcttcaaagcggagctgtttaacggcaaggttctcaagcaactcggcactgtgaccacgaccgagcatgagaacgccctgctccgctccttcgacaagttcaccacctacttctccgggttctaccgcaaccgcaagaatgtcttcagcgcggaggacatcagcacggccattccacatcgaatcgtccaagataacttcccgaagttcaaggagaactgccacatcttcacccgactcattactgctgtaccgtcgttacgcgaacacttcgagaacgtcaagaaggcaattggaatcttcgtctctacgtcaatagaggaggtgttcagcttccctttctacaaccagctccttacgcagacccagatagacctgtacaatcagctcctcggtgggatcagccgggaggcggggactgagaagattaaagggctcaacgaggtcttgaacctggccatccaaaaaaacgatgagacggcgcacatcatcgcctcgctgccccaccggttcatcccgctgttcaagcagatcctcagtgacaggaacaccttgagctttatcctagaggagttcaagagcgacgaggaggtgatccagagcttctgcaagtacaaaaccctgctgaggaacgagaacgtcctggagacggcggaggcgctgttcaacgagctgaactctatcgacttaactcacatattcatctcgcacaagaagctggagactattagctctgcactctgcgaccactgggacaccctccgcaacgcgctctacgagcgccgcatctcggagctgaccgggaagatcaccaaatccgcgaaggaaaaggtccagcgttccctcaaacacgaggatattaacttacaggagattatctcagcggctgggaaggagttgtcagaggcgttcaagcagaaaacttccgagatcctgagccacgcgcacgcagcgctcgaccagcctctgcccaccaccctcaaaaagcaggaagaaaaagagatcctcaagagccagttggactccctgctggggctctatcaccttctcgactggttcgccgtcgatgagtcgaacgaggtggaccccgagttctccgcccggctgaccggcatcaagctagagatggagccgtccctcagcttctacaataaggcccgcaactacgcgaccaaaaaaccctacagcgtggagaagttcaagctgaacttccagatgccgaccttagcacgcggttgggacgtaaacagggagaagaacaatggagccatcctgttcgtcaagaacgggctttactacctcgggataatgcccaagcagaagggccgctacaaggccctttccttcgagccgacggagaaaacctccgaggggttcgacaagatgtactacgactacttccccgacgccgccaagatgatcccgaagtgctcaacgcagctaaaagccgtgaccgcccacttccagacccacacgacgccgatcctgctgagcaacaacttcatcgagccccttgagatcactaaggagatatacgacctgaacaaccccgagaaggagcccaagaagtttcaaaccgcctacgccaaaaaaactggcgaccaaaagggctacagggaggcgctgtgtaagtggatcgacttcacacgcgacttcctttcgaagtatacgaagacaacctctattgacctgagcagcctgcgtcctagctcccagtacaaagatttgggcgagtactacgcggagcttaatccactactctaccacatctcattccagcgcatcgctgagaaggaaatcatggacgcggtggagacaggcaaactgtacctcttccagatatacaacaaagacttcgctaaggggcaccacgggaagcccaaccttcatacgctctactggacgggcctattcagccccgaaaatctggccaagacctccatcaagctgaacggccaagcggagctgttctacagacccaagagccggatgaagcggatggcccacaggctcggcgagaaaatgcttaacaaaaagttgaaggaccagaaaacccctatccccgacaccctctaccaggaactgtacgactacgtgaaccacaggctctcgcacgacctttccgacgaggcccgtgccctactcccgaacgtcattaccaaagaggtttcgcacgagatcatcaaggaccggcggttcacgagcgacaagtttttctttcacgtccccatcacccttaactaccaggcggccaactccccatccaagttcaaccagcgtgtgaatgcctacctcaaggagcacccagagaccccgatcattgggatcgaccggggcgagcggaacctgatctacatcaccgtcatcgactcgacgggcaagattcttgagcagagatcgttgaataccatacagcagttcgactaccagaagaaactcgacaaccgcgagaaggagcgcgtggcggcccgccaggcgtggtccgtcgttgggacgattaaggacttgaaacaaggttatctgtcccaagtcatccacgagatcgttgatctgatgatccactatcaggcagtggtggtgctggagaatctcaacttcggcttcaagagtaagcggacgggaatcgccgagaaggccgtgtaccagcagttcgagaagatgctgatcgacaagctcaactgccttgtgctgaaagactacccggccgagaaggtcggcggcgtcctcaacccgtaccaacttaccgaccagttcacctccttcgccaagatgggcactcagtccgggttcttgttctacgtccccgcaccttacacctctaagatcgaccctctgactggcttcgtagatccattcgtgtggaagaccattaagaaccacgagagccgcaagcacttcctggagggcttcgacttcctgcactacgacgtgaagaccggggacttcatccttcacttcaagatgaaccggaacctcagcttccagcggggcctgccggggttcatgcccgcctgggacatcgtgttcgagaagaacgagacccagttcgacgcgaagggcacgcccttcatcgccgggaagcgtatcgtgccggtgatcgagaaccatcgtttcacgggtcgctaccgtgacctctacccggcgaacgagcttatcgcactcctggaggagaagggcatcgtcttccgggacggctccaacatcctcccgaaactgctggaaaacgacgactctcacgccatcgacacgatggtggccctcatccggtccgtgctccaaatgcggaacagcaacgccgccaccggtgaggactacatcaacagcccggtccgggatctgaacggggtgtgcttcgattcgcggttccagaatcctgagtggccgatggacgcggatgcaaacggggcgtaccacatcgcgctcaagggccagttacttctgaaccaccttaaggagtctaaagatttgaaactccagaacgggatctcgaaccaggactggctggcctacatccaagagttgcggaacggcagcaagaagcggcggattaagcaagattag

SEQ ID NO: 69 - protein, 1315 aa, synthetic construct
SKLEKFTNCYSLSKTLRFKAIPVGKTQENIDNKRLLVEDEKRAEDYKGVKKLLDRYYLSFINDVLHSIKLKNLNNYISLFRKKTRTEKENKELENLEINLRKEIAKAFKGNEGYKSLFKKDIIETILPEFLDDKDEIALVNSFNGFTTAFTGFFDNRENMFSEEAKSTSIAFRCINENLTRYISNMDIFEKVDAIFDKHEVQEIKEKILNSDYDVEDFFEGEFFNFVLTQEGIDVYNAIIGGFVTESGEKIKGLNEYINLYNQKTKQKLPKFKPLYKQVLSDRESLSFYGEGSSGIDGVKLSSTEKKKMDEIAPPKGSVFTCPICEKRSIVGVTANLVHDHNHDTGWGREWICDSCNTGLGRFKDNPKFLEKVIEYLKKGYTSDEEVLEVFRNTLNKNSEIFSSIKKLEKLFKNFDEYSSAGIFVKNGPAISTISKDIFGEWNVIRDKWNAEYDDIHLKKKAVVTEKYEDDRRKSFKKIGSFSLEQLQEYADADLSVVEKLKEIIIQKVDEIYKVYGSSEKLFDADFVLEKSLKKNDAVVAIMKDLLDSVKSFENYIKAFFGEGKETNRDESFYGDFVLAYDILLKVDHIYDAIRNYVTQKPYSKDKFKLYFQNPQFMGGWDKDKETDYRATILRYGSKYYLAIMDKKYAKCLQKIDKDDVNGNYEKINYKLLPGPNKMLPKVFFSKKWMAYYNPSEDIQKIYKNGTFKKGDMFNLNDCHKLIDFFKDSISRYPKWSNAYDFNFSETEKYKDIAGFYREVEEQGYKVSFESASKKEVDKLVEEGKLYMFQIYNKDFSDKSHGTPNLHTMYFKLLFDENNHGQIRLSGGAELFMRRASLKKEELVVHPANSPIANKNPDNPKKTTTLSYDVYKDKRFSEDQYELHIPIAINKCPKNIFKINTEVRVLLKHDDNPYVIGIARGERNLLYIVVVDGKGNIVEQYSLNEIINNFNGIRIKTDYHSLLDKKEKERFEARQNWTSIENIKELKAGYISQVVHKICELVEKYDAVIALEDLNSGFKNSRVKVEKQVYQKFEKMLIDKLNYMVDKKSNPCATGGALKGYQITNKFESFKSMSTQNGFIFYIPAWLTSKIDPSTGFVNLLKTKYTSIADSKKFISSFDRIMYVPEEDLFEFALDYKNFSRTDADYIKKWKLYSYGNRIRIFRNPKKNNVFDWEEVCLTSAYKELFNKYGINYQQGDIRALLCEQSDKAFYSSFMALMSLMLQMRNSITGRTDVDFLISPVKNSDGIFYDSRNYEAQENAILPKNADANGAYNIARKVLWAIGQFKKAEDEKLDKVKIAISNKEWLEYAQTSVKH

SEQ ID NO: 70 - protein, 1501 aa, synthetic construct
SKLEKFTNCYSLSKTLRFKAIPVGKTQENIDNKRLLVEDEKRAEDYKGVKKLLDRYYLSFINDVLHSIKLKNLNNYISLFRKKTRTEKENKELENLEINLRKEIAKAFKGNEGYKSLFKKDIIETILPEFLDDKDEIALVNSFNGFTTAFTGFFDNRENMFSEEAKSTSIAFRCINENLTRYISNMDIFEKVDAIFDKHEVQEIKEKILNSDYDVEDFFEGEFFNFVLTQEGIDVYNAIIGGFVTESGEKIKGLNEYINLYNQKTKQKLPKFKPLYKQVLSDRESLSFYGEGSSGAAPNIHGWGKEGHEIICKIAQTRLDETAAKAVKELLPESAEGDLSSLCLWADRVKFRYHWSSPLHYINTPDACSYQYNRDCKDESGEKGRCVAGAIYNYTTQLLSYKTAASSQSQYNLTEALLFVSHFMGDIHQPLHVSYASDKGGNTIEVHWYTRKANLHHIWDSNIIETAEADLYNSALEGMVDALKKNITTEWADQVKRWETCTKKTACPDIYASEGIQAACDWAYKGVTEGDTLEDEYFYSRLPIVYQRLAQGGVRLAATLNRIFGGYTSDEEVLEVFRNTLNKNSEIFSSIKKLEKLFKNFDEYSSAGIFVKNGPAISTISKDIFGEWNVIRDKWNAEYDDIHLKKKAVVTEKYEDDRRKSFKKIGSFSLEQLQEYADADLSVVEKLKEIIIQKVDEIYKVYGSSEKLFDADFVLEKSLKKNDAVVAIMKDLLDSVKSFENYIKAFFGEGKETNRDESFYGDFVLAYDILLKVDHIYDAIRNYVTQKPYSKDKFKLYFQNPQFMGGWDKDKETDYRATILRYGSKYYLAIMDKKYAKCLQKIDKDDVNGNYEKINYKLLPGPNKMLPKVFFSKKWMAYYNPSEDIQKIYKNGTFKKGDMFNLNDCHKLIDFFKDSISRYPKWSNAYDFNFSETEKYKDIAGFYREVEEQGYKVSFESASKKEVDKLVEEGKLYMFQIYNKDFSDKSHGTPNLHTMYFKLLFDENNHGQIRLSGGAELFMRRASLKKEELVVHPANSPIANKNPDNPKKTTTLSYDVYKDKRFSEDQYELHIPIAINKCPKNIFKINTEVRVLLKHDDNPYVIGIARGERNLLYIVVVDGKGNIVEQYSLNEIINNFNGIRIKTDYHSLLDKKEKERFEARQNWTSIENIKELKAGYISQVVHKICELVEKYDAVIALEDLNSGFKNSRVKVEKQVYQKFEKMLIDKLNYMVDKKSNPCATGGALKGYQITNKFESFKSMSTQNGFIFYIPAWLTSKIDPSTGFVNLLKTKYTSIADSKKFISSFDRIMYVPEEDLFEFALDYKNFSRTDADYIKKWKLYSYGNRIRIFRNPKKNNVFDWEEVCLTSAYKELFNKYGINYQQGDIRALLCEQSDKAFYSSFMALMSLMLQMRNSITGRTDVDFLISPVKNSDGIFYDSRNYEAQENAILPKNADANGAYNIARKVLWAIGQFKKAEDEKLDKVKIAISNKEWLEYAQTSVKH

SEQ ID NO: 71 - protein, 1454 aa, synthetic construct
SKLEKFTNCYSLSKTLRFKAIPVGKTQENIDNKRLLVEDEKRAEDYKGVKKLLDRYYLSFINDVLHSIKLKNLNNYISLFRKKTRTEKENKELENLEINLRKEIAKAFKGNEGYKSLFKKDIIETILPEFLDDKDEIALVNSFNGFTTAFTGFFDNRENMFSEEAKSTSIAFRCINENLTRYISNMDIFEKVDAIFDKHEVQEIKEKILNSDYDVEDFFEGEFFNFVLTQEGIDVYNAIIGGFVTESGEKIKGLNEYINLYNQKTKQKLPKFKPLYKQVLSDRESLSFYGEGSSGARVRTYPNVSHANTHYKNTVSSKLLPFTANYQLQLGELDNLNRATFSHIQLQDRHETKDVRTKINYDPVGWHNYQFPYGDGSKSSWVMNRGHLVGYQFCGLNDEPRNLVAMTAWLNTGAYSGANDSNPEGMLYYENRLDSWLALHPDFWLDYKVTPIYSGNEVVPRQIELQYVGIDSSGELLTIRLNSNKESIDENGVTTVILENSAPNINLDYLNGTATPKNGYTSDEEVLEVFRNTLNKNSEIFSSIKKLEKLFKNFDEYSSAGIFVKNGPAISTISKDIFGEWNVIRDKWNAEYDDIHLKKKAVVTEKYEDDRRKSFKKIGSFSLEQLQEYADADLSVVEKLKEIIIQKVDEIYKVYGSSEKLFDADFVLEKSLKKNDAVVAIMKDLLDSVKSFENYIKAFFGEGKETNRDESFYGDFVLAYDILLKVDHIYDAIRNYVTQKPYSKDKFKLYFQNPQFMGGWDKDKETDYRATILRYGSKYYLAIMDKKYAKCLQKIDKDDVNGNYEKINYKLLPGPNKMLPKVFFSKKWMAYYNPSEDIQKIYKNGTFKKGDMFNLNDCHKLIDFFKDSISRYPKWSNAYDFNFSETEKYKDIAGFYREVEEQGYKVSFESASKKEVDKLVEEGKLYMFQIYNKDFSDKSHGTPNLHTMYFKLLFDENNHGQIRLSGGAELFMRRASLKKEELVVHPANSPIANKNPDNPKKTTTLSYDVYKDKRFSEDQYELHIPIAINKCPKNIFKINTEVRVLLKHDDNPYVIGIARGERNLLYIVVVDGKGNIVEQYSLNEIINNFNGIRIKTDYHSLLDKKEKERFEARQNWTSIENIKELKAGYISQVVHKICELVEKYDAVIALEDLNSGFKNSRVKVEKQVYQKFEKMLIDKLNYMVDKKSNPCATGGALKGYQITNKFESFKSMSTQNGFIFYIPAWLTSKIDPSTGFVNLLKTKYTSIADSKKFISSFDRIMYVPEEDLFEFALDYKNFSRTDADYIKKWKLYSYGNRIRIFRNPKKNNVFDWEEVCLTSAYKELFNKYGINYQQGDIRALLCEQSDKAFYSSFMALMSLMLQMRNSITGRTDVDFLISPVKNSDGIFYDSRNYEAQENAILPKNADANGAYNIARKVLWAIGQFKKAEDEKLDKVKIAISNKEWLEYAQTSVKH

SEQ ID NO: 72 - protein, 1375 aa, synthetic construct
SKLEKFTNCYSLSKTLRFKAIPVGKTQENIDNKRLLVEDEKRAEDYKGVKKLLDRYYLSFINDVLHSIKLKNLNNYISLFRKKTRTEKENKELENLEINLRKEIAKAFKGNEGYKSLFKKDIIETILPEFLDDKDEIALVNSFNGFTTAFTGFFDNRENMFSEEAKSTSIAFRCINENLTRYISNMDIFEKVDAIFDKHEVQEIKEKILNSDYDVEDFFEGEFFNFVLTQEGIDVYNAIIGGFVTESGEKIKGLNEYINLYNQKTKQKLPKFKPLYKQVLSDRESLSFYGEGSSGENQTTGKGKNNSRPRYKSLEKAIKEFGSQILKEHPTDNQELRNNRLYLYYLQNGKDMYTGQDLDIHNLSNYDIDHIVPQSFITDNSIDNLVLTSSAGNREKGDDVPPLEIVRKRKVFWEKLYQGNLMSKRKFDYLTKAERGGLTGYTSDEEVLEVFRNTLNKNSEIFSSIKKLEKLFKNFDEYSSAGIFVKNGPAISTISKDIFGEWNVIRDKWNAEYDDIHLKKKAVVTEKYEDDRRKSFKKIGSFSLEQLQEYADADLSVVEKLKEIIIQKVDEIYKVYGSSEKLFDADFVLEKSLKKNDAVVAIMKDLLDSVKSFENYIKAFFGEGKETNRDESFYGDFVLAYDILLKVDHIYDAIRNYVTQKPYSKDKFKLYFQNPQFMGGWDKDKETDYRATILRYGSKYYLAIMDKKYAKCLQKIDKDDVNGNYEKINYKLLPGPNKMLPKVFFSKKWMAYYNPSEDIQKIYKNGTFKKGDMFNLNDCHKLIDFFKDSISRYPKWSNAYDFNFSETEKYKDIAGFYREVEEQGYKVSFESASKKEVDKLVEEGKLYMFQIYNKDFSDKSHGTPNLHTMYFKLLFDENNHGQIRLSGGAELFMRRASLKKEELVVHPANSPIANKNPDNPKKTTTLSYDVYKDKRFSEDQYELHIPIAINKCPKNIFKINTEVRVLLKHDDNPYVIGIARGERNLLYIVVVDGKGNIVEQYSLNEIINNFNGIRIKTDYHSLLDKKEKERFEARQNWTSIENIKELKAGYISQVVHKICELVEKYDAVIALEDLNSGFKNSRVKVEKQVYQKFEKMLIDKLNYMVDKKSNPCATGGALKGYQITNKFESFKSMSTQNGFIFYIPAWLTSKIDPSTGFVNLLKTKYTSIADSKKFISSFDRIMYVPEEDLFEFALDYKNFSRTDADYIKKWKLYSYGNRIRIFRNPKKNNVFDWEEVCLTSAYKELFNKYGINYQQGDIRALLCEQSDKAFYSSFMALMSLMLQMRNSITGRTDVDFLISPVKNSDGIFYDSRNYEAQENAILPKNADANGAYNIARKVLWAIGQFKKAEDEKLDKVKIAISNKEWLEYAQTSVKH

SEQ ID NO: 73 - protein, 1375 aa, synthetic construct
SKLEKFTNCYSLSKTLRFKAIPVGKTQENIDNKRLLVEDEKRAEDYKGVKKLLDRYYLSFINDVLHSIKLKNLNNYISLFRKKTRTEKENKELENLEINLRKEIAKAFKGNEGYKSLFKKDIIETILPEFLDDKDEIALVNSFNGFTTAFTGFFDNRENMFSEEAKSTSIAFRCINENLTRYISNMDIFEKVDAIFDKHEVQEIKEKILNSDYDVEDFFEGEFFNFVLTQEGIDVYNAIIGGFVTESGEKIKGLNEYINLYNQKTKQKLPKFKPLYKQVLSDRESLSFYGEGSSGENQFTNQGRRNSQQRLKGLTDSIKEFGSQILKEHPVENSQLQNDRLFLYYLQNGRDMYTGEELDIDYLSQYDIDHIIPQAFIKDNSIDNRVLTSSKENRGKSDDVPSKDVVRKMKSYWSKLLSAKLITQRKFDNLTKAERGGLTGYTSDEEVLEVFRNTLNKNSEIFSSIKKLEKLFKNFDEYSSAGIFVKNGPAISTISKDIFGEWNVIRDKWNAEYDDIHLKKKAVVTEKYEDDRRKSFKKIGSFSLEQLQEYADADLSVVEKLKEIIIQKVDEIYKVYGSSEKLFDADFVLEKSLKKNDAVVAIMKDLLDSVKSFENYIKAFFGEGKETNRDESFYGDFVLAYDILLKVDHIYDAIRNYVTQKPYSKDKFKLYFQNPQFMGGWDKDKETDYRATILRYGSKYYLAIMDKKYAKCLQKIDKDDVNGNYEKINYKLLPGPNKMLPKVFFSKKWMAYYNPSEDIQKIYKNGTFKKGDMFNLNDCHKLIDFFKDSISRYPKWSNAYDFNFSETEKYKDIAGFYREVEEQGYKVSFESASKKEVDKLVEEGKLYMFQIYNKDFSDKSHGTPNLHTMYFKLLFDENNHGQIRLSGGAELFMRRASLKKEELVVHPANSPIANKNPDNPKKTTTLSYDVYKDKRFSEDQYELHIPIAINKCPKNIFKINTEVRVLLKHDDNPYVIGIARGERNLLYIVVVDGKGNIVEQYSLNEIINNFNGIRIKTDYHSLLDKKEKERFEARQNWTSIENIKELKAGYISQVVHKICELVEKYDAVIALEDLNSGFKNSRVKVEKQVYQKFEKMLIDKLNYMVDKKSNPCATGGALKGYQITNKFESFKSMSTQNGFIFYIPAWLTSKIDPSTGFVNLLKTKYTSIADSKKFISSFDRIMYVPEEDLFEFALDYKNFSRTDADYIKKWKLYSYGNRIRIFRNPKKNNVFDWEEVCLTSAYKELFNKYGINYQQGDIRALLCEQSDKAFYSSFMALMSLMLQMRNSITGRTDVDFLISPVKNSDGIFYDSRNYEAQENAILPKNADANGAYNIARKVLWAIGQFKKAEDEKLDKVKIAISNKEWLEYAQTSVKH

SEQ ID NO: 74 - protein, 1398 aa, synthetic construct
SKLEKFTNCYSLSKTLRFKAIPVGKTQENIDNKRLLVEDEKRAEDYKGVKKLLDRYYLSFINDVLHSIKLKNLNNYISLFRKKTRTEKENKELENLEINLRKEIAKAFKGNEGYKSLFKKDIIETILPEFLDDKDEIALVNSFNGFTTAFTGFFDNRENMFSEEAKSTSIAFRCINENLTRYISNMDIFEKVDAIFDKHEVQEIKEKILNSDYDVEDFFEGEFFNFVLTQEGIDVYNAIIGGFVTESGEKIKGLNEYINLYNQKTKQKLPKFKPLYKQVLSDRESLSFYGEGSSGVREGFVTEKRAREMDGDMRRRAARNAKLFQEMQEKLNVQGKPSRADLWRYQSVQRQNCQCAYCGSPITFSNSEMDHIVPRAGQGSTNTRENLVAVCHRCNQSKGNTPFAIWAKNTSIEGVSVKEAVERTRHWVTDTGMRSTDFKKFTKAVVERFQRATMDEEIDARSGYTSDEEVLEVFRNTLNKNSEIFSSIKKLEKLFKNFDEYSSAGIFVKNGPAISTISKDIFGEWNVIRDKWNAEYDDIHLKKKAVVTEKYEDDRRKSFKKIGSFSLEQLQEYADADLSVVEKLKEIIIQKVDEIYKVYGSSEKLFDADFVLEKSLKKNDAVVAIMKDLLDSVKSFENYIKAFFGEGKETNRDESFYGDFVLAYDILLKVDHIYDAIRNYVTQKPYSKDKFKLYFQNPQFMGGWDKDKETDYRATILRYGSKYYLAIMDKKYAKCLQKIDKDDVNGNYEKINYKLLPGPNKMLPKVFFSKKWMAYYNPSEDIQKIYKNGTFKKGDMFNLNDCHKLIDFFKDSISRYPKWSNAYDFNFSETEKYKDIAGFYREVEEQGYKVSFESASKKEVDKLVEEGKLYMFQIYNKDFSDKSHGTPNLHTMYFKLLFDENNHGQIRLSGGAELFMRRASLKKEELVVHPANSPIANKNPDNPKKTTTLSYDVYKDKRFSEDQYELHIPIAINKCPKNIFKINTEVRVLLKHDDNPYVIGIARGERNLLYIVVVDGKGNIVEQYSLNEIINNFNGIRIKTDYHSLLDKKEKERFEARQNWTSIENIKELKAGYISQVVHKICELVEKYDAVIALEDLNSGFKNSRVKVEKQVYQKFEKMLIDKLNYMVDKKSNPCATGGALKGYQITNKFESFKSMSTQNGFIFYIPAWLTSKIDPSTGFVNLLKTKYTSIADSKKFISSFDRIMYVPEEDLFEFALDYKNFSRTDADYIKKWKLYSYGNRIRIFRNPKKNNVFDWEEVCLTSAYKELFNKYGINYQQGDIRALLCEQSDKAFYSSFMALMSLMLQMRNSITGRTDVDFLISPVKNSDGIFYDSRNYEAQENAILPKNADANGAYNIARKVLWAIGQFKKAEDEKLDKVKIAISNKEWLEYAQTSVKH

SEQ ID NO: 75 - protein, 1491 aa, synthetic construct
SKLEKFTNCYSLSKTLRFKAIPVGKTQENIDNKRLLVEDEKRAEDYKGVKKLLDRYYLSFINDVLHSIKLKNLNNYISLFRKKTRTEKENKELENLEINLRKEIAKAFKGNEGYKSLFKKDIIETILPEFLDDKDEIALVNSFNGFTTAFTGFFDNRENMFSEEAKSTSIAFRCINENLTRYISNMDIFEKVDAIFDKHEVQEIKEKILNSDYDVEDFFEGEFFNFVLTQEGIDVYNAIIGGFVTESGEKIKGLNEYINLYNQKTKQKLPKFKPLYKQVLSDRESLSFYGEGSSGGKAQLDIKNFPELYRTTERVYKKSGQSTKPVTVSNIHYSVLDGYGRSGEAYGIITKDMIDMSAGYREKWESKPEPSGWYSYFFKNTNQRATESDYKHSPKNVSKISNNIKASILLSNGNVRNGYLFDRSHLIADSLGGRPFRNNLITGTRTQNVGNNDRKGGMQYIENKVLDHIKRNPKVHVYYKATPVYQGSELLPRAVLVSALSSDGFIDETVRVFNNVAGFNIDYQNGGLLSSTADVDINNVEENEIETTDDEIEEGGYTSDEEVLEVFRNTLNKNSEIFSSIKKLEKLFKNFDEYSSAGIFVKNGPAISTISKDIFGEWNVIRDKWNAEYDDIHLKKKAVVTEKYEDDRRKSFKKIGSFSLEQLQEYADADLSVVEKLKEIIIQKVDEIYKVYGSSEKLFDADFVLEKSLKKNDAVVAIMKDLLDSVKSFENYIKAFFGEGKETNRDESFYGDFVLAYDILLKVDHIYDAIRNYVTQKPYSKDKFKLYFQNPQFMGGWDKDKETDYRATILRYGSKYYLAIMDKKYAKCLQKIDKDDVNGNYEKINYKLLPGPNKMLPKVFFSKKWMAYYNPSEDIQKIYKNGTFKKGDMFNLNDCHKLIDFFKDSISRYPKWSNAYDFNFSETEKYKDIAGFYREVEEQGYKVSFESASKKEVDKLVEEGKLYMFQIYNKDFSDKSHGTPNLHTMYFKLLFDENNHGQIRLSGGAELFMRRASLKKEELVVHPANSPIANKNPDNPKKTTTLSYDVYKDKRFSEDQYELHIPIAINKCPKNIFKINTEVRVLLKHDDNPYVIGIARGERNLLYIVVVDGKGNIVEQYSLNEIINNFNGIRIKTDYHSLLDKKEKERFEARQNWTSIENIKELKAGYISQVVHKICELVEKYDAVIALEDLNSGFKNSRVKVEKQVYQKFEKMLIDKLNYMVDKKSNPCATGGALKGYQITNKFESFKSMSTQNGFIFYIPAWLTSKIDPSTGFVNLLKTKYTSIADSKKFISSFDRIMYVPEEDLFEFALDYKNFSRTDADYIKKWKLYSYGNRIRIFRNPKKNNVFDWEEVCLTSAYKELFNKYGINYQQGDIRALLCEQSDKAFYSSFMALMSLMLQMRNSITGRTDVDFLISPVKNSDGIFYDSRNYEAQENAILPKNADANGAYNIARKVLWAIGQFKKAEDEKLDKVKIAISNKEWLEYAQTSVKH

SEQ ID NO: 76 - protein, 1351 aa, synthetic construct
SKLEKFTNCYSLSKTLRFKAIPVGKTQENIDNKRLLVEDEKRAEDYKGVKKLLDRYYLSFINDVLHSIKLKNLNNYISLFRKKTRTEKENKELENLEINLRKEIAKAFKGNEGYKSLFKKDIIETILPEFLDDKDEIALVNSFNGFTTAFTGFFDNRENMFSEEAKSTSIAFRCINENLTRYISNMDIFEKVDAIFDKHEVQEIKEKILNSDYDVEDFFEGEFFNFVLTQEGIDVYNAIIGGFVTESGEKIKGLNEYINLYNQKTKQKLPKFKPLYKQVLSDRESLSFYGEGSSGSNNSYLRAKVFETEHGVCQLCNVNAQELFLRLRDAPKSQRKNLLYATWTSKLPLEQLNEMIRNPGEGHFWQVDHIKPVYGGGGQCSLDNLQTLCTVCHKERTARQAKERSQVRRQSLASKGYTSDEEVLEVFRNTLNKNSEIFSSIKKLEKLFKNFDEYSSAGIFVKNGPAISTISKDIFGEWNVIRDKWNAEYDDIHLKKKAVVTEKYEDDRRKSFKKIGSFSLEQLQEYADADLSVVEKLKEIIIQKVDEIYKVYGSSEKLFDADFVLEKSLKKNDAVVAIMKDLLDSVKSFENYIKAFFGEGKETNRDESFYGDFVLAYDILLKVDHIYDAIRNYVTQKPYSKDKFKLYFQNPQFMGGWDKDKETDYRATILRYGSKYYLAIMDKKYAKCLQKIDKDDVNGNYEKINYKLLPGPNKMLPKVFFSKKWMAYYNPSEDIQKIYKNGTFKKGDMFNLNDCHKLIDFFKDSISRYPKWSNAYDFNFSETEKYKDIAGFYREVEEQGYKVSFESASKKEVDKLVEEGKLYMFQIYNKDFSDKSHGTPNLHTMYFKLLFDENNHGQIRLSGGAELFMRRASLKKEELVVHPANSPIANKNPDNPKKTTTLSYDVYKDKRFSEDQYELHIPIAINKCPKNIFKINTEVRVLLKHDDNPYVIGIARGERNLLYIVVVDGKGNIVEQYSLNEIINNFNGIRIKTDYHSLLDKKEKERFEARQNWTSIENIKELKAGYISQVVHKICELVEKYDAVIALEDLNSGFKNSRVKVEKQVYQKFEKMLIDKLNYMVDKKSNPCATGGALKGYQITNKFESFKSMSTQNGFIFYIPAWLTSKIDPSTGFVNLLKTKYTSIADSKKFISSFDRIMYVPEEDLFEFALDYKNFSRTDADYIKKWKLYSYGNRIRIFRNPKKNNVFDWEEVCLTSAYKELFNKYGINYQQGDIRALLCEQSDKAFYSSFMALMSLMLQMRNSITGRTDVDFLISPVKNSDGIFYDSRNYEAQENAILPKNADANGAYNIARKVLWAIGQFKKAEDEKLDKVKIAISNKEWLEYAQTSVKH

SEQ ID NO: 77 - protein, 1367 aa, synthetic construct
SKLEKFTNCYSLSKTLRFKAIPVGKTQENIDNKRLLVEDEKRAEDYKGVKKLLDRYYLSFINDVLHSIKLKNLNNYISLFRKKTRTEKENKELENLEINLRKEIAKAFKGNEGYKSLFKKDIIETILPEFLDDKDEIALVNSFNGFTTAFTGFFDNRENMFSEEAKSTSIAFRCINENLTRYISNMDIFEKVDAIFDKHEVQEIKEKILNSDYDVEDFFEGEFFNFVLTQEGIDVYNAIIGGFVTESGEKIKGLNEYINLYNQKTKQKLPKFKPLYKQVLSDRESLSFYGEGSSGDEPGVATGNGQPVTGNWLAGASQGDGVPIPSQIADQLRGKEFKSWRDFREQFWMAVSKDPSALENLSPSNRYFVSQGLAPYAVPEEHLGSKEKFEIHHVVPLESGGALYNIDNLVIVTPKRHSEIHKELKLKRKEKGYTSDEEVLEVFRNTLNKNSEIFSSIKKLEKLFKNFDEYSSAGIFVKNGPAISTISKDIFGEWNVIRDKWNAEYDDIHLKKKAVVTEKYEDDRRKSFKKIGSFSLEQLQEYADADLSVVEKLKEIIIQKVDEIYKVYGSSEKLFDADFVLEKSLKKNDAVVAIMKDLLDSVKSFENYIKAFFGEGKETNRDESFYGDFVLAYDILLKVDHIYDAIRNYVTQKPYSKDKFKLYFQNPQFMGGWDKDKETDYRATILRYGSKYYLAIMDKKYAKCLQKIDKDDVNGNYEKINYKLLPGPNKMLPKVFFSKKWMAYYNPSEDIQKIYKNGTFKKGDMFNLNDCHKLIDFFKDSISRYPKWSNAYDFNFSETEKYKDIAGFYREVEEQGYKVSFESASKKEVDKLVEEGKLYMFQIYNKDFSDKSHGTPNLHTMYFKLLFDENNHGQIRLSGGAELFMRRASLKKEELVVHPANSPIANKNPDNPKKTTTLSYDVYKDKRFSEDQYELHIPIAINKCPKNIFKINTEVRVLLKHDDNPYVIGIARGERNLLYIVVVDGKGNIVEQYSLNEIINNFNGIRIKTDYHSLLDKKEKERFEARQNWTSIENIKELKAGYISQVVHKICELVEKYDAVIALEDLNSGFKNSRVKVEKQVYQKFEKMLIDKLNYMVDKKSNPCATGGALKGYQITNKFESFKSMSTQNGFIFYIPAWLTSKIDPSTGFVNLLKTKYTSIADSKKFISSFDRIMYVPEEDLFEFALDYKNFSRTDADYIKKWKLYSYGNRIRIFRNPKKNNVFDWEEVCLTSAYKELFNKYGINYQQGDIRALLCEQSDKAFYSSFMALMSLMLQMRNSITGRTDVDFLISPVKNSDGIFYDSRNYEAQENAILPKNADANGAYNIARKVLWAIGQFKKAEDEKLDKVKIAISNKEWLEYAQTSVKH

SEQ ID NO: 78 - protein, 1299 aa, synthetic construct
SKLEKFTNCYSLSKTLRFKAIPVGKTQENIDNKRLLVEDEKRAEDYKGVKKLLDRYYLSFINDVLHSIKLKNLNNYISLFRKKTRTEKENKELENLEINLRKEIAKAFKGNEGYKSLFKKDIIETILPEFLDDKDEIALVNSFNGFTTAFTGFFDNRENMFSEEAKSTSIAFRCINENLTRYISNMDIFEKVDAIFDKHEVQEIKEKILNSDYDVEDFFEGEFFNFVLTQEGIDVYNAIIGGFVTESGEKIKGLNEYINLYNQKTKQKLPKFKPLYKQVLSDRESLSFYGEGSSGRLREQALMRDKGLCLHCKNNRKIKVADMVDHIIPIKVDPSLKLKLENLQSLCNPCHNRKTAEDKKKYGGYTSDEEVLEVFRNTLNKNSEIFSSIKKLEKLFKNFDEYSSAGIFVKNGPAISTISKDIFGEWNVIRDKWNAEYDDIHLKKKAVVTEKYEDDRRKSFKKIGSFSLEQLQEYADADLSVVEKLKEIIIQKVDEIYKVYGSSEKLFDADFVLEKSLKKNDAVVAIMKDLLDSVKSFENYIKAFFGEGKETNRDESFYGDFVLAYDILLKVDHIYDAIRNYVTQKPYSKDKFKLYFQNPQFMGGWDKDKETDYRATILRYGSKYYLAIMDKKYAKCLQKIDKDDVNGNYEKINYKLLPGPNKMLPKVFFSKKWMAYYNPSEDIQKIYKNGTFKKGDMFNLNDCHKLIDFFKDSISRYPKWSNAYDFNFSETEKYKDIAGFYREVEEQGYKVSFESASKKEVDKLVEEGKLYMFQIYNKDFSDKSHGTPNLHTMYFKLLFDENNHGQIRLSGGAELFMRRASLKKEELVVHPANSPIANKNPDNPKKTTTLSYDVYKDKRFSEDQYELHIPIAINKCPKNIFKINTEVRVLLKHDDNPYVIGIARGERNLLYIVVVDGKGNIVEQYSLNEIINNFNGIRIKTDYHSLLDKKEKERFEARQNWTSIENIKELKAGYISQVVHKICELVEKYDAVIALEDLNSGFKNSRVKVEKQVYQKFEKMLIDKLNYMVDKKSNPCATGGALKGYQITNKFESFKSMSTQNGFIFYIPAWLTSKIDPSTGFVNLLKTKYTSIADSKKFISSFDRIMYVPEEDLFEFALDYKNFSRTDADYIKKWKLYSYGNRIRIFRNPKKNNVFDWEEVCLTSAYKELFNKYGINYQQGDIRALLCEQSDKAFYSSFMALMSLMLQMRNSITGRTDVDFLISPVKNSDGIFYDSRNYEAQENAILPKNADANGAYNIARKVLWAIGQFKKAEDEKLDKVKIAISNKEWLEYAQTSVKH

SEQ ID NO: 79 - protein, 1328 aa, synthetic construct
SKLEKFTNCYSLSKTLRFKAIPVGKTQENIDNKRLLVEDEKRAEDYKGVKKLLDRYYLSFINDVLHSIKLKNLNNYISLFRKKTRTEKENKELENLEINLRKEIAKAFKGNEGYKSLFKKDIIETILPEFLDDKDEIALVNSFNGFTTAFTGFFDNRENMFSEEAKSTSIAFRCINENLTRYISNMDIFEKVDAIFDKHEVQEIKEKILNSDYDVEDFFEGEFFNFVLTQEGIDVYNAIIGGFVTESGEKIKGLNEYINLYNQKTKQKLPKFKPLYKQVLSDRESLSFYGEGSSGMNYFIVEVSEQEVKREKEKARELRRSQWWKNRIARGICHYCGEIFPPEELTMDHLVPVVRGGKSTRGNVVPACKECNNRKKYLLPVEWEEYLDSLESGYTSDEEVLEVFRNTLNKNSEIFSSIKKLEKLFKNFDEYSSAGIFVKNGPAISTISKDIFGEWNVIRDKWNAEYDDIHLKKKAVVTEKYEDDRRKSFKKIGSFSLEQLQEYADADLSVVEKLKEIIIQKVDEIYKVYGSSEKLFDADFVLEKSLKKNDAVVAIMKDLLDSVKSFENYIKAFFGEGKETNRDESFYGDFVLAYDILLKVDHIYDAIRNYVTQKPYSKDKFKLYFQNPQFMGGWDKDKETDYRATILRYGSKYYLAIMDKKYAKCLQKIDKDDVNGNYEKINYKLLPGPNKMLPKVFFSKKWMAYYNPSEDIQKIYKNGTFKKGDMFNLNDCHKLIDFFKDSISRYPKWSNAYDFNFSETEKYKDIAGFYREVEEQGYKVSFESASKKEVDKLVEEGKLYMFQIYNKDFSDKSHGTPNLHTMYFKLLFDENNHGQIRLSGGAELFMRRASLKKEELVVHPANSPIANKNPDNPKKTTTLSYDVYKDKRFSEDQYELHIPIAINKCPKNIFKINTEVRVLLKHDDNPYVIGIARGERNLLYIVVVDGKGNIVEQYSLNEIINNFNGIRIKTDYHSLLDKKEKERFEARQNWTSIENIKELKAGYISQVVHKICELVEKYDAVIALEDLNSGFKNSRVKVEKQVYQKFEKMLIDKLNYMVDKKSNPCATGGALKGYQITNKFESFKSMSTQNGFIFYIPAWLTSKIDPSTGFVNLLKTKYTSIADSKKFISSFDRIMYVPEEDLFEFALDYKNFSRTDADYIKKWKLYSYGNRIRIFRNPKKNNVFDWEEVCLTSAYKELFNKYGINYQQGDIRALLCEQSDKAFYSSFMALMSLMLQMRNSITGRTDVDFLISPVKNSDGIFYDSRNYEAQENAILPKNADANGAYNIARKVLWAIGQFKKAEDEKLDKVKIAISNKEWLEYAQTSVKH

SEQ ID NO: 80 - protein, 1441 aa, synthetic construct
SKLEKFTNCYSLSKTLRFKAIPVGKTQENIDNKRLLVEDEKRAEDYKGVKKLLDRYYLSFINDVLHSIKLKNLNNYISLFRKKTRTEKENKELENLEINLRKEIAKAFKGNEGYKSLFKKDIIETILPEFLDDKDEIALVNSFNGFTTAFTGFFDNRENMFSEEAKSTSIAFRCINENLTRYISNMDIFEKVDAIFDKHEVQEIKEKILNSDYDVEDFFEGEFFNFVLTQEGIDVYNAIIGGFVTESGEKIKGLNEYINLYNQKTKQKLPKFKPLYKQVLSDRESLSFYGEGSSGPPSSFSKAKKEAVKIYLDYPTSFYCGCDITWKNKKKGIPELESCGYQVRKQEKRASRIEWEHVVPAWQFGHQRQCWQKGGRKNCTRNDKQFKSMEADLHNLVPAIGEVNGDRSNFRFSQWNGSKGAFYGQCAFKVDFKGRVAEPPAQSRGAIARTYLYMNNEYKFNLSKAQRQLMEAWNKQYPVSTWECTRDERIAKIQGNHNQFVYKACGYTSDEEVLEVFRNTLNKNSEIFSSIKKLEKLFKNFDEYSSAGIFVKNGPAISTISKDIFGEWNVIRDKWNAEYDDIHLKKKAVVTEKYEDDRRKSFKKIGSFSLEQLQEYADADLSVVEKLKEIIIQKVDEIYKVYGSSEKLFDADFVLEKSLKKNDAVVAIMKDLLDSVKSFENYIKAFFGEGKETNRDESFYGDFVLAYDILLKVDHIYDAIRNYVTQKPYSKDKFKLYFQNPQFMGGWDKDKETDYRATILRYGSKYYLAIMDKKYAKCLQKIDKDDVNGNYEKINYKLLPGPNKMLPKVFFSKKWMAYYNPSEDIQKIYKNGTFKKGDMFNLNDCHKLIDFFKDSISRYPKWSNAYDFNFSETEKYKDIAGFYREVEEQGYKVSFESASKKEVDKLVEEGKLYMFQIYNKDFSDKSHGTPNLHTMYFKLLFDENNHGQIRLSGGAELFMRRASLKKEELVVHPANSPIANKNPDNPKKTTTLSYDVYKDKRFSEDQYELHIPIAINKCPKNIFKINTEVRVLLKHDDNPYVIGIARGERNLLYIVVVDGKGNIVEQYSLNEIINNFNGIRIKTDYHSLLDKKEKERFEARQNWTSIENIKELKAGYISQVVHKICELVEKYDAVIALEDLNSGFKNSRVKVEKQVYQKFEKMLIDKLNYMVDKKSNPCATGGALKGYQITNKFESFKSMSTQNGFIFYIPAWLTSKIDPSTGFVNLLKTKYTSIADSKKFISSFDRIMYVPEEDLFEFALDYKNFSRTDADYIKKWKLYSYGNRIRIFRNPKKNNVFDWEEVCLTSAYKELFNKYGINYQQGDIRALLCEQSDKAFYSSFMALMSLMLQMRNSITGRTDVDFLISPVKNSDGIFYDSRNYEAQENAILPKNADANGAYNIARKVLWAIGQFKKAEDEKLDKVKIAISNKEWLEYAQTSVKH

SEQ ID NO: 81 - protein, 1506 aa, synthetic construct
SKLEKFTNCYSLSKTLRFKAIPVGKTQENIDNKRLLVEDEKRAEDYKGVKKLLDRYYLSFINDVLHSIKLKNLNNYISLFRKKTRTEKENKELENLEINLRKEIAKAFKGNEGYKSLFKKDIIETILPEFLDDKDEIALVNSFNGFTTAFTGFFDNRENMFSEEAKSTSIAFRCINENLTRYISNMDIFEKVDAIFDKHEVQEIKEKILNSDYDVEDFFEGEFFNFVLTQEGIDVYNAIIGGFVTESGEKIKGLNEYINLYNQKTKQKLPKFKPLYKQVLSDRESLSFYGEGSSGWRRRREDARAAPGLLGRLPVLPVAAAAELPPVPGGPRGPGELAKYGLPGLAQLKSRESYVLCYDPRTRGALWVVEQLRPERLRGDGDRRECDFREDDSVHAYHRATNADYRGSGFDRGHLAAAANHRWSQKAMDDTFYLSNVAPQVPHLNQNAWNNLEKYSRSLTRSYQNVYVCTGPLFLPRTEADGKSYVKYQVIGKNHVAVPTHFFKVLILEAAGGQIELRTYVMPNAPVDEAIPLERFLVPIESIERASGLLFVPNILARAGSLKAITAGSKGYTSDEEVLEVFRNTLNKNSEIFSSIKKLEKLFKNFDEYSSAGIFVKNGPAISTISKDIFGEWNVIRDKWNAEYDDIHLKKKAVVTEKYEDDRRKSFKKIGSFSLEQLQEYADADLSVVEKLKEIIIQKVDEIYKVYGSSEKLFDADFVLEKSLKKNDAVVAIMKDLLDSVKSFENYIKAFFGEGKETNRDESFYGDFVLAYDILLKVDHIYDAIRNYVTQKPYSKDKFKLYFQNPQFMGGWDKDKETDYRATILRYGSKYYLAIMDKKYAKCLQKIDKDDVNGNYEKINYKLLPGPNKMLPKVFFSKKWMAYYNPSEDIQKIYKNGTFKKGDMFNLNDCHKLIDFFKDSISRYPKWSNAYDFNFSETEKYKDIAGFYREVEEQGYKVSFESASKKEVDKLVEEGKLYMFQIYNKDFSDKSHGTPNLHTMYFKLLFDENNHGQIRLSGGAELFMRRASLKKEELVVHPANSPIANKNPDNPKKTTTLSYDVYKDKRFSEDQYELHIPIAINKCPKNIFKINTEVRVLLKHDDNPYVIGIARGERNLLYIVVVDGKGNIVEQYSLNEIINNFNGIRIKTDYHSLLDKKEKERFEARQNWTSIENIKELKAGYISQVVHKICELVEKYDAVIALEDLNSGFKNSRVKVEKQVYQKFEKMLIDKLNYMVDKKSNPCATGGALKGYQITNKFESFKSMSTQNGFIFYIPAWLTSKIDPSTGFVNLLKTKYTSIADSKKFISSFDRIMYVPEEDLFEFALDYKNFSRTDADYIKKWKLYSYGNRIRIFRNPKKNNVFDWEEVCLTSAYKELFNKYGINYQQGDIRALLCEQSDKAFYSSFMALMSLMLQMRNSITGRTDVDFLISPVKNSDGIFYDSRNYEAQENAILPKNADANGAYNIARKVLWAIGQFKKAEDEKLDKVKIAISNKEWLEYAQTSVKH

SEQ ID NO: 82 - protein, 1508 aa, synthetic construct
SKLEKFTNCYSLSKTLRFKAIPVGKTQENIDNKRLLVEDEKRAEDYKGVKKLLDRYYLSFINDVLHSIKLKNLNNYISLFRKKTRTEKENKELENLEINLRKEIAKAFKGNEGYKSLFKKDIIETILPEFLDDKDEIALVNSFNGFTTAFTGFFDNRENMFSEEAKSTSIAFRCINENLTRYISNMDIFEKVDAIFDKHEVQEIKEKILNSDYDVEDFFEGEFFNFVLTQEGIDVYNAIIGGFVTESGEKIKGLNEYINLYNQKTKQKLPKFKPLYKQVLSDRESLSFYGEGSSGWSKEGHVMTCRIAQGLLNDEAAHAVKMLLPEYVNGDLSALCVWPDQVRHWYKYKWTSPLHFIDTPDKACNFDYERDCHDQHGVKDMCVAGAIQNFTTQLSHYREGTSDRRYNMTEALLFLSHFMGDIHQPMHVGFTSDAGGNSIDLRWFRHKSNLHHVWDREIILTAAKDYYAKDINLLEEDIEGNFTDGIWSDDLASWRECGNVFSCVNKFATESINIACKWGYKGVEAGETLSDDYFNSRLPIVMKRVAQGGIRLAMLLNNVFGASQQEDSVVATGYTSDEEVLEVFRNTLNKNSEIFSSIKKLEKLFKNFDEYSSAGIFVKNGPAISTISKDIFGEWNVIRDKWNAEYDDIHLKKKAVVTEKYEDDRRKSFKKIGSFSLEQLQEYADADLSVVEKLKEIIIQKVDEIYKVYGSSEKLFDADFVLEKSLKKNDAVVAIMKDLLDSVKSFENYIKAFFGEGKETNRDESFYGDFVLAYDILLKVDHIYDAIRNYVTQKPYSKDKFKLYFQNPQFMGGWDKDKETDYRATILRYGSKYYLAIMDKKYAKCLQKIDKDDVNGNYEKINYKLLPGPNKMLPKVFFSKKWMAYYNPSEDIQKIYKNGTFKKGDMFNLNDCHKLIDFFKDSISRYPKWSNAYDFNFSETEKYKDIAGFYREVEEQGYKVSFESASKKEVDKLVEEGKLYMFQIYNKDFSDKSHGTPNLHTMYFKLLFDENNHGQIRLSGGAELFMRRASLKKEELVVHPANSPIANKNPDNPKKTTTLSYDVYKDKRFSEDQYELHIPIAINKCPKNIFKINTEVRVLLKHDDNPYVIGIARGERNLLYIVVVDGKGNIVEQYSLNEIINNFNGIRIKTDYHSLLDKKEKERFEARQNWTSIENIKELKAGYISQVVHKICELVEKYDAVIALEDLNSGFKNSRVKVEKQVYQKFEKMLIDKLNYMVDKKSNPCATGGALKGYQITNKFESFKSMSTQNGFIFYIPAWLTSKIDPSTGFVNLLKTKYTSIADSKKFISSFDRIMYVPEEDLFEFALDYKNFSRTDADYIKKWKLYSYGNRIRIFRNPKKNNVFDWEEVCLTSAYKELFNKYGINYQQGDIRALLCEQSDKAFYSSFMALMSLMLQMRNSITGRTDVDFLISPVKNSDGIFYDSRNYEAQENAILPKNADANGAYNIARKVLWAIGQFKKAEDEKLDKVKIAISNKEWLEYAQTSVKH

SEQ ID NO: 83 - protein, 1318 aa, synthetic construct
SKLEKFTNCYSLSKTLRFKAIPVGKTQENIDNKRLLVEDEKRAEDYKGVKKLLDRYYLSFINDVLHSIKLKNLNNYISLFRKKTRTEKENKELENLEINLRKEIAKAFKGNEGYKSLFKKDIIETILPEFLDDKDEIALVNSFNGFTTAFTGFFDNRENMFSEEAKSTSIAFRCINENLTRYISNMDIFEKVDAIFDKHEVQEIKEKILNSDYDVEDFFEGEFFNFVLTQEGIDVYNAIIGGFVTESGEKIKGLNEYINLYNQKTKQKLPKFKPLYKQVLSDRESLSFYGEGSSGMKSKISEYTEKEFLEFVKDIYTNNKKKFPTEESHIQAVLEFKKLTEHPSGSDLLYYPNENREDSPAGVVKEVKEWRASKGLPGFKAGGYTSDEEVLEVFRNTLNKNSEIFSSIKKLEKLFKNFDEYSSAGIFVKNGPAISTISKDIFGEWNVIRDKWNAEYDDIHLKKKAVVTEKYEDDRRKSFKKIGSFSLEQLQEYADADLSVVEKLKEIIIQKVDEIYKVYGSSEKLFDADFVLEKSLKKNDAVVAIMKDLLDSVKSFENYIKAFFGEGKETNRDESFYGDFVLAYDILLKVDHIYDAIRNYVTQKPYSKDKFKLYFQNPQFMGGWDKDKETDYRATILRYGSKYYLAIMDKKYAKCLQKIDKDDVNGNYEKINYKLLPGPNKMLPKVFFSKKWMAYYNPSEDIQKIYKNGTFKKGDMFNLNDCHKLIDFFKDSISRYPKWSNAYDFNFSETEKYKDIAGFYREVEEQGYKVSFESASKKEVDKLVEEGKLYMFQIYNKDFSDKSHGTPNLHTMYFKLLFDENNHGQIRLSGGAELFMRRASLKKEELVVHPANSPIANKNPDNPKKTTTLSYDVYKDKRFSEDQYELHIPIAINKCPKNIFKINTEVRVLLKHDDNPYVIGIARGERNLLYIVVVDGKGNIVEQYSLNEIINNFNGIRIKTDYHSLLDKKEKERFEARQNWTSIENIKELKAGYISQVVHKICELVEKYDAVIALEDLNSGFKNSRVKVEKQVYQKFEKMLIDKLNYMVDKKSNPCATGGALKGYQITNKFESFKSMSTQNGFIFYIPAWLTSKIDPSTGFVNLLKTKYTSIADSKKFISSFDRIMYVPEEDLFEFALDYKNFSRTDADYIKKWKLYSYGNRIRIFRNPKKNNVFDWEEVCLTSAYKELFNKYGINYQQGDIRALLCEQSDKAFYSSFMALMSLMLQMRNSITGRTDVDFLISPVKNSDGIFYDSRNYEAQENAILPKNADANGAYNIARKVLWAIGQFKKAEDEKLDKVKIAISNKEWLEYAQTSVKH

SEQ ID NO: 84 - protein, 1318 aa, synthetic construct
SKLEKFTNCYSLSKTLRFKAIPVGKTQENIDNKRLLVEDEKRAEDYKGVKKLLDRYYLSFINDVLHSIKLKNLNNYISLFRKKTRTEKENKELENLEINLRKEIAKAFKGNEGYKSLFKKDIIETILPEFLDDKDEIALVNSFNGFTTAFTGFFDNRENMFSEEAKSTSIAFRCINENLTRYISNMDIFEKVDAIFDKHEVQEIKEKILNSDYDVEDFFEGEFFNFVLTQEGIDVYNAIIGGFVTESGEKIKGLNEYINLYNQKTKQKLPKFKPLYKQVLSDRESLSFYGEGSSGMELKNSISDYTEAEFVQLLKEIEKENVAATDDVLDVLLEHFVKITEHPDGTDLIYYPSDNRDDSPEGIVKEIKEWRAANGKPGFKQGGYTSDEEVLEVFRNTLNKNSEIFSSIKKLEKLFKNFDEYSSAGIFVKNGPAISTISKDIFGEWNVIRDKWNAEYDDIHLKKKAVVTEKYEDDRRKSFKKIGSFSLEQLQEYADADLSVVEKLKEIIIQKVDEIYKVYGSSEKLFDADFVLEKSLKKNDAVVAIMKDLLDSVKSFENYIKAFFGEGKETNRDESFYGDFVLAYDILLKVDHIYDAIRNYVTQKPYSKDKFKLYFQNPQFMGGWDKDKETDYRATILRYGSKYYLAIMDKKYAKCLQKIDKDDVNGNYEKINYKLLPGPNKMLPKVFFSKKWMAYYNPSEDIQKIYKNGTFKKGDMFNLNDCHKLIDFFKDSISRYPKWSNAYDFNFSETEKYKDIAGFYREVEEQGYKVSFESASKKEVDKLVEEGKLYMFQIYNKDFSDKSHGTPNLHTMYFKLLFDENNHGQIRLSGGAELFMRRASLKKEELVVHPANSPIANKNPDNPKKTTTLSYDVYKDKRFSEDQYELHIPIAINKCPKNIFKINTEVRVLLKHDDNPYVIGIARGERNLLYIVVVDGKGNIVEQYSLNEIINNFNGIRIKTDYHSLLDKKEKERFEARQNWTSIENIKELKAGYISQVVHKICELVEKYDAVIALEDLNSGFKNSRVKVEKQVYQKFEKMLIDKLNYMVDKKSNPCATGGALKGYQITNKFESFKSMSTQNGFIFYIPAWLTSKIDPSTGFVNLLKTKYTSIADSKKFISSFDRIMYVPEEDLFEFALDYKNFSRTDADYIKKWKLYSYGNRIRIFRNPKKNNVFDWEEVCLTSAYKELFNKYGINYQQGDIRALLCEQSDKAFYSSFMALMSLMLQMRNSITGRTDVDFLISPVKNSDGIFYDSRNYEAQENAILPKNADANGAYNIARKVLWAIGQFKKAEDEKLDKVKIAISNKEWLEYAQTSVKH

SEQ ID NO: 85 - protein, 1341 aa, synthetic construct
SKLEKFTNCYSLSKTLRFKAIPVGKTQENIDNKRLLVEDEKRAEDYKGVKKLLDRYYLSFINDVLHSIKLKNLNNYISLFRKKTRTEKENKELENLEINLRKEIAKAFKGNEGYKSLFKKDIIETILPEFLDDKDEIALVNSFNGFTTAFTGFFDNRENMFSEEAKSTSIAFRCINENLTRYISNMDIFEKVDAIFDKHEVQEIKEKILNSDYDVEDFFEGEFFNFVLTQEGIDVYNAIIGGFVTESGEKIKGLNEYINLYNQKTKQKLPKFKPLYKQVLSDRESLSFYGEGSSGGRTPTAEERRIANALGALPCIACYMHGVISNEVSLHHIAGRTAPGCHKKQLPLCRWHHQHAAPAEVREKYPWLVPVHADGVVGGKKEFTLLNKSEMELLADAYEMANIMHGYTSDEEVLEVFRNTLNKNSEIFSSIKKLEKLFKNFDEYSSAGIFVKNGPAISTISKDIFGEWNVIRDKWNAEYDDIHLKKKAVVTEKYEDDRRKSFKKIGSFSLEQLQEYADADLSVVEKLKEIIIQKVDEIYKVYGSSEKLFDADFVLEKSLKKNDAVVAIMKDLLDSVKSFENYIKAFFGEGKETNRDESFYGDFVLAYDILLKVDHIYDAIRNYVTQKPYSKDKFKLYFQNPQFMGGWDKDKETDYRATILRYGSKYYLAIMDKKYAKCLQKIDKDDVNGNYEKINYKLLPGPNKMLPKVFFSKKWMAYYNPSEDIQKIYKNGTFKKGDMFNLNDCHKLIDFFKDSISRYPKWSNAYDFNFSETEKYKDIAGFYREVEEQGYKVSFESASKKEVDKLVEEGKLYMFQIYNKDFSDKSHGTPNLHTMYFKLLFDENNHGQIRLSGGAELFMRRASLKKEELVVHPANSPIANKNPDNPKKTTTLSYDVYKDKRFSEDQYELHIPIAINKCPKNIFKINTEVRVLLKHDDNPYVIGIARGERNLLYIVVVDGKGNIVEQYSLNEIINNFNGIRIKTDYHSLLDKKEKERFEARQNWTSIENIKELKAGYISQVVHKICELVEKYDAVIALEDLNSGFKNSRVKVEKQVYQKFEKMLIDKLNYMVDKKSNPCATGGALKGYQITNKFESFKSMSTQNGFIFYIPAWLTSKIDPSTGFVNLLKTKYTSIADSKKFISSFDRIMYVPEEDLFEFALDYKNFSRTDADYIKKWKLYSYGNRIRIFRNPKKNNVFDWEEVCLTSAYKELFNKYGINYQQGDIRALLCEQSDKAFYSSFMALMSLMLQMRNSITGRTDVDFLISPVKNSDGIFYDSRNYEAQENAILPKNADANGAYNIARKVLWAIGQFKKAEDEKLDKVKIAISNKEWLEYAQTSVKH

SEQ ID NO: 86 - protein, 1336 aa, synthetic construct
SKLEKFTNCYSLSKTLRFKAIPVGKTQENIDNKRLLVEDEKRAEDYKGVKKLLDRYYLSFINDVLHSIKLKNLNNYISLFRKKTRTEKENKELENLEINLRKEIAKAFKGNEGYKSLFKKDIIETILPEFLDDKDEIALVNSFNGFTTAFTGFFDNRENMFSEEAKSTSIAFRCINENLTRYISNMDIFEKVDAIFDKHEVQEIKEKILNSDYDVEDFFEGEFFNFVLTQEGIDVYNAIIGGFVTESGEKIKGLNEYINLYNQKTKQKLPKFKPLYKQVLSDRESLSFYGEGSSGMEWKDIKGYEGHYQVSNTGEVYSIKSGKTLKHQIPKDGYHRIGLFKGGKGKTFQVHRLVAIHFCEGYEEGLVVDHKDGNKDNNLSTNLRWVTQKINVENQMSRGTGYTSDEEVLEVFRNTLNKNSEIFSSIKKLEKLFKNFDEYSSAGIFVKNGPAISTISKDIFGEWNVIRDKWNAEYDDIHLKKKAVVTEKYEDDRRKSFKKIGSFSLEQLQEYADADLSVVEKLKEIIIQKVDEIYKVYGSSEKLFDADFVLEKSLKKNDAVVAIMKDLLDSVKSFENYIKAFFGEGKETNRDESFYGDFVLAYDILLKVDHIYDAIRNYVTQKPYSKDKFKLYFQNPQFMGGWDKDKETDYRATILRYGSKYYLAIMDKKYAKCLQKIDKDDVNGNYEKINYKLLPGPNKMLPKVFFSKKWMAYYNPSEDIQKIYKNGTFKKGDMFNLNDCHKLIDFFKDSISRYPKWSNAYDFNFSETEKYKDIAGFYREVEEQGYKVSFESASKKEVDKLVEEGKLYMFQIYNKDFSDKSHGTPNLHTMYFKLLFDENNHGQIRLSGGAELFMRRASLKKEELVVHPANSPIANKNPDNPKKTTTLSYDVYKDKRFSEDQYELHIPIAINKCPKNIFKINTEVRVLLKHDDNPYVIGIARGERNLLYIVVVDGKGNIVEQYSLNEIINNFNGIRIKTDYHSLLDKKEKERFEARQNWTSIENIKELKAGYISQVVHKICELVEKYDAVIALEDLNSGFKNSRVKVEKQVYQKFEKMLIDKLNYMVDKKSNPCATGGALKGYQITNKFESFKSMSTQNGFIFYIPAWLTSKIDPSTGFVNLLKTKYTSIADSKKFISSFDRIMYVPEEDLFEFALDYKNFSRTDADYIKKWKLYSYGNRIRIFRNPKKNNVFDWEEVCLTSAYKELFNKYGINYQQGDIRALLCEQSDKAFYSSFMALMSLMLQMRNSITGRTDVDFLISPVKNSDGIFYDSRNYEAQENAILPKNADANGAYNIARKVLWAIGQFKKAEDEKLDKVKIAISNKEWLEYAQTSVKH

SEQ ID NO: 87 - protein, 1501 aa, synthetic construct
SKLEKFTNCYSLSKTLRFKAIPVGKTQENIDNKRLLVEDEKRAEDYKGVKKLLDRYYLSFINDVLHSIKLKNLNNYISLFRKKTRTEKENKELENLEINLRKEIAKAFKGNEGYKSLFKKDIIETILPEFLDDKDEIALVNSFNGFTTAFTGFFDNRENMFSEEAKSTSIAFRCINENLTRYISNMDIFEKVDAIFDKHEVQEIKEKILNSDYDVEDFFEGEFFNFVLTQEGIDVYNAIIGGFVTESGEKIKGLNEYINLYNQKTKQKLPKFKPLYKQVLSDRESLSFYGEGSSGWGALGHATVAYVAQHYVSPEAASWAQGILGSSSSSYLASIASWADEYRLTSAGKWSASLHFIDAEDNPPTNCNVDYERDCGSSGCSISAIANYTQRVSDSSLSSENHAEALRFLVHFIGDMTQPLHDEAYAVGGNKINVTFDGYHDNLHSDWDTYMPQKLIGGHALSDAESWAKTLVQNIESGNYTAQAIGWIKGDNISEPITTATRWASDANALVCTVVMPHGAAALQTGDLYPTYYDSVIDTIELQIAKGGYRLANWINEIHGSEIAKGYTSDEEVLEVFRNTLNKNSEIFSSIKKLEKLFKNFDEYSSAGIFVKNGPAISTISKDIFGEWNVIRDKWNAEYDDIHLKKKAVVTEKYEDDRRKSFKKIGSFSLEQLQEYADADLSVVEKLKEIIIQKVDEIYKVYGSSEKLFDADFVLEKSLKKNDAVVAIMKDLLDSVKSFENYIKAFFGEGKETNRDESFYGDFVLAYDILLKVDHIYDAIRNYVTQKPYSKDKFKLYFQNPQFMGGWDKDKETDYRATILRYGSKYYLAIMDKKYAKCLQKIDKDDVNGNYEKINYKLLPGPNKMLPKVFFSKKWMAYYNPSEDIQKIYKNGTFKKGDMFNLNDCHKLIDFFKDSISRYPKWSNAYDFNFSETEKYKDIAGFYREVEEQGYKVSFESASKKEVDKLVEEGKLYMFQIYNKDFSDKSHGTPNLHTMYFKLLFDENNHGQIRLSGGAELFMRRASLKKEELVVHPANSPIANKNPDNPKKTTTLSYDVYKDKRFSEDQYELHIPIAINKCPKNIFKINTEVRVLLKHDDNPYVIGIARGERNLLYIVVVDGKGNIVEQYSLNEIINNFNGIRIKTDYHSLLDKKEKERFEARQNWTSIENIKELKAGYISQVVHKICELVEKYDAVIALEDLNSGFKNSRVKVEKQVYQKFEKMLIDKLNYMVDKKSNPCATGGALKGYQITNKFESFKSMSTQNGFIFYIPAWLTSKIDPSTGFVNLLKTKYTSIADSKKFISSFDRIMYVPEEDLFEFALDYKNFSRTDADYIKKWKLYSYGNRIRIFRNPKKNNVFDWEEVCLTSAYKELFNKYGINYQQGDIRALLCEQSDKAFYSSFMALMSLMLQMRNSITGRTDVDFLISPVKNSDGIFYDSRNYEAQENAILPKNADANGAYNIARKVLWAIGQFKKAEDEKLDKVKIAISNKEWLEYAQTSVKH

SEQ ID NO: 88 - protein, 1498 aa, synthetic construct
SKLEKFTNCYSLSKTLRFKAIPVGKTQENIDNKRLLVEDEKRAEDYKGVKKLLDRYYLSFINDVLHSIKLKNLNNYISLFRKKTRTEKENKELENLEINLRKEIAKAFKGNEGYKSLFKKDIIETILPEFLDDKDEIALVNSFNGFTTAFTGFFDNRENMFSEEAKSTSIAFRCINENLTRYISNMDIFEKVDAIFDKHEVQEIKEKILNSDYDVEDFFEGEFFNFVLTQEGIDVYNAIIGGFVTESGEKIKGLNEYINLYNQKTKQKLPKFKPLYKQVLSDRESLSFYGEGSSGWGNLGHETVAYIAQSFVASSTESFCQNILGDDSTSYLANVATWADTYKYTDAGEFSKPYHFIDAQDNPPQSCGVDYDRDCGSAGCSISAIQNYTNILLESPNGSEALNALKFVVHIIGDIHQPLHDENLEAGGNGIDVTYDGETTNLHHIWDTNMPEEAAGGYSLSVAKTYADLLTERIKTGTYSSKKDSWTDGIDIKDPVSTSMIWAADANTYVCSTVLDDGLAYINSTDLSGEYYDKSQPVFEELIAKAGYRLAAWLDLIASQPSGYTSDEEVLEVFRNTLNKNSEIFSSIKKLEKLFKNFDEYSSAGIFVKNGPAISTISKDIFGEWNVIRDKWNAEYDDIHLKKKAVVTEKYEDDRRKSFKKIGSFSLEQLQEYADADLSVVEKLKEIIIQKVDEIYKVYGSSEKLFDADFVLEKSLKKNDAVVAIMKDLLDSVKSFENYIKAFFGEGKETNRDESFYGDFVLAYDILLKVDHIYDAIRNYVTQKPYSKDKFKLYFQNPQFMGGWDKDKETDYRATILRYGSKYYLAIMDKKYAKCLQKIDKDDVNGNYEKINYKLLPGPNKMLPKVFFSKKWMAYYNPSEDIQKIYKNGTFKKGDMFNLNDCHKLIDFFKDSISRYPKWSNAYDFNFSETEKYKDIAGFYREVEEQGYKVSFESASKKEVDKLVEEGKLYMFQIYNKDFSDKSHGTPNLHTMYFKLLFDENNHGQIRLSGGAELFMRRASLKKEELVVHPANSPIANKNPDNPKKTTTLSYDVYKDKRFSEDQYELHIPIAINKCPKNIFKINTEVRVLLKHDDNPYVIGIARGERNLLYIVVVDGKGNIVEQYSLNEIINNFNGIRIKTDYHSLLDKKEKERFEARQNWTSIENIKELKAGYISQVVHKICELVEKYDAVIALEDLNSGFKNSRVKVEKQVYQKFEKMLIDKLNYMVDKKSNPCATGGALKGYQITNKFESFKSMSTQNGFIFYIPAWLTSKIDPSTGFVNLLKTKYTSIADSKKFISSFDRIMYVPEEDLFEFALDYKNFSRTDADYIKKWKLYSYGNRIRIFRNPKKNNVFDWEEVCLTSAYKELFNKYGINYQQGDIRALLCEQSDKAFYSSFMALMSLMLQMRNSITGRTDVDFLISPVKNSDGIFYDSRNYEAQENAILPKNADANGAYNIARKVLWAIGQFKKAEDEKLDKVKIAISNKEWLEYAQTSVKH

SEQ ID NO: 89 - protein, 1317 aa, synthetic construct
SKLEKFTNCYSLSKTLRFKAIPVGKTQENIDNKRLLVEDEKRAEDYKGVKKLLDRYYLSFINDVLHSIKLKNLNNYISLFRKKTRTEKENKELENLEINLRKEIAKAFKGNEGYKSLFKKDIIETILPEFLDDKDEIALVNSFNGFTTAFTGFFDNRENMFSEEAKSTSIAFRCINENLTRYISNMDIFEKVDAIFDKHEVQEIKEKILNSDYDVEDFFEGEFFNFVLTQEGIDVYNAIIGGFVTESGEKIKGLNEYINLYNQKTKQKLPKFKPLYKQVLSDRESLSFYGEGSSGMELKHSISDYTEAEFLQLVTTICNADTSSEEELVKLVTHFEEMTEHPSGSDLIYYPKEGDDDSPSGIVNTVKQWRAANGKSGFKQGGYTSDEEVLEVFRNTLNKNSEIFSSIKKLEKLFKNFDEYSSAGIFVKNGPAISTISKDIFGEWNVIRDKWNAEYDDIHLKKKAVVTEKYEDDRRKSFKKIGSFSLEQLQEYADADLSVVEKLKEIIIQKVDEIYKVYGSSEKLFDADFVLEKSLKKNDAVVAIMKDLLDSVKSFENYIKAFFGEGKETNRDESFYGDFVLAYDILLKVDHIYDAIRNYVTQKPYSKDKFKLYFQNPQFMGGWDKDKETDYRATILRYGSKYYLAIMDKKYAKCLQKIDKDDVNGNYEKINYKLLPGPNKMLPKVFFSKKWMAYYNPSEDIQKIYKNGTFKKGDMFNLNDCHKLIDFFKDSISRYPKWSNAYDFNFSETEKYKDIAGFYREVEEQGYKVSFESASKKEVDKLVEEGKLYMFQIYNKDFSDKSHGTPNLHTMYFKLLFDENNHGQIRLSGGAELFMRRASLKKEELVVHPANSPIANKNPDNPKKTTTLSYDVYKDKRFSEDQYELHIPIAINKCPKNIFKINTEVRVLLKHDDNPYVIGIARGERNLLYIVVVDGKGNIVEQYSLNEIINNFNGIRIKTDYHSLLDKKEKERFEARQNWTSIENIKELKAGYISQVVHKICELVEKYDAVIALEDLNSGFKNSRVKVEKQVYQKFEKMLIDKLNYMVDKKSNPCATGGALKGYQITNKFESFKSMSTQNGFIFYIPAWLTSKIDPSTGFVNLLKTKYTSIADSKKFISSFDRIMYVPEEDLFEFALDYKNFSRTDADYIKKWKLYSYGNRIRIFRNPKKNNVFDWEEVCLTSAYKELFNKYGINYQQGDIRALLCEQSDKAFYSSFMALMSLMLQMRNSITGRTDVDFLISPVKNSDGIFYDSRNYEAQENAILPKNADANGAYNIARKVLWAIGQFKKAEDEKLDKVKIAISNKEWLEYAQTSVKH

SEQ ID NO: 90 - protein, 1328 aa, synthetic construct
SKLEKFTNCYSLSKTLRFKAIPVGKTQENIDNKRLLVEDEKRAEDYKGVKKLLDRYYLSFINDVLHSIKLKNLNNYISLFRKKTRTEKENKELENLEINLRKEIAKAFKGNEGYKSLFKKDIIETILPEFLDDKDEIALVNSFNGFTTAFTGFFDNRENMFSEEAKSTSIAFRCINENLTRYISNMDIFEKVDAIFDKHEVQEIKEKILNSDYDVEDFFEGEFFNFVLTQEGIDVYNAIIGGFVTESGEKIKGLNEYINLYNQKTKQKLPKFKPLYKQVLSDRESLSFYGEGSSGMLLTGKLYKEEKQKFYDAQNGKCLICQRELNPDVQANHLDHDHELNGPKAGKVRGLLCNLCNAAEGQMKHKFNRSGLKGQGVDYLEWLENLLTYLKSGYTSDEEVLEVFRNTLNKNSEIFSSIKKLEKLFKNFDEYSSAGIFVKNGPAISTISKDIFGEWNVIRDKWNAEYDDIHLKKKAVVTEKYEDDRRKSFKKIGSFSLEQLQEYADADLSVVEKLKEIIIQKVDEIYKVYGSSEKLFDADFVLEKSLKKNDAVVAIMKDLLDSVKSFENYIKAFFGEGKETNRDESFYGDFVLAYDILLKVDHIYDAIRNYVTQKPYSKDKFKLYFQNPQFMGGWDKDKETDYRATILRYGSKYYLAIMDKKYAKCLQKIDKDDVNGNYEKINYKLLPGPNKMLPKVFFSKKWMAYYNPSEDIQKIYKNGTFKKGDMFNLNDCHKLIDFFKDSISRYPKWSNAYDFNFSETEKYKDIAGFYREVEEQGYKVSFESASKKEVDKLVEEGKLYMFQIYNKDFSDKSHGTPNLHTMYFKLLFDENNHGQIRLSGGAELFMRRASLKKEELVVHPANSPIANKNPDNPKKTTTLSYDVYKDKRFSEDQYELHIPIAINKCPKNIFKINTEVRVLLKHDDNPYVIGIARGERNLLYIVVVDGKGNIVEQYSLNEIINNFNGIRIKTDYHSLLDKKEKERFEARQNWTSIENIKELKAGYISQVVHKICELVEKYDAVIALEDLNSGFKNSRVKVEKQVYQKFEKMLIDKLNYMVDKKSNPCATGGALKGYQITNKFESFKSMSTQNGFIFYIPAWLTSKIDPSTGFVNLLKTKYTSIADSKKFISSFDRIMYVPEEDLFEFALDYKNFSRTDADYIKKWKLYSYGNRIRIFRNPKKNNVFDWEEVCLTSAYKELFNKYGINYQQGDIRALLCEQSDKAFYSSFMALMSLMLQMRNSITGRTDVDFLISPVKNSDGIFYDSRNYEAQENAILPKNADANGAYNIARKVLWAIGQFKKAEDEKLDKVKIAISNKEWLEYAQTSVKH

SEQ ID NO: 91 - protein, 1438 aa, synthetic construct
SKLEKFTNCYSLSKTLRFKAIPVGKTQENIDNKRLLVEDEKRAEDYKGVKKLLDRYYLSFINDVLHSIKLKNLNNYISLFRKKTRTEKENKELENLEINLRKEIAKAFKGNEGYKSLFKKDIIETILPEFLDDKDEIALVNSFNGFTTAFTGFFDNRENMFSEEAKSTSIAFRCINENLTRYISNMDIFEKVDAIFDKHEVQEIKEKILNSDYDVEDFFEGEFFNFVLTQEGIDVYNAIIGGFVTESGEKIKGLNEYINLYNQKTKQKLPKFKPLYKQVLSDRESLSFYGEGSSGSFSHAKNEAVKIYRDHPVSFYCGCEIRWQGKKGIPDLESCGYQVRKNENRASRIEWEHVVPAWQFGHQLQCWQQGGRKNCTRTSPEFNQMEADLHNLTPAIGEVNGDRSNFSFSQWNGVDGVTYGQCEMQVNFKERTAMPPERARGAIARTYLYMSEQYGLRLSKAQSQLMQAWNNQYPVSEWECVRDQRIEKVQGNSNRFVREQCPGYTSDEEVLEVFRNTLNKNSEIFSSIKKLEKLFKNFDEYSSAGIFVKNGPAISTISKDIFGEWNVIRDKWNAEYDDIHLKKKAVVTEKYEDDRRKSFKKIGSFSLEQLQEYADADLSVVEKLKEIIIQKVDEIYKVYGSSEKLFDADFVLEKSLKKNDAVVAIMKDLLDSVKSFENYIKAFFGEGKETNRDESFYGDFVLAYDILLKVDHIYDAIRNYVTQKPYSKDKFKLYFQNPQFMGGWDKDKETDYRATILRYGSKYYLAIMDKKYAKCLQKIDKDDVNGNYEKINYKLLPGPNKMLPKVFFSKKWMAYYNPSEDIQKIYKNGTFKKGDMFNLNDCHKLIDFFKDSISRYPKWSNAYDFNFSETEKYKDIAGFYREVEEQGYKVSFESASKKEVDKLVEEGKLYMFQIYNKDFSDKSHGTPNLHTMYFKLLFDENNHGQIRLSGGAELFMRRASLKKEELVVHPANSPIANKNPDNPKKTTTLSYDVYKDKRFSEDQYELHIPIAINKCPKNIFKINTEVRVLLKHDDNPYVIGIARGERNLLYIVVVDGKGNIVEQYSLNEIINNFNGIRIKTDYHSLLDKKEKERFEARQNWTSIENIKELKAGYISQVVHKICELVEKYDAVIALEDLNSGFKNSRVKVEKQVYQKFEKMLIDKLNYMVDKKSNPCATGGALKGYQITNKFESFKSMSTQNGFIFYIPAWLTSKIDPSTGFVNLLKTKYTSIADSKKFISSFDRIMYVPEEDLFEFALDYKNFSRTDADYIKKWKLYSYGNRIRIFRNPKKNNVFDWEEVCLTSAYKELFNKYGINYQQGDIRALLCEQSDKAFYSSFMALMSLMLQMRNSITGRTDVDFLISPVKNSDGIFYDSRNYEAQENAILPKNADANGAYNIARKVLWAIGQFKKAEDEKLDKVKIAISNKEWLEYAQTSVKH

SEQ ID NO: 92 - protein, 1480 aa, synthetic construct
SKLEKFTNCYSLSKTLRFKAIPVGKTQENIDNKRLLVEDEKRAEDYKGVKKLLDRYYLSFINDVLHSIKLKNLNNYISLFRKKTRTEKENKELENLEINLRKEIAKAFKGNEGYKSLFKKDIIETILPEFLDDKDEIALVNSFNGFTTAFTGFFDNRENMFSEEAKSTSIAFRCINENLTRYISNMDIFEKVDAIFDKHEVQEIKEKILNSDYDVEDFFEGEFFNFVLTQEGIDVYNAIIGGFVTESGEKIKGLNEYINLYNQKTKQKLPKFKPLYKQVLSDRESLSFYGEGSSGADLPALPGGPAGGTGELAKYGLPGVAQLRSRESYVLSYDPRTRGALWVLEQLRPERLRGDGDRSACDFREDDSVHAYHRATNADYRGSGFDRGHLAAAANHRWSQRAMDDTFYLSNVAPQVPHLNQNAWNNLERYSRSLTRTYQNVYVCTGPLFLPRTEADGKSYVKYQVIGKNHVAVPTHFFKVLILEAAGGQIELRSYVMPNAPVDETIPLERFLVPIESIERASGLLFVPNILARAGNLKAITAGSGYTSDEEVLEVFRNTLNKNSEIFSSIKKLEKLFKNFDEYSSAGIFVKNGPAISTISKDIFGEWNVIRDKWNAEYDDIHLKKKAVVTEKYEDDRRKSFKKIGSFSLEQLQEYADADLSVVEKLKEIIIQKVDEIYKVYGSSEKLFDADFVLEKSLKKNDAVVAIMKDLLDSVKSFENYIKAFFGEGKETNRDESFYGDFVLAYDILLKVDHIYDAIRNYVTQKPYSKDKFKLYFQNPQFMGGWDKDKETDYRATILRYGSKYYLAIMDKKYAKCLQKIDKDDVNGNYEKINYKLLPGPNKMLPKVFFSKKWMAYYNPSEDIQKIYKNGTFKKGDMFNLNDCHKLIDFFKDSISRYPKWSNAYDFNFSETEKYKDIAGFYREVEEQGYKVSFESASKKEVDKLVEEGKLYMFQIYNKDFSDKSHGTPNLHTMYFKLLFDENNHGQIRLSGGAELFMRRASLKKEELVVHPANSPIANKNPDNPKKTTTLSYDVYKDKRFSEDQYELHIPIAINKCPKNIFKINTEVRVLLKHDDNPYVIGIARGERNLLYIVVVDGKGNIVEQYSLNEIINNFNGIRIKTDYHSLLDKKEKERFEARQNWTSIENIKELKAGYISQVVHKICELVEKYDAVIALEDLNSGFKNSRVKVEKQVYQKFEKMLIDKLNYMVDKKSNPCATGGALKGYQITNKFESFKSMSTQNGFIFYIPAWLTSKIDPSTGFVNLLKTKYTSIADSKKFISSFDRIMYVPEEDLFEFALDYKNFSRTDADYIKKWKLYSYGNRIRIFRNPKKNNVFDWEEVCLTSAYKELFNKYGINYQQGDIRALLCEQSDKAFYSSFMALMSLMLQMRNSITGRTDVDFLISPVKNSDGIFYDSRNYEAQENAILPKNADANGAYNIARKVLWAIGQFKKAEDEKLDKVKIAISNKEWLEYAQTSVKH

SEQ ID NO: 93 - protein, 1382 aa, synthetic construct
SKLEKFTNCYSLSKTLRFKAIPVGKTQENIDNKRLLVEDEKRAEDYKGVKKLLDRYYLSFINDVLHSIKLKNLNNYISLFRKKTRTEKENKELENLEINLRKEIAKAFKGNEGYKSLFKKDIIETILPEFLDDKDEIALVNSFNGFTTAFTGFFDNRENMFSEEAKSTSIAFRCINENLTRYISNMDIFEKVDAIFDKHEVQEIKEKILNSDYDVEDFFEGEFFNFVLTQEGIDVYNAIIGGFVTESGEKIKGLNEYINLYNQKTKQKLPKFKPLYKQVLSDRESLSFYGEGSSGEKNSKDAQKMINEMQKRNRQTNERIEEIIRTTGKENAKYLIEKIKLHDMQEGKCLYSLEAIPLEDLLNNPFNYEVDHIIPRSVSFDNSFNNKVLVKQEENSKKGNRTPFQYLSSSDSKISYETFKKHILNLAKGKGRISKTKKEYLLEERDGYTSDEEVLEVFRNTLNKNSEIFSSIKKLEKLFKNFDEYSSAGIFVKNGPAISTISKDIFGEWNVIRDKWNAEYDDIHLKKKAVVTEKYEDDRRKSFKKIGSFSLEQLQEYADADLSVVEKLKEIIIQKVDEIYKVYGSSEKLFDADFVLEKSLKKNDAVVAIMKDLLDSVKSFENYIKAFFGEGKETNRDESFYGDFVLAYDILLKVDHIYDAIRNYVTQKPYSKDKFKLYFQNPQFMGGWDKDKETDYRATILRYGSKYYLAIMDKKYAKCLQKIDKDDVNGNYEKINYKLLPGPNKMLPKVFFSKKWMAYYNPSEDIQKIYKNGTFKKGDMFNLNDCHKLIDFFKDSISRYPKWSNAYDFNFSETEKYKDIAGFYREVEEQGYKVSFESASKKEVDKLVEEGKLYMFQIYNKDFSDKSHGTPNLHTMYFKLLFDENNHGQIRLSGGAELFMRRASLKKEELVVHPANSPIANKNPDNPKKTTTLSYDVYKDKRFSEDQYELHIPIAINKCPKNIFKINTEVRVLLKHDDNPYVIGIARGERNLLYIVVVDGKGNIVEQYSLNEIINNFNGIRIKTDYHSLLDKKEKERFEARQNWTSIENIKELKAGYISQVVHKICELVEKYDAVIALEDLNSGFKNSRVKVEKQVYQKFEKMLIDKLNYMVDKKSNPCATGGALKGYQITNKFESFKSMSTQNGFIFYIPAWLTSKIDPSTGFVNLLKTKYTSIADSKKFISSFDRIMYVPEEDLFEFALDYKNFSRTDADYIKKWKLYSYGNRIRIFRNPKKNNVFDWEEVCLTSAYKELFNKYGINYQQGDIRALLCEQSDKAFYSSFMALMSLMLQMRNSITGRTDVDFLISPVKNSDGIFYDSRNYEAQENAILPKNADANGAYNIARKVLWAIGQFKKAEDEKLDKVKIAISNKEWLEYAQTSVKH

SEQ ID NO: 94 - protein, 1335 aa, synthetic construct
SKLEKFTNCYSLSKTLRFKAIPVGKTQENIDNKRLLVEDEKRAEDYKGVKKLLDRYYLSFINDVLHSIKLKNLNNYISLFRKKTRTEKENKELENLEINLRKEIAKAFKGNEGYKSLFKKDIIETILPEFLDDKDEIALVNSFNGFTTAFTGFFDNRENMFSEEAKSTSIAFRCINENLTRYISNMDIFEKVDAIFDKHEVQEIKEKILNSDYDVEDFFEGEFFNFVLTQEGIDVYNAIIGGFVTESGEKIKGLNEYINLYNQKTKQKLPKFKPLYKQVLSDRESLSFYGEGSSGDGNAHTVNPSKLVSHRLGDGLTVQQIDRACTPALWCALTREKDFDEKNGLPAREDRAIRVHGHEIKSSDYIQVFSKRKKTDSDRDETPFGAIAVRGGFVEIGPSGYTSDEEVLEVFRNTLNKNSEIFSSIKKLEKLFKNFDEYSSAGIFVKNGPAISTISKDIFGEWNVIRDKWNAEYDDIHLKKKAVVTEKYEDDRRKSFKKIGSFSLEQLQEYADADLSVVEKLKEIIIQKVDEIYKVYGSSEKLFDADFVLEKSLKKNDAVVAIMKDLLDSVKSFENYIKAFFGEGKETNRDESFYGDFVLAYDILLKVDHIYDAIRNYVTQKPYSKDKFKLYFQNPQFMGGWDKDKETDYRATILRYGSKYYLAIMDKKYAKCLQKIDKDDVNGNYEKINYKLLPGPNKMLPKVFFSKKWMAYYNPSEDIQKIYKNGTFKKGDMFNLNDCHKLIDFFKDSISRYPKWSNAYDFNFSETEKYKDIAGFYREVEEQGYKVSFESASKKEVDKLVEEGKLYMFQIYNKDFSDKSHGTPNLHTMYFKLLFDENNHGQIRLSGGAELFMRRASLKKEELVVHPANSPIANKNPDNPKKTTTLSYDVYKDKRFSEDQYELHIPIAINKCPKNIFKINTEVRVLLKHDDNPYVIGIARGERNLLYIVVVDGKGNIVEQYSLNEIINNFNGIRIKTDYHSLLDKKEKERFEARQNWTSIENIKELKAGYISQVVHKICELVEKYDAVIALEDLNSGFKNSRVKVEKQVYQKFEKMLIDKLNYMVDKKSNPCATGGALKGYQITNKFESFKSMSTQNGFIFYIPAWLTSKIDPSTGFVNLLKTKYTSIADSKKFISSFDRIMYVPEEDLFEFALDYKNFSRTDADYIKKWKLYSYGNRIRIFRNPKKNNVFDWEEVCLTSAYKELFNKYGINYQQGDIRALLCEQSDKAFYSSFMALMSLMLQMRNSITGRTDVDFLISPVKNSDGIFYDSRNYEAQENAILPKNADANGAYNIARKVLWAIGQFKKAEDEKLDKVKIAISNKEWLEYAQTSVKH

SEQ ID NO: 95 - protein, 1381 aa, synthetic construct
SKLEKFTNCYSLSKTLRFKAIPVGKTQENIDNKRLLVEDEKRAEDYKGVKKLLDRYYLSFINDVLHSIKLKNLNNYISLFRKKTRTEKENKELENLEINLRKEIAKAFKGNEGYKSLFKKDIIETILPEFLDDKDEIALVNSFNGFTTAFTGFFDNRENMFSEEAKSTSIAFRCINENLTRYISNMDIFEKVDAIFDKHEVQEIKEKILNSDYDVEDFFEGEFFNFVLTQEGIDVYNAIIGGFVTESGEKIKGLNEYINLYNQKTKQKLPKFKPLYKQVLSDRESLSFYGEGSSGENQYTNQGKSNSQQRLKRLEKSLKELGSKILKENIPAKLSKIDNNALQNDRLYLYYLQNGKDMYTGDDLDIDRLSNYDIDHIIPQAFLKDNSIDNKVLVSSASNRGKSDDFPSLEVVKKRKTFWYQLLKSKLISQRKFDNLTKAERGGLLGYTSDEEVLEVFRNTLNKNSEIFSSIKKLEKLFKNFDEYSSAGIFVKNGPAISTISKDIFGEWNVIRDKWNAEYDDIHLKKKAVVTEKYEDDRRKSFKKIGSFSLEQLQEYADADLSVVEKLKEIIIQKVDEIYKVYGSSEKLFDADFVLEKSLKKNDAVVAIMKDLLDSVKSFENYIKAFFGEGKETNRDESFYGDFVLAYDILLKVDHIYDAIRNYVTQKPYSKDKFKLYFQNPQFMGGWDKDKETDYRATILRYGSKYYLAIMDKKYAKCLQKIDKDDVNGNYEKINYKLLPGPNKMLPKVFFSKKWMAYYNPSEDIQKIYKNGTFKKGDMFNLNDCHKLIDFFKDSISRYPKWSNAYDFNFSETEKYKDIAGFYREVEEQGYKVSFESASKKEVDKLVEEGKLYMFQIYNKDFSDKSHGTPNLHTMYFKLLFDENNHGQIRLSGGAELFMRRASLKKEELVVHPANSPIANKNPDNPKKTTTLSYDVYKDKRFSEDQYELHIPIAINKCPKNIFKINTEVRVLLKHDDNPYVIGIARGERNLLYIVVVDGKGNIVEQYSLNEIINNFNGIRIKTDYHSLLDKKEKERFEARQNWTSIENIKELKAGYISQVVHKICELVEKYDAVIALEDLNSGFKNSRVKVEKQVYQKFEKMLIDKLNYMVDKKSNPCATGGALKGYQITNKFESFKSMSTQNGFIFYIPAWLTSKIDPSTGFVNLLKTKYTSIADSKKFISSFDRIMYVPEEDLFEFALDYKNFSRTDADYIKKWKLYSYGNRIRIFRNPKKNNVFDWEEVCLTSAYKELFNKYGINYQQGDIRALLCEQSDKAFYSSFMALMSLMLQMRNSITGRTDVDFLISPVKNSDGIFYDSRNYEAQENAILPKNADANGAYNIARKVLWAIGQFKKAEDEKLDKVKIAISNKEWLEYAQTSVKH

SEQ ID NO: 96 - protein, 1347 aa, synthetic construct
SKLEKFTNCYSLSKTLRFKAIPVGKTQENIDNKRLLVEDEKRAEDYKGVKKLLDRYYLSFINDVLHSIKLKNLNNYISLFRKKTRTEKENKELENLEINLRKEIAKAFKGNEGYKSLFKKDIIETILPEFLDDKDEIALVNSFNGFTTAFTGFFDNRENMFSEEAKSTSIAFRCINENLTRYISNMDIFEKVDAIFDKHEVQEIKEKILNSDYDVEDFFEGEFFNFVLTQEGIDVYNAIIGGFVTESGEKIKGLNEYINLYNQKTKQKLPKFKPLYKQVLSDRESLSFYGEGSSGFPNFVGEPKSKDILKLRLYEQQHGKCLYSGKEINLGRLNEKGYVEIDHALPFSRTWDDSFNNKVLVLGSENQNKGNQTPYEYFNGKDNSREWQEFKARVETSRFPRSKKQRILLQKGYTSDEEVLEVFRNTLNKNSEIFSSIKKLEKLFKNFDEYSSAGIFVKNGPAISTISKDIFGEWNVIRDKWNAEYDDIHLKKKAVVTEKYEDDRRKSFKKIGSFSLEQLQEYADADLSVVEKLKEIIIQKVDEIYKVYGSSEKLFDADFVLEKSLKKNDAVVAIMKDLLDSVKSFENYIKAFFGEGKETNRDESFYGDFVLAYDILLKVDHIYDAIRNYVTQKPYSKDKFKLYFQNPQFMGGWDKDKETDYRATILRYGSKYYLAIMDKKYAKCLQKIDKDDVNGNYEKINYKLLPGPNKMLPKVFFSKKWMAYYNPSEDIQKIYKNGTFKKGDMFNLNDCHKLIDFFKDSISRYPKWSNAYDFNFSETEKYKDIAGFYREVEEQGYKVSFESASKKEVDKLVEEGKLYMFQIYNKDFSDKSHGTPNLHTMYFKLLFDENNHGQIRLSGGAELFMRRASLKKEELVVHPANSPIANKNPDNPKKTTTLSYDVYKDKRFSEDQYELHIPIAINKCPKNIFKINTEVRVLLKHDDNPYVIGIARGERNLLYIVVVDGKGNIVEQYSLNEIINNFNGIRIKTDYHSLLDKKEKERFEARQNWTSIENIKELKAGYISQVVHKICELVEKYDAVIALEDLNSGFKNSRVKVEKQVYQKFEKMLIDKLNYMVDKKSNPCATGGALKGYQITNKFESFKSMSTQNGFIFYIPAWLTSKIDPSTGFVNLLKTKYTSIADSKKFISSFDRIMYVPEEDLFEFALDYKNFSRTDADYIKKWKLYSYGNRIRIFRNPKKNNVFDWEEVCLTSAYKELFNKYGINYQQGDIRALLCEQSDKAFYSSFMALMSLMLQMRNSITGRTDVDFLISPVKNSDGIFYDSRNYEAQENAILPKNADANGAYNIARKVLWAIGQFKKAEDEKLDKVKIAISNKEWLEYAQTSVKH

SEQ ID NO: 97 - protein, 1390 aa, synthetic construct
SKLEKFTNCYSLSKTLRFKAIPVGKTQENIDNKRLLVEDEKRAEDYKGVKKLLDRYYLSFINDVLHSIKLKNLNNYISLFRKKTRTEKENKELENLEINLRKEIAKAFKGNEGYKSLFKKDIIETILPEFLDDKDEIALVNSFNGFTTAFTGFFDNRENMFSEEAKSTSIAFRCINENLTRYISNMDIFEKVDAIFDKHEVQEIKEKILNSDYDVEDFFEGEFFNFVLTQEGIDVYNAIIGGFVTESGEKIKGLNEYINLYNQKTKQKLPKFKPLYKQVLSDRESLSFYGEGSSGSPENIFKDKNNRIKEFAKGISAYSGANLTDGDFDGAKEELDHIIPRSHKKYGTLNDEANLICVTRGDNKNKGNRIFCLRDLADNYKLKQFETTDDLEIEKKIADTIWDANKKDFKFGNYRSFINLTPQEQKAFRHALFLADENPIKQAVIRAINNRNRTGYTSDEEVLEVFRNTLNKNSEIFSSIKKLEKLFKNFDEYSSAGIFVKNGPAISTISKDIFGEWNVIRDKWNAEYDDIHLKKKAVVTEKYEDDRRKSFKKIGSFSLEQLQEYADADLSVVEKLKEIIIQKVDEIYKVYGSSEKLFDADFVLEKSLKKNDAVVAIMKDLLDSVKSFENYIKAFFGEGKETNRDESFYGDFVLAYDILLKVDHIYDAIRNYVTQKPYSKDKFKLYFQNPQFMGGWDKDKETDYRATILRYGSKYYLAIMDKKYAKCLQKIDKDDVNGNYEKINYKLLPGPNKMLPKVFFSKKWMAYYNPSEDIQKIYKNGTFKKGDMFNLNDCHKLIDFFKDSISRYPKWSNAYDFNFSETEKYKDIAGFYREVEEQGYKVSFESASKKEVDKLVEEGKLYMFQIYNKDFSDKSHGTPNLHTMYFKLLFDENNHGQIRLSGGAELFMRRASLKKEELVVHPANSPIANKNPDNPKKTTTLSYDVYKDKRFSEDQYELHIPIAINKCPKNIFKINTEVRVLLKHDDNPYVIGIARGERNLLYIVVVDGKGNIVEQYSLNEIINNFNGIRIKTDYHSLLDKKEKERFEARQNWTSIENIKELKAGYISQVVHKICELVEKYDAVIALEDLNSGFKNSRVKVEKQVYQKFEKMLIDKLNYMVDKKSNPCATGGALKGYQITNKFESFKSMSTQNGFIFYIPAWLTSKIDPSTGFVNLLKTKYTSIADSKKFISSFDRIMYVPEEDLFEFALDYKNFSRTDADYIKKWKLYSYGNRIRIFRNPKKNNVFDWEEVCLTSAYKELFNKYGINYQQGDIRALLCEQSDKAFYSSFMALMSLMLQMRNSITGRTDVDFLISPVKNSDGIFYDSRNYEAQENAILPKNADANGAYNIARKVLWAIGQFKKAEDEKLDKVKIAISNKEWLEYAQTSVKH

SEQ ID NO: 98 - protein, 1337 aa, synthetic construct
SKLEKFTNCYSLSKTLRFKAIPVGKTQENIDNKRLLVEDEKRAEDYKGVKKLLDRYYLSFINDVLHSIKLKNLNNYISLFRKKTRTEKENKELENLEINLRKEIAKAFKGNEGYKSLFKKDIIETILPEFLDDKDEIALVNSFNGFTTAFTGFFDNRENMFSEEAKSTSIAFRCINENLTRYISNMDIFEKVDAIFDKHEVQEIKEKILNSDYDVEDFFEGEFFNFVLTQEGIDVYNAIIGGFVTESGEKIKGLNEYINLYNQKTKQKLPKFKPLYKQVLSDRESLSFYGEGSSGHKHRCQVCGIVIEVDVGPYSQGAHIRPLGRKHGGPDVESNMLCLCPNDHVRFDNGALYITDDLKVVNALNGEVIGPLRVHPRHVIDLDHIRYHRSQLPNIPLEGSSGYTSDEEVLEVFRNTLNKNSEIFSSIKKLEKLFKNFDEYSSAGIFVKNGPAISTISKDIFGEWNVIRDKWNAEYDDIHLKKKAVVTEKYEDDRRKSFKKIGSFSLEQLQEYADADLSVVEKLKEIIIQKVDEIYKVYGSSEKLFDADFVLEKSLKKNDAVVAIMKDLLDSVKSFENYIKAFFGEGKETNRDESFYGDFVLAYDILLKVDHIYDAIRNYVTQKPYSKDKFKLYFQNPQFMGGWDKDKETDYRATILRYGSKYYLAIMDKKYAKCLQKIDKDDVNGNYEKINYKLLPGPNKMLPKVFFSKKWMAYYNPSEDIQKIYKNGTFKKGDMFNLNDCHKLIDFFKDSISRYPKWSNAYDFNFSETEKYKDIAGFYREVEEQGYKVSFESASKKEVDKLVEEGKLYMFQIYNKDFSDKSHGTPNLHTMYFKLLFDENNHGQIRLSGGAELFMRRASLKKEELVVHPANSPIANKNPDNPKKTTTLSYDVYKDKRFSEDQYELHIPIAINKCPKNIFKINTEVRVLLKHDDNPYVIGIARGERNLLYIVVVDGKGNIVEQYSLNEIINNFNGIRIKTDYHSLLDKKEKERFEARQNWTSIENIKELKAGYISQVVHKICELVEKYDAVIALEDLNSGFKNSRVKVEKQVYQKFEKMLIDKLNYMVDKKSNPCATGGALKGYQITNKFESFKSMSTQNGFIFYIPAWLTSKIDPSTGFVNLLKTKYTSIADSKKFISSFDRIMYVPEEDLFEFALDYKNFSRTDADYIKKWKLYSYGNRIRIFRNPKKNNVFDWEEVCLTSAYKELFNKYGINYQQGDIRALLCEQSDKAFYSSFMALMSLMLQMRNSITGRTDVDFLISPVKNSDGIFYDSRNYEAQENAILPKNADANGAYNIARKVLWAIGQFKKAEDEKLDKVKIAISNKEWLEYAQTSVKH

SEQ ID NO: 99 - protein, 1393 aa, synthetic construct
SKLEKFTNCYSLSKTLRFKAIPVGKTQENIDNKRLLVEDEKRAEDYKGVKKLLDRYYLSFINDVLHSIKLKNLNNYISLFRKKTRTEKENKELENLEINLRKEIAKAFKGNEGYKSLFKKDIIETILPEFLDDKDEIALVNSFNGFTTAFTGFFDNRENMFSEEAKSTSIAFRCINENLTRYISNMDIFEKVDAIFDKHEVQEIKEKILNSDYDVEDFFEGEFFNFVLTQEGIDVYNAIIGGFVTESGEKIKGLNEYINLYNQKTKQKLPKFKPLYKQVLSDRESLSFYGEGSSGSEAEEVIFGFADTTEITTTADAIECQISNDASIDETEKHQLVKSRRGQGIFRSRLEQVESRCRVTGVQLKNHLIASHIKPWAVSNNQERLDGHNGLLLAPHVDHLFDKGFISFEDNGEMIVSEKLNLDVLKAWSISQGNYGYFSKQQQEYMCYHRENVFKKLGYTSDEEVLEVFRNTLNKNSEIFSSIKKLEKLFKNFDEYSSAGIFVKNGPAISTISKDIFGEWNVIRDKWNAEYDDIHLKKKAVVTEKYEDDRRKSFKKIGSFSLEQLQEYADADLSVVEKLKEIIIQKVDEIYKVYGSSEKLFDADFVLEKSLKKNDAVVAIMKDLLDSVKSFENYIKAFFGEGKETNRDESFYGDFVLAYDILLKVDHIYDAIRNYVTQKPYSKDKFKLYFQNPQFMGGWDKDKETDYRATILRYGSKYYLAIMDKKYAKCLQKIDKDDVNGNYEKINYKLLPGPNKMLPKVFFSKKWMAYYNPSEDIQKIYKNGTFKKGDMFNLNDCHKLIDFFKDSISRYPKWSNAYDFNFSETEKYKDIAGFYREVEEQGYKVSFESASKKEVDKLVEEGKLYMFQIYNKDFSDKSHGTPNLHTMYFKLLFDENNHGQIRLSGGAELFMRRASLKKEELVVHPANSPIANKNPDNPKKTTTLSYDVYKDKRFSEDQYELHIPIAINKCPKNIFKINTEVRVLLKHDDNPYVIGIARGERNLLYIVVVDGKGNIVEQYSLNEIINNFNGIRIKTDYHSLLDKKEKERFEARQNWTSIENIKELKAGYISQVVHKICELVEKYDAVIALEDLNSGFKNSRVKVEKQVYQKFEKMLIDKLNYMVDKKSNPCATGGALKGYQITNKFESFKSMSTQNGFIFYIPAWLTSKIDPSTGFVNLLKTKYTSIADSKKFISSFDRIMYVPEEDLFEFALDYKNFSRTDADYIKKWKLYSYGNRIRIFRNPKKNNVFDWEEVCLTSAYKELFNKYGINYQQGDIRALLCEQSDKAFYSSFMALMSLMLQMRNSITGRTDVDFLISPVKNSDGIFYDSRNYEAQENAILPKNADANGAYNIARKVLWAIGQFKKAEDEKLDKVKIAISNKEWLEYAQTSVKH

SEQ ID NO: 100 - protein, 1356 aa, synthetic construct
SKLEKFTNCYSLSKTLRFKAIPVGKTQENIDNKRLLVEDEKRAEDYKGVKKLLDRYYLSFINDVLHSIKLKNLNNYISLFRKKTRTEKENKELENLEINLRKEIAKAFKGNEGYKSLFKKDIIETILPEFLDDKDEIALVNSFNGFTTAFTGFFDNRENMFSEEAKSTSIAFRCINENLTRYISNMDIFEKVDAIFDKHEVQEIKEKILNSDYDVEDFFEGEFFNFVLTQEGIDVYNAIIGGFVTESGEKIKGLNEYINLYNQKTKQKLPKFKPLYKQVLSDRESLSFYGEGSSGDEPGVATGNGQPVTGNWLAGASQGDGVPIPSQIADQLRGKEFKSWRDFREQFWVAVANDPELVKYFRKTNAKGMRDGLSPFTPKAEQAGGRDKYEIHHVVQISQGGAVYDIDNLRVMTPKMHIQVGYTSDEEVLEVFRNTLNKNSEIFSSIKKLEKLFKNFDEYSSAGIFVKNGPAISTISKDIFGEWNVIRDKWNAEYDDIHLKKKAVVTEKYEDDRRKSFKKIGSFSLEQLQEYADADLSVVEKLKEIIIQKVDEIYKVYGSSEKLFDADFVLEKSLKKNDAVVAIMKDLLDSVKSFENYIKAFFGEGKETNRDESFYGDFVLAYDILLKVDHIYDAIRNYVTQKPYSKDKFKLYFQNPQFMGGWDKDKETDYRATILRYGSKYYLAIMDKKYAKCLQKIDKDDVNGNYEKINYKLLPGPNKMLPKVFFSKKWMAYYNPSEDIQKIYKNGTFKKGDMFNLNDCHKLIDFFKDSISRYPKWSNAYDFNFSETEKYKDIAGFYREVEEQGYKVSFESASKKEVDKLVEEGKLYMFQIYNKDFSDKSHGTPNLHTMYFKLLFDENNHGQIRLSGGAELFMRRASLKKEELVVHPANSPIANKNPDNPKKTTTLSYDVYKDKRFSEDQYELHIPIAINKCPKNIFKINTEVRVLLKHDDNPYVIGIARGERNLLYIVVVDGKGNIVEQYSLNEIINNFNGIRIKTDYHSLLDKKEKERFEARQNWTSIENIKELKAGYISQVVHKICELVEKYDAVIALEDLNSGFKNSRVKVEKQVYQKFEKMLIDKLNYMVDKKSNPCATGGALKGYQITNKFESFKSMSTQNGFIFYIPAWLTSKIDPSTGFVNLLKTKYTSIADSKKFISSFDRIMYVPEEDLFEFALDYKNFSRTDADYIKKWKLYSYGNRIRIFRNPKKNNVFDWEEVCLTSAYKELFNKYGINYQQGDIRALLCEQSDKAFYSSFMALMSLMLQMRNSITGRTDVDFLISPVKNSDGIFYDSRNYEAQENAILPKNADANGAYNIARKVLWAIGQFKKAEDEKLDKVKIAISNKEWLEYAQTSVKH

SEQ ID NO: 101 - protein, 1395 aa, synthetic construct
MSKLEKFTNCYSLSKTLRFKAIPVGKTQENIDNKRLLVEDEKRAEDYKGVKKLLDRYYLSFINDVLHSIKLKNLNNYISLFRKKTRTEKENKELENLEINLRKEIAKAFKGNEGYKSLFKKDIIETILPEFLDDKDEIALVNSFNGFTTAFTGFFDNRENMFSEEAKSTSIAFRCINENLTRYISNMDIFEKVDAIFDKHEVQEIKEKILNSDYDVEDFFEGEFFNFVLTQEGIDVYNAIIGGFVTESGGSSGSPENIFKDKNNRIKEFAKGISAYSGANLTDGDFDGAKEELDHIIPRSHKKYGTLNDEANLICVTRGDNKNKGNRIFCLRDLADNYKLKQFETTDDLEIEKKIADTIWDANKKDFKFGNYRSFINLTPQEQKAFRHALFLADENPIKQAVIRAINNRNRTGSSGEKIKGLNEYINLYNQKTKQKLPKFKPLYKQVLSDRESLSFYGEGYTSDEEVLEVFRNTLNKNSEIFSSIKKLEKLFKNFDEYSSAGIFVKNGPAISTISKDIFGEWNVIRDKWNAEYDDIHLKKKAVVTEKYEDDRRKSFKKIGSFSLEQLQEYADADLSVVEKLKEIIIQKVDEIYKVYGSSEKLFDADFVLEKSLKKNDAVVAIMKDLLDSVKSFENYIKAFFGEGKETNRDESFYGDFVLAYDILLKVDHIYDAIRNYVTQKPYSKDKFKLYFQNPQFMGGWDKDKETDYRATILRYGSKYYLAIMDKKYAKCLQKIDKDDVNGNYEKINYKLLPGPNKMLPKVFFSKKWMAYYNPSEDIQKIYKNGTFKKGDMFNLNDCHKLIDFFKDSISRYPKWSNAYDFNFSETEKYKDIAGFYREVEEQGYKVSFESASKKEVDKLVEEGKLYMFQIYNKDFSDKSHGTPNLHTMYFKLLFDENNHGQIRLSGGAELFMRRASLKKEELVVHPANSPIANKNPDNPKKTTTLSYDVYKDKRFSEDQYELHIPIAINKCPKNIFKINTEVRVLLKHDDNPYVIGIARGERNLLYIVVVDGKGNIVEQYSLNEIINNFNGIRIKTDYHSLLDKKEKERFEARQNWTSIENIKELKAGYISQVVHKICELVEKYDAVIALEDLNSGFKNSRVKVEKQVYQKFEKMLIDKLNYMVDKKSNPCATGGALKGYQITNKFESFKSMSTQNGFIFYIPAWLTSKIDPSTGFVNLLKTKYTSIADSKKFISSFDRIMYVPEEDLFEFALDYKNFSRTDADYIKKWKLYSYGNRIRIFRNPKKNNVFDWEEVCLTSAYKELFNKYGINYQQGDIRALLCEQSDKAFYSSFMALMSLMLQMRNSITGRTDVDFLISPVKNSDGIFYDSRNYEAQENAILPKNADANGAYNIARKVLWAIGQFKKAEDEKLDKVKIAISNKEWLEYAQTSVKH

SEQ ID NO: 102 - protein, 1361 aa, synthetic construct
MSKLEKFTNCYSLSKTLRFKAIPVGKTQENIDNKRLLVEDEKRAEDYKGVKKLLDRYYLSFINDVLHSIKLKNLNNYISLFRKKTRTEKENKELENLEINLRKEIAKAFKGNEGYKSLFKKDIIETILPEFLDDKDEIALVNSFNGFTTAFTGFFDNRENMFSEEAKSTSIAFRCINENLTRYISNMDIFEKVDAIFDKHEVQEIKEKILNSDYDVEDFFEGEFFNFVLTQEGIDVYNAIIGGFVTESGGSSGDEPGVATGNGQPVTGNWLAGASQGDGVPIPSQIADQLRGKEFKSWRDFREQFWVAVANDPELVKYFRKTNAKGMRDGLSPFTPKAEQAGGRDKYEIHHVVQISQGGAVYDIDNLRVMTPKMHIQVGSSGEKIKGLNEYINLYNQKTKQKLPKFKPLYKQVLSDRESLSFYGEGYTSDEEVLEVFRNTLNKNSEIFSSIKKLEKLFKNFDEYSSAGIFVKNGPAISTISKDIFGEWNVIRDKWNAEYDDIHLKKKAVVTEKYEDDRRKSFKKIGSFSLEQLQEYADADLSVVEKLKEIIIQKVDEIYKVYGSSEKLFDADFVLEKSLKKNDAVVAIMKDLLDSVKSFENYIKAFFGEGKETNRDESFYGDFVLAYDILLKVDHIYDAIRNYVTQKPYSKDKFKLYFQNPQFMGGWDKDKETDYRATILRYGSKYYLAIMDKKYAKCLQKIDKDDVNGNYEKINYKLLPGPNKMLPKVFFSKKWMAYYNPSEDIQKIYKNGTFKKGDMFNLNDCHKLIDFFKDSISRYPKWSNAYDFNFSETEKYKDIAGFYREVEEQGYKVSFESASKKEVDKLVEEGKLYMFQIYNKDFSDKSHGTPNLHTMYFKLLFDENNHGQIRLSGGAELFMRRASLKKEELVVHPANSPIANKNPDNPKKTTTLSYDVYKDKRFSEDQYELHIPIAINKCPKNIFKINTEVRVLLKHDDNPYVIGIARGERNLLYIVVVDGKGNIVEQYSLNEIINNFNGIRIKTDYHSLLDKKEKERFEARQNWTSIENIKELKAGYISQVVHKICELVEKYDAVIALEDLNSGFKNSRVKVEKQVYQKFEKMLIDKLNYMVDKKSNPCATGGALKGYQITNKFESFKSMSTQNGFIFYIPAWLTSKIDPSTGFVNLLKTKYTSIADSKKFISSFDRIMYVPEEDLFEFALDYKNFSRTDADYIKKWKLYSYGNRIRIFRNPKKNNVFDWEEVCLTSAYKELFNKYGINYQQGDIRALLCEQSDKAFYSSFMALMSLMLQMRNSITGRTDVDFLISPVKNSDGIFYDSRNYEAQENAILPKNADANGAYNIARKVLWAIGQFKKAEDEKLDKVKIAISNKEWLEYAQTSVKH

SEQ ID NO: 103 - protein, 1342 aa, synthetic construct
MSKLEKFTNCYSLSKTLRFKAIPVGKTQENIDNKRLLVEDEKRAEDYKGVKKLLDRYYLSFINDVLHSIKLKNLNNYISLFRKKTRTEKENKELENLEINLRKEIAKAFKGNEGYKSLFKKDIIETILPEFLDDKDEIALVNSFNGFTTAFTGFFDNRENMFSEEAKSTSIAFRCINENLTRYISNMDIFEKVDAIFDKHEVQEIKEKILNSDYDVEDFFEGEFFNFVLTQEGIDVYNAIIGGFVTESGGSSGHKHRCQVCGIVIEVDVGPYSQGAHIRPLGRKHGGPDVESNMLCLCPNDHVRFDNGALYITDDLKVVNALNGEVIGPLRVHPRHVIDLDHIRYHRSQLPNIPLEGSSGSSGEKIKGLNEYINLYNQKTKQKLPKFKPLYKQVLSDRESLSFYGEGYTSDEEVLEVFRNTLNKNSEIFSSIKKLEKLFKNFDEYSSAGIFVKNGPAISTISKDIFGEWNVIRDKWNAEYDDIHLKKKAVVTEKYEDDRRKSFKKIGSFSLEQLQEYADADLSVVEKLKEIIIQKVDEIYKVYGSSEKLFDADFVLEKSLKKNDAVVAIMKDLLDSVKSFENYIKAFFGEGKETNRDESFYGDFVLAYDILLKVDHIYDAIRNYVTQKPYSKDKFKLYFQNPQFMGGWDKDKETDYRATILRYGSKYYLAIMDKKYAKCLQKIDKDDVNGNYEKINYKLLPGPNKMLPKVFFSKKWMAYYNPSEDIQKIYKNGTFKKGDMFNLNDCHKLIDFFKDSISRYPKWSNAYDFNFSETEKYKDIAGFYREVEEQGYKVSFESASKKEVDKLVEEGKLYMFQIYNKDFSDKSHGTPNLHTMYFKLLFDENNHGQIRLSGGAELFMRRASLKKEELVVHPANSPIANKNPDNPKKTTTLSYDVYKDKRFSEDQYELHIPIAINKCPKNIFKINTEVRVLLKHDDNPYVIGIARGERNLLYIVVVDGKGNIVEQYSLNEIINNFNGIRIKTDYHSLLDKKEKERFEARQNWTSIENIKELKAGYISQVVHKICELVEKYDAVIALEDLNSGFKNSRVKVEKQVYQKFEKMLIDKLNYMVDKKSNPCATGGALKGYQITNKFESFKSMSTQNGFIFYIPAWLTSKIDPSTGFVNLLKTKYTSIADSKKFISSFDRIMYVPEEDLFEFALDYKNFSRTDADYIKKWKLYSYGNRIRIFRNPKKNNVFDWEEVCLTSAYKELFNKYGINYQQGDIRALLCEQSDKAFYSSFMALMSLMLQMRNSITGRTDVDFLISPVKNSDGIFYDSRNYEAQENAILPKNADANGAYNIARKVLWAIGQFKKAEDEKLDKVKIAISNKEWLEYAQTSVKH

SEQ ID NO: 104 - protein, 1398 aa, synthetic construct
MSKLEKFTNCYSLSKTLRFKAIPVGKTQENIDNKRLLVEDEKRAEDYKGVKKLLDRYYLSFINDVLHSIKLKNLNNYISLFRKKTRTEKENKELENLEINLRKEIAKAFKGNEGYKSLFKKDIIETILPEFLDDKDEIALVNSFNGFTTAFTGFFDNRENMFSEEAKSTSIAFRCINENLTRYISNMDIFEKVDAIFDKHEVQEIKEKILNSDYDVEDFFEGEFFNFVLTQEGIDVYNAIIGGFVTESGGSSGSEAEEVIFGFADTTEITTTADAIECQISNDASIDETEKHQLVKSRRGQGIFRSRLEQVESRCRVTGVQLKNHLIASHIKPWAVSNNQERLDGHNGLLLAPHVDHLFDKGFISFEDNGEMIVSEKLNLDVLKAWSISQGNYGYFSKQQQEYMCYHRENVFKKLGSSGEKIKGLNEYINLYNQKTKQKLPKFKPLYKQVLSDRESLSFYGEGYTSDEEVLEVFRNTLNKNSEIFSSIKKLEKLFKNFDEYSSAGIFVKNGPAISTISKDIFGEWNVIRDKWNAEYDDIHLKKKAVVTEKYEDDRRKSFKKIGSFSLEQLQEYADADLSVVEKLKEIIIQKVDEIYKVYGSSEKLFDADFVLEKSLKKNDAVVAIMKDLLDSVKSFENYIKAFFGEGKETNRDESFYGDFVLAYDILLKVDHIYDAIRNYVTQKPYSKDKFKLYFQNPQFMGGWDKDKETDYRATILRYGSKYYLAIMDKKYAKCLQKIDKDDVNGNYEKINYKLLPGPNKMLPKVFFSKKWMAYYNPSEDIQKIYKNGTFKKGDMFNLNDCHKLIDFFKDSISRYPKWSNAYDFNFSETEKYKDIAGFYREVEEQGYKVSFESASKKEVDKLVEEGKLYMFQIYNKDFSDKSHGTPNLHTMYFKLLFDENNHGQIRLSGGAELFMRRASLKKEELVVHPANSPIANKNPDNPKKTTTLSYDVYKDKRFSEDQYELHIPIAINKCPKNIFKINTEVRVLLKHDDNPYVIGIARGERNLLYIVVVDGKGNIVEQYSLNEIINNFNGIRIKTDYHSLLDKKEKERFEARQNWTSIENIKELKAGYISQVVHKICELVEKYDAVIALEDLNSGFKNSRVKVEKQVYQKFEKMLIDKLNYMVDKKSNPCATGGALKGYQITNKFESFKSMSTQNGFIFYIPAWLTSKIDPSTGFVNLLKTKYTSIADSKKFISSFDRIMYVPEEDLFEFALDYKNFSRTDADYIKKWKLYSYGNRIRIFRNPKKNNVFDWEEVCLTSAYKELFNKYGINYQQGDIRALLCEQSDKAFYSSFMALMSLMLQMRNSITGRTDVDFLISPVKNSDGIFYDSRNYEAQENAILPKNADANGAYNIARKVLWAIGQFKKAEDEKLDKVKIAISNKEWLEYAQTSVKH

SEQ ID NO: 105 - protein, 1352 aa, synthetic construct
MSKLEKFTNCYSLSKTLRFKAIPVGKTQENIDNKRLLVEDEKRAEDYKGVKKLLDRYYLSFINDVLHSIKLKNLNNYISLFRKKTRTEKENKELENLEINLRKEIAKAFKGNEGYKSLFKKDIIETILPEFLDDKDEIALVNSFNGFTTAFTGFFDNRENMFSEEAKSTSIAFRCINENLTRYISNMDIFEKVDAIFDKHEVQEIKEKILNSDYDVEDFFEGEFFNFVLTQEGIDVYNAIIGGFVTESGGSSGFPNFVGEPKSKDILKLRLYEQQHGKCLYSGKEINLGRLNEKGYVEIDHALPFSRTWDDSFNNKVLVLGSENQNKGNQTPYEYFNGKDNSREWQEFKARVETSRFPRSKKQRILLQKGSSGEKIKGLNEYINLYNQKTKQKLPKFKPLYKQVLSDRESLSFYGEGYTSDEEVLEVFRNTLNKNSEIFSSIKKLEKLFKNFDEYSSAGIFVKNGPAISTISKDIFGEWNVIRDKWNAEYDDIHLKKKAVVTEKYEDDRRKSFKKIGSFSLEQLQEYADADLSVVEKLKEIIIQKVDEIYKVYGSSEKLFDADFVLEKSLKKNDAVVAIMKDLLDSVKSFENYIKAFFGEGKETNRDESFYGDFVLAYDILLKVDHIYDAIRNYVTQKPYSKDKFKLYFQNPQFMGGWDKDKETDYRATILRYGSKYYLAIMDKKYAKCLQKIDKDDVNGNYEKINYKLLPGPNKMLPKVFFSKKWMAYYNPSEDIQKIYKNGTFKKGDMFNLNDCHKLIDFFKDSISRYPKWSNAYDFNFSETEKYKDIAGFYREVEEQGYKVSFESASKKEVDKLVEEGKLYMFQIYNKDFSDKSHGTPNLHTMYFKLLFDENNHGQIRLSGGAELFMRRASLKKEELVVHPANSPIANKNPDNPKKTTTLSYDVYKDKRFSEDQYELHIPIAINKCPKNIFKINTEVRVLLKHDDNPYVIGIARGERNLLYIVVVDGKGNIVEQYSLNEIINNFNGIRIKTDYHSLLDKKEKERFEARQNWTSIENIKELKAGYISQVVHKICELVEKYDAVIALEDLNSGFKNSRVKVEKQVYQKFEKMLIDKLNYMVDKKSNPCATGGALKGYQITNKFESFKSMSTQNGFIFYIPAWLTSKIDPSTGFVNLLKTKYTSIADSKKFISSFDRIMYVPEEDLFEFALDYKNFSRTDADYIKKWKLYSYGNRIRIFRNPKKNNVFDWEEVCLTSAYKELFNKYGINYQQGDIRALLCEQSDKAFYSSFMALMSLMLQMRNSITGRTDVDFLISPVKNSDGIFYDSRNYEAQENAILPKNADANGAYNIARKVLWAIGQFKKAEDEKLDKVKIAISNKEWLEYAQTSVKH

SEQ ID NO: 106 - protein, 1386 aa, synthetic construct
MSKLEKFTNCYSLSKTLRFKAIPVGKTQENIDNKRLLVEDEKRAEDYKGVKKLLDRYYLSFINDVLHSIKLKNLNNYISLFRKKTRTEKENKELENLEINLRKEIAKAFKGNEGYKSLFKKDIIETILPEFLDDKDEIALVNSFNGFTTAFTGFFDNRENMFSEEAKSTSIAFRCINENLTRYISNMDIFEKVDAIFDKHEVQEIKEKILNSDYDVEDFFEGEFFNFVLTQEGIDVYNAIIGGFVTESGGSSGENQYTNQGKSNSQQRLKRLEKSLKELGSKILKENIPAKLSKIDNNALQNDRLYLYYLQNGKDMYTGDDLDIDRLSNYDIDHIIPQAFLKDNSIDNKVLVSSASNRGKSDDFPSLEVVKKRKTFWYQLLKSKLISQRKFDNLTKAERGGLLGSSGEKIKGLNEYINLYNQKTKQKLPKFKPLYKQVLSDRESLSFYGEGYTSDEEVLEVFRNTLNKNSEIFSSIKKLEKLFKNFDEYSSAGIFVKNGPAISTISKDIFGEWNVIRDKWNAEYDDIHLKKKAVVTEKYEDDRRKSFKKIGSFSLEQLQEYADADLSVVEKLKEIIIQKVDEIYKVYGSSEKLFDADFVLEKSLKKNDAVVAIMKDLLDSVKSFENYIKAFFGEGKETNRDESFYGDFVLAYDILLKVDHIYDAIRNYVTQKPYSKDKFKLYFQNPQFMGGWDKDKETDYRATILRYGSKYYLAIMDKKYAKCLQKIDKDDVNGNYEKINYKLLPGPNKMLPKVFFSKKWMAYYNPSEDIQKIYKNGTFKKGDMFNLNDCHKLIDFFKDSISRYPKWSNAYDFNFSETEKYKDIAGFYREVEEQGYKVSFESASKKEVDKLVEEGKLYMFQIYNKDFSDKSHGTPNLHTMYFKLLFDENNHGQIRLSGGAELFMRRASLKKEELVVHPANSPIANKNPDNPKKTTTLSYDVYKDKRFSEDQYELHIPIAINKCPKNIFKINTEVRVLLKHDDNPYVIGIARGERNLLYIVVVDGKGNIVEQYSLNEIINNFNGIRIKTDYHSLLDKKEKERFEARQNWTSIENIKELKAGYISQVVHKICELVEKYDAVIALEDLNSGFKNSRVKVEKQVYQKFEKMLIDKLNYMVDKKSNPCATGGALKGYQITNKFESFKSMSTQNGFIFYIPAWLTSKIDPSTGFVNLLKTKYTSIADSKKFISSFDRIMYVPEEDLFEFALDYKNFSRTDADYIKKWKLYSYGNRIRIFRNPKKNNVFDWEEVCLTSAYKELFNKYGINYQQGDIRALLCEQSDKAFYSSFMALMSLMLQMRNSITGRTDVDFLISPVKNSDGIFYDSRNYEAQENAILPKNADANGAYNIARKVLWAIGQFKKAEDEKLDKVKIAISNKEWLEYAQTSVKH

SEQ ID NO: 107 - protein, 1340 aa, synthetic construct
MSKLEKFTNCYSLSKTLRFKAIPVGKTQENIDNKRLLVEDEKRAEDYKGVKKLLDRYYLSFINDVLHSIKLKNLNNYISLFRKKTRTEKENKELENLEINLRKEIAKAFKGNEGYKSLFKKDIIETILPEFLDDKDEIALVNSFNGFTTAFTGFFDNRENMFSEEAKSTSIAFRCINENLTRYISNMDIFEKVDAIFDKHEVQEIKEKILNSDYDVEDFFEGEFFNFVLTQEGIDVYNAIIGGFVTESGGSSGDGNAHTVNPSKLVSHRLGDGLTVQQIDRACTPALWCALTREKDFDEKNGLPAREDRAIRVHGHEIKSSDYIQVFSKRKKTDSDRDETPFGAIAVRGGFVEIGPSGSSGEKIKGLNEYINLYNQKTKQKLPKFKPLYKQVLSDRESLSFYGEGYTSDEEVLEVFRNTLNKNSEIFSSIKKLEKLFKNFDEYSSAGIFVKNGPAISTISKDIFGEWNVIRDKWNAEYDDIHLKKKAVVTEKYEDDRRKSFKKIGSFSLEQLQEYADADLSVVEKLKEIIIQKVDEIYKVYGSSEKLFDADFVLEKSLKKNDAVVAIMKDLLDSVKSFENYIKAFFGEGKETNRDESFYGDFVLAYDILLKVDHIYDAIRNYVTQKPYSKDKFKLYFQNPQFMGGWDKDKETDYRATILRYGSKYYLAIMDKKYAKCLQKIDKDDVNGNYEKINYKLLPGPNKMLPKVFFSKKWMAYYNPSEDIQKIYKNGTFKKGDMFNLNDCHKLIDFFKDSISRYPKWSNAYDFNFSETEKYKDIAGFYREVEEQGYKVSFESASKKEVDKLVEEGKLYMFQIYNKDFSDKSHGTPNLHTMYFKLLFDENNHGQIRLSGGAELFMRRASLKKEELVVHPANSPIANKNPDNPKKTTTLSYDVYKDKRFSEDQYELHIPIAINKCPKNIFKINTEVRVLLKHDDNPYVIGIARGERNLLYIVVVDGKGNIVEQYSLNEIINNFNGIRIKTDYHSLLDKKEKERFEARQNWTSIENIKELKAGYISQVVHKICELVEKYDAVIALEDLNSGFKNSRVKVEKQVYQKFEKMLIDKLNYMVDKKSNPCATGGALKGYQITNKFESFKSMSTQNGFIFYIPAWLTSKIDPSTGFVNLLKTKYTSIADSKKFISSFDRIMYVPEEDLFEFALDYKNFSRTDADYIKKWKLYSYGNRIRIFRNPKKNNVFDWEEVCLTSAYKELFNKYGINYQQGDIRALLCEQSDKAFYSSFMALMSLMLQMRNSITGRTDVDFLISPVKNSDGIFYDSRNYEAQENAILPKNADANGAYNIARKVLWAIGQFKKAEDEKLDKVKIAISNKEWLEYAQTSVKH

SEQ ID NO: 108 - protein, 1387 aa, synthetic construct
MSKLEKFTNCYSLSKTLRFKAIPVGKTQENIDNKRLLVEDEKRAEDYKGVKKLLDRYYLSFINDVLHSIKLKNLNNYISLFRKKTRTEKENKELENLEINLRKEIAKAFKGNEGYKSLFKKDIIETILPEFLDDKDEIALVNSFNGFTTAFTGFFDNRENMFSEEAKSTSIAFRCINENLTRYISNMDIFEKVDAIFDKHEVQEIKEKILNSDYDVEDFFEGEFFNFVLTQEGIDVYNAIIGGFVTESGGSSGEKNSKDAQKMINEMQKRNRQTNERIEEIIRTTGKENAKYLIEKIKLHDMQEGKCLYSLEAIPLEDLLNNPFNYEVDHIIPRSVSFDNSFNNKVLVKQEENSKKGNRTPFQYLSSSDSKISYETFKKHILNLAKGKGRISKTKKEYLLEERDGSSGEKIKGLNEYINLYNQKTKQKLPKFKPLYKQVLSDRESLSFYGEGYTSDEEVLEVFRNTLNKNSEIFSSIKKLEKLFKNFDEYSSAGIFVKNGPAISTISKDIFGEWNVIRDKWNAEYDDIHLKKKAVVTEKYEDDRRKSFKKIGSFSLEQLQEYADADLSVVEKLKEIIIQKVDEIYKVYGSSEKLFDADFVLEKSLKKNDAVVAIMKDLLDSVKSFENYIKAFFGEGKETNRDESFYGDFVLAYDILLKVDHIYDAIRNYVTQKPYSKDKFKLYFQNPQFMGGWDKDKETDYRATILRYGSKYYLAIMDKKYAKCLQKIDKDDVNGNYEKINYKLLPGPNKMLPKVFFSKKWMAYYNPSEDIQKIYKNGTFKKGDMFNLNDCHKLIDFFKDSISRYPKWSNAYDFNFSETEKYKDIAGFYREVEEQGYKVSFESASKKEVDKLVEEGKLYMFQIYNKDFSDKSHGTPNLHTMYFKLLFDENNHGQIRLSGGAELFMRRASLKKEELVVHPANSPIANKNPDNPKKTTTLSYDVYKDKRFSEDQYELHIPIAINKCPKNIFKINTEVRVLLKHDDNPYVIGIARGERNLLYIVVVDGKGNIVEQYSLNEIINNFNGIRIKTDYHSLLDKKEKERFEARQNWTSIENIKELKAGYISQVVHKICELVEKYDAVIALEDLNSGFKNSRVKVEKQVYQKFEKMLIDKLNYMVDKKSNPCATGGALKGYQITNKFESFKSMSTQNGFIFYIPAWLTSKIDPSTGFVNLLKTKYTSIADSKKFISSFDRIMYVPEEDLFEFALDYKNFSRTDADYIKKWKLYSYGNRIRIFRNPKKNNVFDWEEVCLTSAYKELFNKYGINYQQGDIRALLCEQSDKAFYSSFMALMSLMLQMRNSITGRTDVDFLISPVKNSDGIFYDSRNYEAQENAILPKNADANGAYNIARKVLWAIGQFKKAEDEKLDKVKIAISNKEWLEYAQTSVKH

SEQ ID NO: 109 - protein, 1485 aa, synthetic construct
MSKLEKFTNCYSLSKTLRFKAIPVGKTQENIDNKRLLVEDEKRAEDYKGVKKLLDRYYLSFINDVLHSIKLKNLNNYISLFRKKTRTEKENKELENLEINLRKEIAKAFKGNEGYKSLFKKDIIETILPEFLDDKDEIALVNSFNGFTTAFTGFFDNRENMFSEEAKSTSIAFRCINENLTRYISNMDIFEKVDAIFDKHEVQEIKEKILNSDYDVEDFFEGEFFNFVLTQEGIDVYNAIIGGFVTESGGSSGADLPALPGGPAGGTGELAKYGLPGVAQLRSRESYVLSYDPRTRGALWVLEQLRPERLRGDGDRSACDFREDDSVHAYHRATNADYRGSGFDRGHLAAAANHRWSQRAMDDTFYLSNVAPQVPHLNQNAWNNLERYSRSLTRTYQNVYVCTGPLFLPRTEADGKSYVKYQVIGKNHVAVPTHFFKVLILEAAGGQIELRSYVMPNAPVDETIPLERFLVPIESIERASGLLFVPNILARAGNLKAITAGSGSSGEKIKGLNEYINLYNQKTKQKLPKFKPLYKQVLSDRESLSFYGEGYTSDEEVLEVFRNTLNKNSEIFSSIKKLEKLFKNFDEYSSAGIFVKNGPAISTISKDIFGEWNVIRDKWNAEYDDIHLKKKAVVTEKYEDDRRKSFKKIGSFSLEQLQEYADADLSVVEKLKEIIIQKVDEIYKVYGSSEKLFDADFVLEKSLKKNDAVVAIMKDLLDSVKSFENYIKAFFGEGKETNRDESFYGDFVLAYDILLKVDHIYDAIRNYVTQKPYSKDKFKLYFQNPQFMGGWDKDKETDYRATILRYGSKYYLAIMDKKYAKCLQKIDKDDVNGNYEKINYKLLPGPNKMLPKVFFSKKWMAYYNPSEDIQKIYKNGTFKKGDMFNLNDCHKLIDFFKDSISRYPKWSNAYDFNFSETEKYKDIAGFYREVEEQGYKVSFESASKKEVDKLVEEGKLYMFQIYNKDFSDKSHGTPNLHTMYFKLLFDENNHGQIRLSGGAELFMRRASLKKEELVVHPANSPIANKNPDNPKKTTTLSYDVYKDKRFSEDQYELHIPIAINKCPKNIFKINTEVRVLLKHDDNPYVIGIARGERNLLYIVVVDGKGNIVEQYSLNEIINNFNGIRIKTDYHSLLDKKEKERFEARQNWTSIENIKELKAGYISQVVHKICELVEKYDAVIALEDLNSGFKNSRVKVEKQVYQKFEKMLIDKLNYMVDKKSNPCATGGALKGYQITNKFESFKSMSTQNGFIFYIPAWLTSKIDPSTGFVNLLKTKYTSIADSKKFISSFDRIMYVPEEDLFEFALDYKNFSRTDADYIKKWKLYSYGNRIRIFRNPKKNNVFDWEEVCLTSAYKELFNKYGINYQQGDIRALLCEQSDKAFYSSFMALMSLMLQMRNSITGRTDVDFLISPVKNSDGIFYDSRNYEAQENAILPKNADANGAYNIARKVLWAIGQFKKAEDEKLDKVKIAISNKEWLEYAQTSVKH

SEQ ID NO: 110 - protein, 1443 aa, synthetic construct
MSKLEKFTNCYSLSKTLRFKAIPVGKTQENIDNKRLLVEDEKRAEDYKGVKKLLDRYYLSFINDVLHSIKLKNLNNYISLFRKKTRTEKENKELENLEINLRKEIAKAFKGNEGYKSLFKKDIIETILPEFLDDKDEIALVNSFNGFTTAFTGFFDNRENMFSEEAKSTSIAFRCINENLTRYISNMDIFEKVDAIFDKHEVQEIKEKILNSDYDVEDFFEGEFFNFVLTQEGIDVYNAIIGGFVTESGGSSGSFSHAKNEAVKIYRDHPVSFYCGCEIRWQGKKGIPDLESCGYQVRKNENRASRIEWEHVVPAWQFGHQLQCWQQGGRKNCTRTSPEFNQMEADLHNLTPAIGEVNGDRSNFSFSQWNGVDGVTYGQCEMQVNFKERTAMPPERARGAIARTYLYMSEQYGLRLSKAQSQLMQAWNNQYPVSEWECVRDQRIEKVQGNSNRFVREQCPGSSGEKIKGLNEYINLYNQKTKQKLPKFKPLYKQVLSDRESLSFYGEGYTSDEEVLEVFRNTLNKNSEIFSSIKKLEKLFKNFDEYSSAGIFVKNGPAISTISKDIFGEWNVIRDKWNAEYDDIHLKKKAVVTEKYEDDRRKSFKKIGSFSLEQLQEYADADLSVVEKLKEIIIQKVDEIYKVYGSSEKLFDADFVLEKSLKKNDAVVAIMKDLLDSVKSFENYIKAFFGEGKETNRDESFYGDFVLAYDILLKVDHIYDAIRNYVTQKPYSKDKFKLYFQNPQFMGGWDKDKETDYRATILRYGSKYYLAIMDKKYAKCLQKIDKDDVNGNYEKINYKLLPGPNKMLPKVFFSKKWMAYYNPSEDIQKIYKNGTFKKGDMFNLNDCHKLIDFFKDSISRYPKWSNAYDFNFSETEKYKDIAGFYREVEEQGYKVSFESASKKEVDKLVEEGKLYMFQIYNKDFSDKSHGTPNLHTMYFKLLFDENNHGQIRLSGGAELFMRRASLKKEELVVHPANSPIANKNPDNPKKTTTLSYDVYKDKRFSEDQYELHIPIAINKCPKNIFKINTEVRVLLKHDDNPYVIGIARGERNLLYIVVVDGKGNIVEQYSLNEIINNFNGIRIKTDYHSLLDKKEKERFEARQNWTSIENIKELKAGYISQVVHKICELVEKYDAVIALEDLNSGFKNSRVKVEKQVYQKFEKMLIDKLNYMVDKKSNPCATGGALKGYQITNKFESFKSMSTQNGFIFYIPAWLTSKIDPSTGFVNLLKTKYTSIADSKKFISSFDRIMYVPEEDLFEFALDYKNFSRTDADYIKKWKLYSYGNRIRIFRNPKKNNVFDWEEVCLTSAYKELFNKYGINYQQGDIRALLCEQSDKAFYSSFMALMSLMLQMRNSITGRTDVDFLISPVKNSDGIFYDSRNYEAQENAILPKNADANGAYNIARKVLWAIGQFKKAEDEKLDKVKIAISNKEWLEYAQTSVKH

SEQ ID NO: 111 - protein, 1333 aa, synthetic construct
MSKLEKFTNCYSLSKTLRFKAIPVGKTQENIDNKRLLVEDEKRAEDYKGVKKLLDRYYLSFINDVLHSIKLKNLNNYISLFRKKTRTEKENKELENLEINLRKEIAKAFKGNEGYKSLFKKDIIETILPEFLDDKDEIALVNSFNGFTTAFTGFFDNRENMFSEEAKSTSIAFRCINENLTRYISNMDIFEKVDAIFDKHEVQEIKEKILNSDYDVEDFFEGEFFNFVLTQEGIDVYNAIIGGFVTESGGSSGMLLTGKLYKEEKQKFYDAQNGKCLICQRELNPDVQANHLDHDHELNGPKAGKVRGLLCNLCNAAEGQMKHKFNRSGLKGQGVDYLEWLENLLTYLKSGSSGEKIKGLNEYINLYNQKTKQKLPKFKPLYKQVLSDRESLSFYGEGYTSDEEVLEVFRNTLNKNSEIFSSIKKLEKLFKNFDEYSSAGIFVKNGPAISTISKDIFGEWNVIRDKWNAEYDDIHLKKKAVVTEKYEDDRRKSFKKIGSFSLEQLQEYADADLSVVEKLKEIIIQKVDEIYKVYGSSEKLFDADFVLEKSLKKNDAVVAIMKDLLDSVKSFENYIKAFFGEGKETNRDESFYGDFVLAYDILLKVDHIYDAIRNYVTQKPYSKDKFKLYFQNPQFMGGWDKDKETDYRATILRYGSKYYLAIMDKKYAKCLQKIDKDDVNGNYEKINYKLLPGPNKMLPKVFFSKKWMAYYNPSEDIQKIYKNGTFKKGDMFNLNDCHKLIDFFKDSISRYPKWSNAYDFNFSETEKYKDIAGFYREVEEQGYKVSFESASKKEVDKLVEEGKLYMFQIYNKDFSDKSHGTPNLHTMYFKLLFDENNHGQIRLSGGAELFMRRASLKKEELVVHPANSPIANKNPDNPKKTTTLSYDVYKDKRFSEDQYELHIPIAINKCPKNIFKINTEVRVLLKHDDNPYVIGIARGERNLLYIVVVDGKGNIVEQYSLNEIINNFNGIRIKTDYHSLLDKKEKERFEARQNWTSIENIKELKAGYISQVVHKICELVEKYDAVIALEDLNSGFKNSRVKVEKQVYQKFEKMLIDKLNYMVDKKSNPCATGGALKGYQITNKFESFKSMSTQNGFIFYIPAWLTSKIDPSTGFVNLLKTKYTSIADSKKFISSFDRIMYVPEEDLFEFALDYKNFSRTDADYIKKWKLYSYGNRIRIFRNPKKNNVFDWEEVCLTSAYKELFNKYGINYQQGDIRALLCEQSDKAFYSSFMALMSLMLQMRNSITGRTDVDFLISPVKNSDGIFYDSRNYEAQENAILPKNADANGAYNIARKVLWAIGQFKKAEDEKLDKVKIAISNKEWLEYAQTSVKH

SEQ ID NO: 112 - protein, 1322 aa, synthetic construct
MSKLEKFTNCYSLSKTLRFKAIPVGKTQENIDNKRLLVEDEKRAEDYKGVKKLLDRYYLSFINDVLHSIKLKNLNNYISLFRKKTRTEKENKELENLEINLRKEIAKAFKGNEGYKSLFKKDIIETILPEFLDDKDEIALVNSFNGFTTAFTGFFDNRENMFSEEAKSTSIAFRCINENLTRYISNMDIFEKVDAIFDKHEVQEIKEKILNSDYDVEDFFEGEFFNFVLTQEGIDVYNAIIGGFVTESGGSSGMELKHSISDYTEAEFLQLVTTICNADTSSEEELVKLVTHFEEMTEHPSGSDLIYYPKEGDDDSPSGIVNTVKQWRAANGKSGFKQGGSSGEKIKGLNEYINLYNQKTKQKLPKFKPLYKQVLSDRESLSFYGEGYTSDEEVLEVFRNTLNKNSEIFSSIKKLEKLFKNFDEYSSAGIFVKNGPAISTISKDIFGEWNVIRDKWNAEYDDIHLKKKAVVTEKYEDDRRKSFKKIGSFSLEQLQEYADADLSVVEKLKEIIIQKVDEIYKVYGSSEKLFDADFVLEKSLKKNDAVVAIMKDLLDSVKSFENYIKAFFGEGKETNRDESFYGDFVLAYDILLKVDHIYDAIRNYVTQKPYSKDKFKLYFQNPQFMGGWDKDKETDYRATILRYGSKYYLAIMDKKYAKCLQKIDKDDVNGNYEKINYKLLPGPNKMLPKVFFSKKWMAYYNPSEDIQKIYKNGTFKKGDMFNLNDCHKLIDFFKDSISRYPKWSNAYDFNFSETEKYKDIAGFYREVEEQGYKVSFESASKKEVDKLVEEGKLYMFQIYNKDFSDKSHGTPNLHTMYFKLLFDENNHGQIRLSGGAELFMRRASLKKEELVVHPANSPIANKNPDNPKKTTTLSYDVYKDKRFSEDQYELHIPIAINKCPKNIFKINTEVRVLLKHDDNPYVIGIARGERNLLYIVVVDGKGNIVEQYSLNEIINNFNGIRIKTDYHSLLDKKEKERFEARQNWTSIENIKELKAGYISQVVHKICELVEKYDAVIALEDLNSGFKNSRVKVEKQVYQKFEKMLIDKLNYMVDKKSNPCATGGALKGYQITNKFESFKSMSTQNGFIFYIPAWLTSKIDPSTGFVNLLKTKYTSIADSKKFISSFDRIMYVPEEDLFEFALDYKNFSRTDADYIKKWKLYSYGNRIRIFRNPKKNNVFDWEEVCLTSAYKELFNKYGINYQQGDIRALLCEQSDKAFYSSFMALMSLMLQMRNSITGRTDVDFLISPVKNSDGIFYDSRNYEAQENAILPKNADANGAYNIARKVLWAIGQFKKAEDEKLDKVKIAISNKEWLEYAQTSVKH

SEQ ID NO: 113 - protein, 1503 aa, synthetic construct
MSKLEKFTNCYSLSKTLRFKAIPVGKTQENIDNKRLLVEDEKRAEDYKGVKKLLDRYYLSFINDVLHSIKLKNLNNYISLFRKKTRTEKENKELENLEINLRKEIAKAFKGNEGYKSLFKKDIIETILPEFLDDKDEIALVNSFNGFTTAFTGFFDNRENMFSEEAKSTSIAFRCINENLTRYISNMDIFEKVDAIFDKHEVQEIKEKILNSDYDVEDFFEGEFFNFVLTQEGIDVYNAIIGGFVTESGGSSGWGNLGHETVAYIAQSFVASSTESFCQNILGDDSTSYLANVATWADTYKYTDAGEFSKPYHFIDAQDNPPQSCGVDYDRDCGSAGCSISAIQNYTNILLESPNGSEALNALKFVVHIIGDIHQPLHDENLEAGGNGIDVTYDGETTNLHHIWDTNMPEEAAGGYSLSVAKTYADLLTERIKTGTYSSKKDSWTDGIDIKDPVSTSMIWAADANTYVCSTVLDDGLAYINSTDLSGEYYDKSQPVFEELIAKAGYRLAAWLDLIASQPSGSSGEKIKGLNEYINLYNQKTKQKLPKFKPLYKQVLSDRESLSFYGEGYTSDEEVLEVFRNTLNKNSEIFSSIKKLEKLFKNFDEYSSAGIFVKNGPAISTISKDIFGEWNVIRDKWNAEYDDIHLKKKAVVTEKYEDDRRKSFKKIGSFSLEQLQEYADADLSVVEKLKEIIIQKVDEIYKVYGSSEKLFDADFVLEKSLKKNDAVVAIMKDLLDSVKSFENYIKAFFGEGKETNRDESFYGDFVLAYDILLKVDHIYDAIRNYVTQKPYSKDKFKLYFQNPQFMGGWDKDKETDYRATILRYGSKYYLAIMDKKYAKCLQKIDKDDVNGNYEKINYKLLPGPNKMLPKVFFSKKWMAYYNPSEDIQKIYKNGTFKKGDMFNLNDCHKLIDFFKDSISRYPKWSNAYDFNFSETEKYKDIAGFYREVEEQGYKVSFESASKKEVDKLVEEGKLYMFQIYNKDFSDKSHGTPNLHTMYFKLLFDENNHGQIRLSGGAELFMRRASLKKEELVVHPANSPIANKNPDNPKKTTTLSYDVYKDKRFSEDQYELHIPIAINKCPKNIFKINTEVRVLLKHDDNPYVIGIARGERNLLYIVVVDGKGNIVEQYSLNEIINNFNGIRIKTDYHSLLDKKEKERFEARQNWTSIENIKELKAGYISQVVHKICELVEKYDAVIALEDLNSGFKNSRVKVEKQVYQKFEKMLIDKLNYMVDKKSNPCATGGALKGYQITNKFESFKSMSTQNGFIFYIPAWLTSKIDPSTGFVNLLKTKYTSIADSKKFISSFDRIMYVPEEDLFEFALDYKNFSRTDADYIKKWKLYSYGNRIRIFRNPKKNNVFDWEEVCLTSAYKELFNKYGINYQQGDIRALLCEQSDKAFYSSFMALMSLMLQMRNSITGRTDVDFLISPVKNSDGIFYDSRNYEAQENAILPKNADANGAYNIARKVLWAIGQFKKAEDEKLDKVKIAISNKEWLEYAQTSVKH

SEQ ID NO: 114 - protein, 1506 aa, synthetic construct
MSKLEKFTNCYSLSKTLRFKAIPVGKTQENIDNKRLLVEDEKRAEDYKGVKKLLDRYYLSFINDVLHSIKLKNLNNYISLFRKKTRTEKENKELENLEINLRKEIAKAFKGNEGYKSLFKKDIIETILPEFLDDKDEIALVNSFNGFTTAFTGFFDNRENMFSEEAKSTSIAFRCINENLTRYISNMDIFEKVDAIFDKHEVQEIKEKILNSDYDVEDFFEGEFFNFVLTQEGIDVYNAIIGGFVTESGGSSGWGALGHATVAYVAQHYVSPEAASWAQGILGSSSSSYLASIASWADEYRLTSAGKWSASLHFIDAEDNPPTNCNVDYERDCGSSGCSISAIANYTQRVSDSSLSSENHAEALRFLVHFIGDMTQPLHDEAYAVGGNKINVTFDGYHDNLHSDWDTYMPQKLIGGHALSDAESWAKTLVQNIESGNYTAQAIGWIKGDNISEPITTATRWASDANALVCTVVMPHGAAALQTGDLYPTYYDSVIDTIELQIAKGGYRLANWINEIHGSEIAKGSSGEKIKGLNEYINLYNQKTKQKLPKFKPLYKQVLSDRESLSFYGEGYTSDEEVLEVFRNTLNKNSEIFSSIKKLEKLFKNFDEYSSAGIFVKNGPAISTISKDIFGEWNVIRDKWNAEYDDIHLKKKAVVTEKYEDDRRKSFKKIGSFSLEQLQEYADADLSVVEKLKEIIIQKVDEIYKVYGSSEKLFDADFVLEKSLKKNDAVVAIMKDLLDSVKSFENYIKAFFGEGKETNRDESFYGDFVLAYDILLKVDHIYDAIRNYVTQKPYSKDKFKLYFQNPQFMGGWDKDKETDYRATILRYGSKYYLAIMDKKYAKCLQKIDKDDVNGNYEKINYKLLPGPNKMLPKVFFSKKWMAYYNPSEDIQKIYKNGTFKKGDMFNLNDCHKLIDFFKDSISRYPKWSNAYDFNFSETEKYKDIAGFYREVEEQGYKVSFESASKKEVDKLVEEGKLYMFQIYNKDFSDKSHGTPNLHTMYFKLLFDENNHGQIRLSGGAELFMRRASLKKEELVVHPANSPIANKNPDNPKKTTTLSYDVYKDKRFSEDQYELHIPIAINKCPKNIFKINTEVRVLLKHDDNPYVIGIARGERNLLYIVVVDGKGNIVEQYSLNEIINNFNGIRIKTDYHSLLDKKEKERFEARQNWTSIENIKELKAGYISQVVHKICELVEKYDAVIALEDLNSGFKNSRVKVEKQVYQKFEKMLIDKLNYMVDKKSNPCATGGALKGYQITNKFESFKSMSTQNGFIFYIPAWLTSKIDPSTGFVNLLKTKYTSIADSKKFISSFDRIMYVPEEDLFEFALDYKNFSRTDADYIKKWKLYSYGNRIRIFRNPKKNNVFDWEEVCLTSAYKELFNKYGINYQQGDIRALLCEQSDKAFYSSFMALMSLMLQMRNSITGRTDVDFLISPVKNSDGIFYDSRNYEAQENAILPKNADANGAYNIARKVLWAIGQFKKAEDEKLDKVKIAISNKEWLEYAQTSVKH

SEQ ID NO: 115 - protein, 1341 aa, synthetic construct
MSKLEKFTNCYSLSKTLRFKAIPVGKTQENIDNKRLLVEDEKRAEDYKGVKKLLDRYYLSFINDVLHSIKLKNLNNYISLFRKKTRTEKENKELENLEINLRKEIAKAFKGNEGYKSLFKKDIIETILPEFLDDKDEIALVNSFNGFTTAFTGFFDNRENMFSEEAKSTSIAFRCINENLTRYISNMDIFEKVDAIFDKHEVQEIKEKILNSDYDVEDFFEGEFFNFVLTQEGIDVYNAIIGGFVTESGGSSGMEWKDIKGYEGHYQVSNTGEVYSIKSGKTLKHQIPKDGYHRIGLFKGGKGKTFQVHRLVAIHFCEGYEEGLVVDHKDGNKDNNLSTNLRWVTQKINVENQMSRGTGSSGEKIKGLNEYINLYNQKTKQKLPKFKPLYKQVLSDRESLSFYGEGYTSDEEVLEVFRNTLNKNSEIFSSIKKLEKLFKNFDEYSSAGIFVKNGPAISTISKDIFGEWNVIRDKWNAEYDDIHLKKKAVVTEKYEDDRRKSFKKIGSFSLEQLQEYADADLSVVEKLKEIIIQKVDEIYKVYGSSEKLFDADFVLEKSLKKNDAVVAIMKDLLDSVKSFENYIKAFFGEGKETNRDESFYGDFVLAYDILLKVDHIYDAIRNYVTQKPYSKDKFKLYFQNPQFMGGWDKDKETDYRATILRYGSKYYLAIMDKKYAKCLQKIDKDDVNGNYEKINYKLLPGPNKMLPKVFFSKKWMAYYNPSEDIQKIYKNGTFKKGDMFNLNDCHKLIDFFKDSISRYPKWSNAYDFNFSETEKYKDIAGFYREVEEQGYKVSFESASKKEVDKLVEEGKLYMFQIYNKDFSDKSHGTPNLHTMYFKLLFDENNHGQIRLSGGAELFMRRASLKKEELVVHPANSPIANKNPDNPKKTTTLSYDVYKDKRFSEDQYELHIPIAINKCPKNIFKINTEVRVLLKHDDNPYVIGIARGERNLLYIVVVDGKGNIVEQYSLNEIINNFNGIRIKTDYHSLLDKKEKERFEARQNWTSIENIKELKAGYISQVVHKICELVEKYDAVIALEDLNSGFKNSRVKVEKQVYQKFEKMLIDKLNYMVDKKSNPCATGGALKGYQITNKFESFKSMSTQNGFIFYIPAWLTSKIDPSTGFVNLLKTKYTSIADSKKFISSFDRIMYVPEEDLFEFALDYKNFSRTDADYIKKWKLYSYGNRIRIFRNPKKNNVFDWEEVCLTSAYKELFNKYGINYQQGDIRALLCEQSDKAFYSSFMALMSLMLQMRNSITGRTDVDFLISPVKNSDGIFYDSRNYEAQENAILPKNADANGAYNIARKVLWAIGQFKKAEDEKLDKVKIAISNKEWLEYAQTSVKH

SEQ ID NO: 116 - protein, 1346 aa, synthetic construct
MSKLEKFTNCYSLSKTLRFKAIPVGKTQENIDNKRLLVEDEKRAEDYKGVKKLLDRYYLSFINDVLHSIKLKNLNNYISLFRKKTRTEKENKELENLEINLRKEIAKAFKGNEGYKSLFKKDIIETILPEFLDDKDEIALVNSFNGFTTAFTGFFDNRENMFSEEAKSTSIAFRCINENLTRYISNMDIFEKVDAIFDKHEVQEIKEKILNSDYDVEDFFEGEFFNFVLTQEGIDVYNAIIGGFVTESGGSSGGRTPTAEERRIANALGALPCIACYMHGVISNEVSLHHIAGRTAPGCHKKQLPLCRWHHQHAAPAEVREKYPWLVPVHADGVVGGKKEFTLLNKSEMELLADAYEMANIMHGSSGEKIKGLNEYINLYNQKTKQKLPKFKPLYKQVLSDRESLSFYGEGYTSDEEVLEVFRNTLNKNSEIFSSIKKLEKLFKNFDEYSSAGIFVKNGPAISTISKDIFGEWNVIRDKWNAEYDDIHLKKKAVVTEKYEDDRRKSFKKIGSFSLEQLQEYADADLSVVEKLKEIIIQKVDEIYKVYGSSEKLFDADFVLEKSLKKNDAVVAIMKDLLDSVKSFENYIKAFFGEGKETNRDESFYGDFVLAYDILLKVDHIYDAIRNYVTQKPYSKDKFKLYFQNPQFMGGWDKDKETDYRATILRYGSKYYLAIMDKKYAKCLQKIDKDDVNGNYEKINYKLLPGPNKMLPKVFFSKKWMAYYNPSEDIQKIYKNGTFKKGDMFNLNDCHKLIDFFKDSISRYPKWSNAYDFNFSETEKYKDIAGFYREVEEQGYKVSFESASKKEVDKLVEEGKLYMFQIYNKDFSDKSHGTPNLHTMYFKLLFDENNHGQIRLSGGAELFMRRASLKKEELVVHPANSPIANKNPDNPKKTTTLSYDVYKDKRFSEDQYELHIPIAINKCPKNIFKINTEVRVLLKHDDNPYVIGIARGERNLLYIVVVDGKGNIVEQYSLNEIINNFNGIRIKTDYHSLLDKKEKERFEARQNWTSIENIKELKAGYISQVVHKICELVEKYDAVIALEDLNSGFKNSRVKVEKQVYQKFEKMLIDKLNYMVDKKSNPCATGGALKGYQITNKFESFKSMSTQNGFIFYIPAWLTSKIDPSTGFVNLLKTKYTSIADSKKFISSFDRIMYVPEEDLFEFALDYKNFSRTDADYIKKWKLYSYGNRIRIFRNPKKNNVFDWEEVCLTSAYKELFNKYGINYQQGDIRALLCEQSDKAFYSSFMALMSLMLQMRNSITGRTDVDFLISPVKNSDGIFYDSRNYEAQENAILPKNADANGAYNIARKVLWAIGQFKKAEDEKLDKVKIAISNKEWLEYAQTSVKH

SEQ ID NO: 117 - protein, 1513 aa, synthetic construct
MSKLEKFTNCYSLSKTLRFKAIPVGKTQENIDNKRLLVEDEKRAEDYKGVKKLLDRYYLSFINDVLHSIKLKNLNNYISLFRKKTRTEKENKELENLEINLRKEIAKAFKGNEGYKSLFKKDIIETILPEFLDDKDEIALVNSFNGFTTAFTGFFDNRENMFSEEAKSTSIAFRCINENLTRYISNMDIFEKVDAIFDKHEVQEIKEKILNSDYDVEDFFEGEFFNFVLTQEGIDVYNAIIGGFVTESGGSSGWSKEGHVMTCRIAQGLLNDEAAHAVKMLLPEYVNGDLSALCVWPDQVRHWYKYKWTSPLHFIDTPDKACNFDYERDCHDQHGVKDMCVAGAIQNFTTQLSHYREGTSDRRYNMTEALLFLSHFMGDIHQPMHVGFTSDAGGNSIDLRWFRHKSNLHHVWDREIILTAAKDYYAKDINLLEEDIEGNFTDGIWSDDLASWRECGNVFSCVNKFATESINIACKWGYKGVEAGETLSDDYFNSRLPIVMKRVAQGGIRLAMLLNNVFGASQQEDSVVATGSSGEKIKGLNEYINLYNQKTKQKLPKFKPLYKQVLSDRESLSFYGEGYTSDEEVLEVFRNTLNKNSEIFSSIKKLEKLFKNFDEYSSAGIFVKNGPAISTISKDIFGEWNVIRDKWNAEYDDIHLKKKAVVTEKYEDDRRKSFKKIGSFSLEQLQEYADADLSVVEKLKEIIIQKVDEIYKVYGSSEKLFDADFVLEKSLKKNDAVVAIMKDLLDSVKSFENYIKAFFGEGKETNRDESFYGDFVLAYDILLKVDHIYDAIRNYVTQKPYSKDKFKLYFQNPQFMGGWDKDKETDYRATILRYGSKYYLAIMDKKYAKCLQKIDKDDVNGNYEKINYKLLPGPNKMLPKVFFSKKWMAYYNPSEDIQKIYKNGTFKKGDMFNLNDCHKLIDFFKDSISRYPKWSNAYDFNFSETEKYKDIAGFYREVEEQGYKVSFESASKKEVDKLVEEGKLYMFQIYNKDFSDKSHGTPNLHTMYFKLLFDENNHGQIRLSGGAELFMRRASLKKEELVVHPANSPIANKNPDNPKKTTTLSYDVYKDKRFSEDQYELHIPIAINKCPKNIFKINTEVRVLLKHDDNPYVIGIARGERNLLYIVVVDGKGNIVEQYSLNEIINNFNGIRIKTDYHSLLDKKEKERFEARQNWTSIENIKELKAGYISQVVHKICELVEKYDAVIALEDLNSGFKNSRVKVEKQVYQKFEKMLIDKLNYMVDKKSNPCATGGALKGYQITNKFESFKSMSTQNGFIFYIPAWLTSKIDPSTGFVNLLKTKYTSIADSKKFISSFDRIMYVPEEDLFEFALDYKNFSRTDADYIKKWKLYSYGNRIRIFRNPKKNNVFDWEEVCLTSAYKELFNKYGINYQQGDIRALLCEQSDKAFYSSFMALMSLMLQMRNSITGRTDVDFLISPVKNSDGIFYDSRNYEAQENAILPKNADANGAYNIARKVLWAIGQFKKAEDEKLDKVKIAISNKEWLEYAQTSVKH

SEQ ID NO: 118 - protein, 1446 aa, synthetic construct
MSKLEKFTNCYSLSKTLRFKAIPVGKTQENIDNKRLLVEDEKRAEDYKGVKKLLDRYYLSFINDVLHSIKLKNLNNYISLFRKKTRTEKENKELENLEINLRKEIAKAFKGNEGYKSLFKKDIIETILPEFLDDKDEIALVNSFNGFTTAFTGFFDNRENMFSEEAKSTSIAFRCINENLTRYISNMDIFEKVDAIFDKHEVQEIKEKILNSDYDVEDFFEGEFFNFVLTQEGIDVYNAIIGGFVTESGGSSGPPSSFSKAKKEAVKIYLDYPTSFYCGCDITWKNKKKGIPELESCGYQVRKQEKRASRIEWEHVVPAWQFGHQRQCWQKGGRKNCTRNDKQFKSMEADLHNLVPAIGEVNGDRSNFRFSQWNGSKGAFYGQCAFKVDFKGRVAEPPAQSRGAIARTYLYMNNEYKFNLSKAQRQLMEAWNKQYPVSTWECTRDERIAKIQGNHNQFVYKACGSSGEKIKGLNEYINLYNQKTKQKLPKFKPLYKQVLSDRESLSFYGEGYTSDEEVLEVFRNTLNKNSEIFSSIKKLEKLFKNFDEYSSAGIFVKNGPAISTISKDIFGEWNVIRDKWNAEYDDIHLKKKAVVTEKYEDDRRKSFKKIGSFSLEQLQEYADADLSVVEKLKEIIIQKVDEIYKVYGSSEKLFDADFVLEKSLKKNDAVVAIMKDLLDSVKSFENYIKAFFGEGKETNRDESFYGDFVLAYDILLKVDHIYDAIRNYVTQKPYSKDKFKLYFQNPQFMGGWDKDKETDYRATILRYGSKYYLAIMDKKYAKCLQKIDKDDVNGNYEKINYKLLPGPNKMLPKVFFSKKWMAYYNPSEDIQKIYKNGTFKKGDMFNLNDCHKLIDFFKDSISRYPKWSNAYDFNFSETEKYKDIAGFYREVEEQGYKVSFESASKKEVDKLVEEGKLYMFQIYNKDFSDKSHGTPNLHTMYFKLLFDENNHGQIRLSGGAELFMRRASLKKEELVVHPANSPIANKNPDNPKKTTTLSYDVYKDKRFSEDQYELHIPIAINKCPKNIFKINTEVRVLLKHDDNPYVIGIARGERNLLYIVVVDGKGNIVEQYSLNEIINNFNGIRIKTDYHSLLDKKEKERFEARQNWTSIENIKELKAGYISQVVHKICELVEKYDAVIALEDLNSGFKNSRVKVEKQVYQKFEKMLIDKLNYMVDKKSNPCATGGALKGYQITNKFESFKSMSTQNGFIFYIPAWLTSKIDPSTGFVNLLKTKYTSIADSKKFISSFDRIMYVPEEDLFEFALDYKNFSRTDADYIKKWKLYSYGNRIRIFRNPKKNNVFDWEEVCLTSAYKELFNKYGINYQQGDIRALLCEQSDKAFYSSFMALMSLMLQMRNSITGRTDVDFLISPVKNSDGIFYDSRNYEAQENAILPKNADANGAYNIARKVLWAIGQFKKAEDEKLDKVKIAISNKEWLEYAQTSVKH

SEQ ID NO: 119 - protein, 1304 aa, synthetic construct
MSKLEKFTNCYSLSKTLRFKAIPVGKTQENIDNKRLLVEDEKRAEDYKGVKKLLDRYYLSFINDVLHSIKLKNLNNYISLFRKKTRTEKENKELENLEINLRKEIAKAFKGNEGYKSLFKKDIIETILPEFLDDKDEIALVNSFNGFTTAFTGFFDNRENMFSEEAKSTSIAFRCINENLTRYISNMDIFEKVDAIFDKHEVQEIKEKILNSDYDVEDFFEGEFFNFVLTQEGIDVYNAIIGGFVTESGGSSGRLREQALMRDKGLCLHCKNNRKIKVADMVDHIIPIKVDPSLKLKLENLQSLCNPCHNRKTAEDKKKYGGSSGEKIKGLNEYINLYNQKTKQKLPKFKPLYKQVLSDRESLSFYGEGYTSDEEVLEVFRNTLNKNSEIFSSIKKLEKLFKNFDEYSSAGIFVKNGPAISTISKDIFGEWNVIRDKWNAEYDDIHLKKKAVVTEKYEDDRRKSFKKIGSFSLEQLQEYADADLSVVEKLKEIIIQKVDEIYKVYGSSEKLFDADFVLEKSLKKNDAVVAIMKDLLDSVKSFENYIKAFFGEGKETNRDESFYGDFVLAYDILLKVDHIYDAIRNYVTQKPYSKDKFKLYFQNPQFMGGWDKDKETDYRATILRYGSKYYLAIMDKKYAKCLQKIDKDDVNGNYEKINYKLLPGPNKMLPKVFFSKKWMAYYNPSEDIQKIYKNGTFKKGDMFNLNDCHKLIDFFKDSISRYPKWSNAYDFNFSETEKYKDIAGFYREVEEQGYKVSFESASKKEVDKLVEEGKLYMFQIYNKDFSDKSHGTPNLHTMYFKLLFDENNHGQIRLSGGAELFMRRASLKKEELVVHPANSPIANKNPDNPKKTTTLSYDVYKDKRFSEDQYELHIPIAINKCPKNIFKINTEVRVLLKHDDNPYVIGIARGERNLLYIVVVDGKGNIVEQYSLNEIINNFNGIRIKTDYHSLLDKKEKERFEARQNWTSIENIKELKAGYISQVVHKICELVEKYDAVIALEDLNSGFKNSRVKVEKQVYQKFEKMLIDKLNYMVDKKSNPCATGGALKGYQITNKFESFKSMSTQNGFIFYIPAWLTSKIDPSTGFVNLLKTKYTSIADSKKFISSFDRIMYVPEEDLFEFALDYKNFSRTDADYIKKWKLYSYGNRIRIFRNPKKNNVFDWEEVCLTSAYKELFNKYGINYQQGDIRALLCEQSDKAFYSSFMALMSLMLQMRNSITGRTDVDFLISPVKNSDGIFYDSRNYEAQENAILPKNADANGAYNIARKVLWAIGQFKKAEDEKLDKVKIAISNKEWLEYAQTSVKH

SEQ ID NO: 120 - protein, 1356 aa, synthetic construct
MSKLEKFTNCYSLSKTLRFKAIPVGKTQENIDNKRLLVEDEKRAEDYKGVKKLLDRYYLSFINDVLHSIKLKNLNNYISLFRKKTRTEKENKELENLEINLRKEIAKAFKGNEGYKSLFKKDIIETILPEFLDDKDEIALVNSFNGFTTAFTGFFDNRENMFSEEAKSTSIAFRCINENLTRYISNMDIFEKVDAIFDKHEVQEIKEKILNSDYDVEDFFEGEFFNFVLTQEGIDVYNAIIGGFVTESGGSSGSNNSYLRAKVFETEHGVCQLCNVNAQELFLRLRDAPKSQRKNLLYATWTSKLPLEQLNEMIRNPGEGHFWQVDHIKPVYGGGGQCSLDNLQTLCTVCHKERTARQAKERSQVRRQSLASKGSSGEKIKGLNEYINLYNQKTKQKLPKFKPLYKQVLSDRESLSFYGEGYTSDEEVLEVFRNTLNKNSEIFSSIKKLEKLFKNFDEYSSAGIFVKNGPAISTISKDIFGEWNVIRDKWNAEYDDIHLKKKAVVTEKYEDDRRKSFKKIGSFSLEQLQEYADADLSVVEKLKEIIIQKVDEIYKVYGSSEKLFDADFVLEKSLKKNDAVVAIMKDLLDSVKSFENYIKAFFGEGKETNRDESFYGDFVLAYDILLKVDHIYDAIRNYVTQKPYSKDKFKLYFQNPQFMGGWDKDKETDYRATILRYGSKYYLAIMDKKYAKCLQKIDKDDVNGNYEKINYKLLPGPNKMLPKVFFSKKWMAYYNPSEDIQKIYKNGTFKKGDMFNLNDCHKLIDFFKDSISRYPKWSNAYDFNFSETEKYKDIAGFYREVEEQGYKVSFESASKKEVDKLVEEGKLYMFQIYNKDFSDKSHGTPNLHTMYFKLLFDENNHGQIRLSGGAELFMRRASLKKEELVVHPANSPIANKNPDNPKKTTTLSYDVYKDKRFSEDQYELHIPIAINKCPKNIFKINTEVRVLLKHDDNPYVIGIARGERNLLYIVVVDGKGNIVEQYSLNEIINNFNGIRIKTDYHSLLDKKEKERFEARQNWTSIENIKELKAGYISQVVHKICELVEKYDAVIALEDLNSGFKNSRVKVEKQVYQKFEKMLIDKLNYMVDKKSNPCATGGALKGYQITNKFESFKSMSTQNGFIFYIPAWLTSKIDPSTGFVNLLKTKYTSIADSKKFISSFDRIMYVPEEDLFEFALDYKNFSRTDADYIKKWKLYSYGNRIRIFRNPKKNNVFDWEEVCLTSAYKELFNKYGINYQQGDIRALLCEQSDKAFYSSFMALMSLMLQMRNSITGRTDVDFLISPVKNSDGIFYDSRNYEAQENAILPKNADANGAYNIARKVLWAIGQFKKAEDEKLDKVKIAISNKEWLEYAQTSVKH

SEQ ID NO: 121 - protein, 1403 aa, synthetic construct
MSKLEKFTNCYSLSKTLRFKAIPVGKTQENIDNKRLLVEDEKRAEDYKGVKKLLDRYYLSFINDVLHSIKLKNLNNYISLFRKKTRTEKENKELENLEINLRKEIAKAFKGNEGYKSLFKKDIIETILPEFLDDKDEIALVNSFNGFTTAFTGFFDNRENMFSEEAKSTSIAFRCINENLTRYISNMDIFEKVDAIFDKHEVQEIKEKILNSDYDVEDFFEGEFFNFVLTQEGIDVYNAIIGGFVTESGGSSGVREGFVTEKRAREMDGDMRRRAARNAKLFQEMQEKLNVQGKPSRADLWRYQSVQRQNCQCAYCGSPITFSNSEMDHIVPRAGQGSTNTRENLVAVCHRCNQSKGNTPFAIWAKNTSIEGVSVKEAVERTRHWVTDTGMRSTDFKKFTKAVVERFQRATMDEEIDARSGSSGEKIKGLNEYINLYNQKTKQKLPKFKPLYKQVLSDRESLSFYGEGYTSDEEVLEVFRNTLNKNSEIFSSIKKLEKLFKNFDEYSSAGIFVKNGPAISTISKDIFGEWNVIRDKWNAEYDDIHLKKKAVVTEKYEDDRRKSFKKIGSFSLEQLQEYADADLSVVEKLKEIIIQKVDEIYKVYGSSEKLFDADFVLEKSLKKNDAVVAIMKDLLDSVKSFENYIKAFFGEGKETNRDESFYGDFVLAYDILLKVDHIYDAIRNYVTQKPYSKDKFKLYFQNPQFMGGWDKDKETDYRATILRYGSKYYLAIMDKKYAKCLQKIDKDDVNGNYEKINYKLLPGPNKMLPKVFFSKKWMAYYNPSEDIQKIYKNGTFKKGDMFNLNDCHKLIDFFKDSISRYPKWSNAYDFNFSETEKYKDIAGFYREVEEQGYKVSFESASKKEVDKLVEEGKLYMFQIYNKDFSDKSHGTPNLHTMYFKLLFDENNHGQIRLSGGAELFMRRASLKKEELVVHPANSPIANKNPDNPKKTTTLSYDVYKDKRFSEDQYELHIPIAINKCPKNIFKINTEVRVLLKHDDNPYVIGIARGERNLLYIVVVDGKGNIVEQYSLNEIINNFNGIRIKTDYHSLLDKKEKERFEARQNWTSIENIKELKAGYISQVVHKICELVEKYDAVIALEDLNSGFKNSRVKVEKQVYQKFEKMLIDKLNYMVDKKSNPCATGGALKGYQITNKFESFKSMSTQNGFIFYIPAWLTSKIDPSTGFVNLLKTKYTSIADSKKFISSFDRIMYVPEEDLFEFALDYKNFSRTDADYIKKWKLYSYGNRIRIFRNPKKNNVFDWEEVCLTSAYKELFNKYGINYQQGDIRALLCEQSDKAFYSSFMALMSLMLQMRNSITGRTDVDFLISPVKNSDGIFYDSRNYEAQENAILPKNADANGAYNIARKVLWAIGQFKKAEDEKLDKVKIAISNKEWLEYAQTSVKH

SEQ ID NO: 122 - protein, 1380 aa, synthetic construct
MSKLEKFTNCYSLSKTLRFKAIPVGKTQENIDNKRLLVEDEKRAEDYKGVKKLLDRYYLSFINDVLHSIKLKNLNNYISLFRKKTRTEKENKELENLEINLRKEIAKAFKGNEGYKSLFKKDIIETILPEFLDDKDEIALVNSFNGFTTAFTGFFDNRENMFSEEAKSTSIAFRCINENLTRYISNMDIFEKVDAIFDKHEVQEIKEKILNSDYDVEDFFEGEFFNFVLTQEGIDVYNAIIGGFVTESGGSSGENQFTNQGRRNSQQRLKGLTDSIKEFGSQILKEHPVENSQLQNDRLFLYYLQNGRDMYTGEELDIDYLSQYDIDHIIPQAFIKDNSIDNRVLTSSKENRGKSDDVPSKDVVRKMKSYWSKLLSAKLITQRKFDNLTKAERGGLTGSSGEKIKGLNEYINLYNQKTKQKLPKFKPLYKQVLSDRESLSFYGEGYTSDEEVLEVFRNTLNKNSEIFSSIKKLEKLFKNFDEYSSAGIFVKNGPAISTISKDIFGEWNVIRDKWNAEYDDIHLKKKAVVTEKYEDDRRKSFKKIGSFSLEQLQEYADADLSVVEKLKEIIIQKVDEIYKVYGSSEKLFDADFVLEKSLKKNDAVVAIMKDLLDSVKSFENYIKAFFGEGKETNRDESFYGDFVLAYDILLKVDHIYDAIRNYVTQKPYSKDKFKLYFQNPQFMGGWDKDKETDYRATILRYGSKYYLAIMDKKYAKCLQKIDKDDVNGNYEKINYKLLPGPNKMLPKVFFSKKWMAYYNPSEDIQKIYKNGTFKKGDMFNLNDCHKLIDFFKDSISRYPKWSNAYDFNFSETEKYKDIAGFYREVEEQGYKVSFESASKKEVDKLVEEGKLYMFQIYNKDFSDKSHGTPNLHTMYFKLLFDENNHGQIRLSGGAELFMRRASLKKEELVVHPANSPIANKNPDNPKKTTTLSYDVYKDKRFSEDQYELHIPIAINKCPKNIFKINTEVRVLLKHDDNPYVIGIARGERNLLYIVVVDGKGNIVEQYSLNEIINNFNGIRIKTDYHSLLDKKEKERFEARQNWTSIENIKELKAGYISQVVHKICELVEKYDAVIALEDLNSGFKNSRVKVEKQVYQKFEKMLIDKLNYMVDKKSNPCATGGALKGYQITNKFESFKSMSTQNGFIFYIPAWLTSKIDPSTGFVNLLKTKYTSIADSKKFISSFDRIMYVPEEDLFEFALDYKNFSRTDADYIKKWKLYSYGNRIRIFRNPKKNNVFDWEEVCLTSAYKELFNKYGINYQQGDIRALLCEQSDKAFYSSFMALMSLMLQMRNSITGRTDVDFLISPVKNSDGIFYDSRNYEAQENAILPKNADANGAYNIARKVLWAIGQFKKAEDEKLDKVKIAISNKEWLEYAQTSVKH

SEQ ID NO: 123 - protein, 1459 aa, synthetic construct
MSKLEKFTNCYSLSKTLRFKAIPVGKTQENIDNKRLLVEDEKRAEDYKGVKKLLDRYYLSFINDVLHSIKLKNLNNYISLFRKKTRTEKENKELENLEINLRKEIAKAFKGNEGYKSLFKKDIIETILPEFLDDKDEIALVNSFNGFTTAFTGFFDNRENMFSEEAKSTSIAFRCINENLTRYISNMDIFEKVDAIFDKHEVQEIKEKILNSDYDVEDFFEGEFFNFVLTQEGIDVYNAIIGGFVTESGGSSGARVRTYPNVSHANTHYKNTVSSKLLPFTANYQLQLGELDNLNRATFSHIQLQDRHETKDVRTKINYDPVGWHNYQFPYGDGSKSSWVMNRGHLVGYQFCGLNDEPRNLVAMTAWLNTGAYSGANDSNPEGMLYYENRLDSWLALHPDFWLDYKVTPIYSGNEVVPRQIELQYVGIDSSGELLTIRLNSNKESIDENGVTTVILENSAPNINLDYLNGTATPKNGSSGEKIKGLNEYINLYNQKTKQKLPKFKPLYKQVLSDRESLSFYGEGYTSDEEVLEVFRNTLNKNSEIFSSIKKLEKLFKNFDEYSSAGIFVKNGPAISTISKDIFGEWNVIRDKWNAEYDDIHLKKKAVVTEKYEDDRRKSFKKIGSFSLEQLQEYADADLSVVEKLKEIIIQKVDEIYKVYGSSEKLFDADFVLEKSLKKNDAVVAIMKDLLDSVKSFENYIKAFFGEGKETNRDESFYGDFVLAYDILLKVDHIYDAIRNYVTQKPYSKDKFKLYFQNPQFMGGWDKDKETDYRATILRYGSKYYLAIMDKKYAKCLQKIDKDDVNGNYEKINYKLLPGPNKMLPKVFFSKKWMAYYNPSEDIQKIYKNGTFKKGDMFNLNDCHKLIDFFKDSISRYPKWSNAYDFNFSETEKYKDIAGFYREVEEQGYKVSFESASKKEVDKLVEEGKLYMFQIYNKDFSDKSHGTPNLHTMYFKLLFDENNHGQIRLSGGAELFMRRASLKKEELVVHPANSPIANKNPDNPKKTTTLSYDVYKDKRFSEDQYELHIPIAINKCPKNIFKINTEVRVLLKHDDNPYVIGIARGERNLLYIVVVDGKGNIVEQYSLNEIINNFNGIRIKTDYHSLLDKKEKERFEARQNWTSIENIKELKAGYISQVVHKICELVEKYDAVIALEDLNSGFKNSRVKVEKQVYQKFEKMLIDKLNYMVDKKSNPCATGGALKGYQITNKFESFKSMSTQNGFIFYIPAWLTSKIDPSTGFVNLLKTKYTSIADSKKFISSFDRIMYVPEEDLFEFALDYKNFSRTDADYIKKWKLYSYGNRIRIFRNPKKNNVFDWEEVCLTSAYKELFNKYGINYQQGDIRALLCEQSDKAFYSSFMALMSLMLQMRNSITGRTDVDFLISPVKNSDGIFYDSRNYEAQENAILPKNADANGAYNIARKVLWAIGQFKKAEDEKLDKVKIAISNKEWLEYAQTSVKH

SEQ ID NO: 124 - protein, 1506 aa, synthetic construct
MSKLEKFTNCYSLSKTLRFKAIPVGKTQENIDNKRLLVEDEKRAEDYKGVKKLLDRYYLSFINDVLHSIKLKNLNNYISLFRKKTRTEKENKELENLEINLRKEIAKAFKGNEGYKSLFKKDIIETILPEFLDDKDEIALVNSFNGFTTAFTGFFDNRENMFSEEAKSTSIAFRCINENLTRYISNMDIFEKVDAIFDKHEVQEIKEKILNSDYDVEDFFEGEFFNFVLTQEGIDVYNAIIGGFVTESGGSSGAAPNIHGWGKEGHEIICKIAQTRLDETAAKAVKELLPESAEGDLSSLCLWADRVKFRYHWSSPLHYINTPDACSYQYNRDCKDESGEKGRCVAGAIYNYTTQLLSYKTAASSQSQYNLTEALLFVSHFMGDIHQPLHVSYASDKGGNTIEVHWYTRKANLHHIWDSNIIETAEADLYNSALEGMVDALKKNITTEWADQVKRWETCTKKTACPDIYASEGIQAACDWAYKGVTEGDTLEDEYFYSRLPIVYQRLAQGGVRLAATLNRIFGGSSGEKIKGLNEYINLYNQKTKQKLPKFKPLYKQVLSDRESLSFYGEGYTSDEEVLEVFRNTLNKNSEIFSSIKKLEKLFKNFDEYSSAGIFVKNGPAISTISKDIFGEWNVIRDKWNAEYDDIHLKKKAVVTEKYEDDRRKSFKKIGSFSLEQLQEYADADLSVVEKLKEIIIQKVDEIYKVYGSSEKLFDADFVLEKSLKKNDAVVAIMKDLLDSVKSFENYIKAFFGEGKETNRDESFYGDFVLAYDILLKVDHIYDAIRNYVTQKPYSKDKFKLYFQNPQFMGGWDKDKETDYRATILRYGSKYYLAIMDKKYAKCLQKIDKDDVNGNYEKINYKLLPGPNKMLPKVFFSKKWMAYYNPSEDIQKIYKNGTFKKGDMFNLNDCHKLIDFFKDSISRYPKWSNAYDFNFSETEKYKDIAGFYREVEEQGYKVSFESASKKEVDKLVEEGKLYMFQIYNKDFSDKSHGTPNLHTMYFKLLFDENNHGQIRLSGGAELFMRRASLKKEELVVHPANSPIANKNPDNPKKTTTLSYDVYKDKRFSEDQYELHIPIAINKCPKNIFKINTEVRVLLKHDDNPYVIGIARGERNLLYIVVVDGKGNIVEQYSLNEIINNFNGIRIKTDYHSLLDKKEKERFEARQNWTSIENIKELKAGYISQVVHKICELVEKYDAVIALEDLNSGFKNSRVKVEKQVYQKFEKMLIDKLNYMVDKKSNPCATGGALKGYQITNKFESFKSMSTQNGFIFYIPAWLTSKIDPSTGFVNLLKTKYTSIADSKKFISSFDRIMYVPEEDLFEFALDYKNFSRTDADYIKKWKLYSYGNRIRIFRNPKKNNVFDWEEVCLTSAYKELFNKYGINYQQGDIRALLCEQSDKAFYSSFMALMSLMLQMRNSITGRTDVDFLISPVKNSDGIFYDSRNYEAQENAILPKNADANGAYNIARKVLWAIGQFKKAEDEKLDKVKIAISNKEWLEYAQTSVKH

SEQ ID NO: 125 - protein, 1320 aa, synthetic construct
MSKLEKFTNCYSLSKTLRFKAIPVGKTQENIDNKRLLVEDEKRAEDYKGVKKLLDRYYLSFINDVLHSIKLKNLNNYISLFRKKTRTEKENKELENLEINLRKEIAKAFKGNEGYKSLFKKDIIETILPEFLDDKDEIALVNSFNGFTTAFTGFFDNRENMFSEEAKSTSIAFRCINENLTRYISNMDIFEKVDAIFDKHEVQEIKEKILNSDYDVEDFFEGEFFNFVLTQEGIDVYNAIIGGFVTESGGSSGIDGVKLSSTEKKKMDEIAPPKGSVFTCPICEKRSIVGVTANLVHDHNHDTGWGREWICDSCNTGLGRFKDNPKFLEKVIEYLKKGSSGEKIKGLNEYINLYNQKTKQKLPKFKPLYKQVLSDRESLSFYGEGYTSDEEVLEVFRNTLNKNSEIFSSIKKLEKLFKNFDEYSSAGIFVKNGPAISTISKDIFGEWNVIRDKWNAEYDDIHLKKKAVVTEKYEDDRRKSFKKIGSFSLEQLQEYADADLSVVEKLKEIIIQKVDEIYKVYGSSEKLFDADFVLEKSLKKNDAVVAIMKDLLDSVKSFENYIKAFFGEGKETNRDESFYGDFVLAYDILLKVDHIYDAIRNYVTQKPYSKDKFKLYFQNPQFMGGWDKDKETDYRATILRYGSKYYLAIMDKKYAKCLQKIDKDDVNGNYEKINYKLLPGPNKMLPKVFFSKKWMAYYNPSEDIQKIYKNGTFKKGDMFNLNDCHKLIDFFKDSISRYPKWSNAYDFNFSETEKYKDIAGFYREVEEQGYKVSFESASKKEVDKLVEEGKLYMFQIYNKDFSDKSHGTPNLHTMYFKLLFDENNHGQIRLSGGAELFMRRASLKKEELVVHPANSPIANKNPDNPKKTTTLSYDVYKDKRFSEDQYELHIPIAINKCPKNIFKINTEVRVLLKHDDNPYVIGIARGERNLLYIVVVDGKGNIVEQYSLNEIINNFNGIRIKTDYHSLLDKKEKERFEARQNWTSIENIKELKAGYISQVVHKICELVEKYDAVIALEDLNSGFKNSRVKVEKQVYQKFEKMLIDKLNYMVDKKSNPCATGGALKGYQITNKFESFKSMSTQNGFIFYIPAWLTSKIDPSTGFVNLLKTKYTSIADSKKFISSFDRIMYVPEEDLFEFALDYKNFSRTDADYIKKWKLYSYGNRIRIFRNPKKNNVFDWEEVCLTSAYKELFNKYGINYQQGDIRALLCEQSDKAFYSSFMALMSLMLQMRNSITGRTDVDFLISPVKNSDGIFYDSRNYEAQENAILPKNADANGAYNIARKVLWAIGQFKKAEDEKLDKVKIAISNKEWLEYAQTSVKH

SEQ ID NO: 126 - protein, 1333 aa, synthetic construct
MSKLEKFTNCYSLSKTLRFKAIPVGKTQENIDNKRLLVEDEKRAEDYKGVKKLLDRYYLSFINDVLHSIKLKNLNNYISLFRKKTRTEKENKELENLEINLRKEIAKAFKGNEGYKSLFKKDIIETILPEFLDDKDEIALVNSFNGFTTAFTGFFDNRENMFSEEAKSTSIAFRCINENLTRYISNMDIFEKVDAIFDKHEVQEIKEKILNSDYDVEDFFEGEFFNFVLTQEGIDVYNAIIGGFVTESGGSSGMNYFIVEVSEQEVKREKEKARELRRSQWWKNRIARGICHYCGEIFPPEELTMDHLVPVVRGGKSTRGNVVPACKECNNRKKYLLPVEWEEYLDSLESGSSGEKIKGLNEYINLYNQKTKQKLPKFKPLYKQVLSDRESLSFYGEGYTSDEEVLEVFRNTLNKNSEIFSSIKKLEKLFKNFDEYSSAGIFVKNGPAISTISKDIFGEWNVIRDKWNAEYDDIHLKKKAVVTEKYEDDRRKSFKKIGSFSLEQLQEYADADLSVVEKLKEIIIQKVDEIYKVYGSSEKLFDADFVLEKSLKKNDAVVAIMKDLLDSVKSFENYIKAFFGEGKETNRDESFYGDFVLAYDILLKVDHIYDAIRNYVTQKPYSKDKFKLYFQNPQFMGGWDKDKETDYRATILRYGSKYYLAIMDKKYAKCLQKIDKDDVNGNYEKINYKLLPGPNKMLPKVFFSKKWMAYYNPSEDIQKIYKNGTFKKGDMFNLNDCHKLIDFFKDSISRYPKWSNAYDFNFSETEKYKDIAGFYREVEEQGYKVSFESASKKEVDKLVEEGKLYMFQIYNKDFSDKSHGTPNLHTMYFKLLFDENNHGQIRLSGGAELFMRRASLKKEELVVHPANSPIANKNPDNPKKTTTLSYDVYKDKRFSEDQYELHIPIAINKCPKNIFKINTEVRVLLKHDDNPYVIGIARGERNLLYIVVVDGKGNIVEQYSLNEIINNFNGIRIKTDYHSLLDKKEKERFEARQNWTSIENIKELKAGYISQVVHKICELVEKYDAVIALEDLNSGFKNSRVKVEKQVYQKFEKMLIDKLNYMVDKKSNPCATGGALKGYQITNKFESFKSMSTQNGFIFYIPAWLTSKIDPSTGFVNLLKTKYTSIADSKKFISSFDRIMYVPEEDLFEFALDYKNFSRTDADYIKKWKLYSYGNRIRIFRNPKKNNVFDWEEVCLTSAYKELFNKYGINYQQGDIRALLCEQSDKAFYSSFMALMSLMLQMRNSITGRTDVDFLISPVKNSDGIFYDSRNYEAQENAILPKNADANGAYNIARKVLWAIGQFKKAEDEKLDKVKIAISNKEWLEYAQTSVKH

SEQ ID NO: 127 - protein, 1496 aa, synthetic construct
MSKLEKFTNCYSLSKTLRFKAIPVGKTQENIDNKRLLVEDEKRAEDYKGVKKLLDRYYLSFINDVLHSIKLKNLNNYISLFRKKTRTEKENKELENLEINLRKEIAKAFKGNEGYKSLFKKDIIETILPEFLDDKDEIALVNSFNGFTTAFTGFFDNRENMFSEEAKSTSIAFRCINENLTRYISNMDIFEKVDAIFDKHEVQEIKEKILNSDYDVEDFFEGEFFNFVLTQEGIDVYNAIIGGFVTESGGSSGGKAQLDIKNFPELYRTTERVYKKSGQSTKPVTVSNIHYSVLDGYGRSGEAYGIITKDMIDMSAGYREKWESKPEPSGWYSYFFKNTNQRATESDYKHSPKNVSKISNNIKASILLSNGNVRNGYLFDRSHLIADSLGGRPFRNNLITGTRTQNVGNNDRKGGMQYIENKVLDHIKRNPKVHVYYKATPVYQGSELLPRAVLVSALSSDGFIDETVRVFNNVAGFNIDYQNGGLLSSTADVDINNVEENEIETTDDEIEEGGSSGEKIKGLNEYINLYNQKTKQKLPKFKPLYKQVLSDRESLSFYGEGYTSDEEVLEVFRNTLNKNSEIFSSIKKLEKLFKNFDEYSSAGIFVKNGPAISTISKDIFGEWNVIRDKWNAEYDDIHLKKKAVVTEKYEDDRRKSFKKIGSFSLEQLQEYADADLSVVEKLKEIIIQKVDEIYKVYGSSEKLFDADFVLEKSLKKNDAVVAIMKDLLDSVKSFENYIKAFFGEGKETNRDESFYGDFVLAYDILLKVDHIYDAIRNYVTQKPYSKDKFKLYFQNPQFMGGWDKDKETDYRATILRYGSKYYLAIMDKKYAKCLQKIDKDDVNGNYEKINYKLLPGPNKMLPKVFFSKKWMAYYNPSEDIQKIYKNGTFKKGDMFNLNDCHKLIDFFKDSISRYPKWSNAYDFNFSETEKYKDIAGFYREVEEQGYKVSFESASKKEVDKLVEEGKLYMFQIYNKDFSDKSHGTPNLHTMYFKLLFDENNHGQIRLSGGAELFMRRASLKKEELVVHPANSPIANKNPDNPKKTTTLSYDVYKDKRFSEDQYELHIPIAINKCPKNIFKINTEVRVLLKHDDNPYVIGIARGERNLLYIVVVDGKGNIVEQYSLNEIINNFNGIRIKTDYHSLLDKKEKERFEARQNWTSIENIKELKAGYISQVVHKICELVEKYDAVIALEDLNSGFKNSRVKVEKQVYQKFEKMLIDKLNYMVDKKSNPCATGGALKGYQITNKFESFKSMSTQNGFIFYIPAWLTSKIDPSTGFVNLLKTKYTSIADSKKFISSFDRIMYVPEEDLFEFALDYKNFSRTDADYIKKWKLYSYGNRIRIFRNPKKNNVFDWEEVCLTSAYKELFNKYGINYQQGDIRALLCEQSDKAFYSSFMALMSLMLQMRNSITGRTDVDFLISPVKNSDGIFYDSRNYEAQENAILPKNADANGAYNIARKVLWAIGQFKKAEDEKLDKVKIAISNKEWLEYAQTSVKH

SEQ ID NO: 128 - protein, 1380 aa, synthetic construct
MSKLEKFTNCYSLSKTLRFKAIPVGKTQENIDNKRLLVEDEKRAEDYKGVKKLLDRYYLSFINDVLHSIKLKNLNNYISLFRKKTRTEKENKELENLEINLRKEIAKAFKGNEGYKSLFKKDIIETILPEFLDDKDEIALVNSFNGFTTAFTGFFDNRENMFSEEAKSTSIAFRCINENLTRYISNMDIFEKVDAIFDKHEVQEIKEKILNSDYDVEDFFEGEFFNFVLTQEGIDVYNAIIGGFVTESGGSSGENQTTGKGKNNSRPRYKSLEKAIKEFGSQILKEHPTDNQELRNNRLYLYYLQNGKDMYTGQDLDIHNLSNYDIDHIVPQSFITDNSIDNLVLTSSAGNREKGDDVPPLEIVRKRKVFWEKLYQGNLMSKRKFDYLTKAERGGLTGSSGEKIKGLNEYINLYNQKTKQKLPKFKPLYKQVLSDRESLSFYGEGYTSDEEVLEVFRNTLNKNSEIFSSIKKLEKLFKNFDEYSSAGIFVKNGPAISTISKDIFGEWNVIRDKWNAEYDDIHLKKKAVVTEKYEDDRRKSFKKIGSFSLEQLQEYADADLSVVEKLKEIIIQKVDEIYKVYGSSEKLFDADFVLEKSLKKNDAVVAIMKDLLDSVKSFENYIKAFFGEGKETNRDESFYGDFVLAYDILLKVDHIYDAIRNYVTQKPYSKDKFKLYFQNPQFMGGWDKDKETDYRATILRYGSKYYLAIMDKKYAKCLQKIDKDDVNGNYEKINYKLLPGPNKMLPKVFFSKKWMAYYNPSEDIQKIYKNGTFKKGDMFNLNDCHKLIDFFKDSISRYPKWSNAYDFNFSETEKYKDIAGFYREVEEQGYKVSFESASKKEVDKLVEEGKLYMFQIYNKDFSDKSHGTPNLHTMYFKLLFDENNHGQIRLSGGAELFMRRASLKKEELVVHPANSPIANKNPDNPKKTTTLSYDVYKDKRFSEDQYELHIPIAINKCPKNIFKINTEVRVLLKHDDNPYVIGIARGERNLLYIVVVDGKGNIVEQYSLNEIINNFNGIRIKTDYHSLLDKKEKERFEARQNWTSIENIKELKAGYISQVVHKICELVEKYDAVIALEDLNSGFKNSRVKVEKQVYQKFEKMLIDKLNYMVDKKSNPCATGGALKGYQITNKFESFKSMSTQNGFIFYIPAWLTSKIDPSTGFVNLLKTKYTSIADSKKFISSFDRIMYVPEEDLFEFALDYKNFSRTDADYIKKWKLYSYGNRIRIFRNPKKNNVFDWEEVCLTSAYKELFNKYGINYQQGDIRALLCEQSDKAFYSSFMALMSLMLQMRNSITGRTDVDFLISPVKNSDGIFYDSRNYEAQENAILPKNADANGAYNIARKVLWAIGQFKKAEDEKLDKVKIAISNKEWLEYAQTSVKH

SEQ ID NO: 129 - protein, 1323 aa, synthetic construct
MSKLEKFTNCYSLSKTLRFKAIPVGKTQENIDNKRLLVEDEKRAEDYKGVKKLLDRYYLSFINDVLHSIKLKNLNNYISLFRKKTRTEKENKELENLEINLRKEIAKAFKGNEGYKSLFKKDIIETILPEFLDDKDEIALVNSFNGFTTAFTGFFDNRENMFSEEAKSTSIAFRCINENLTRYISNMDIFEKVDAIFDKHEVQEIKEKILNSDYDVEDFFEGEFFNFVLTQEGIDVYNAIIGGFVTESGGSSGMELKNSISDYTEAEFVQLLKEIEKENVAATDDVLDVLLEHFVKITEHPDGTDLIYYPSDNRDDSPEGIVKEIKEWRAANGKPGFKQGGSSGEKIKGLNEYINLYNQKTKQKLPKFKPLYKQVLSDRESLSFYGEGYTSDEEVLEVFRNTLNKNSEIFSSIKKLEKLFKNFDEYSSAGIFVKNGPAISTISKDIFGEWNVIRDKWNAEYDDIHLKKKAVVTEKYEDDRRKSFKKIGSFSLEQLQEYADADLSVVEKLKEIIIQKVDEIYKVYGSSEKLFDADFVLEKSLKKNDAVVAIMKDLLDSVKSFENYIKAFFGEGKETNRDESFYGDFVLAYDILLKVDHIYDAIRNYVTQKPYSKDKFKLYFQNPQFMGGWDKDKETDYRATILRYGSKYYLAIMDKKYAKCLQKIDKDDVNGNYEKINYKLLPGPNKMLPKVFFSKKWMAYYNPSEDIQKIYKNGTFKKGDMFNLNDCHKLIDFFKDSISRYPKWSNAYDFNFSETEKYKDIAGFYREVEEQGYKVSFESASKKEVDKLVEEGKLYMFQIYNKDFSDKSHGTPNLHTMYFKLLFDENNHGQIRLSGGAELFMRRASLKKEELVVHPANSPIANKNPDNPKKTTTLSYDVYKDKRFSEDQYELHIPIAINKCPKNIFKINTEVRVLLKHDDNPYVIGIARGERNLLYIVVVDGKGNIVEQYSLNEIINNFNGIRIKTDYHSLLDKKEKERFEARQNWTSIENIKELKAGYISQVVHKICELVEKYDAVIALEDLNSGFKNSRVKVEKQVYQKFEKMLIDKLNYMVDKKSNPCATGGALKGYQITNKFESFKSMSTQNGFIFYIPAWLTSKIDPSTGFVNLLKTKYTSIADSKKFISSFDRIMYVPEEDLFEFALDYKNFSRTDADYIKKWKLYSYGNRIRIFRNPKKNNVFDWEEVCLTSAYKELFNKYGINYQQGDIRALLCEQSDKAFYSSFMALMSLMLQMRNSITGRTDVDFLISPVKNSDGIFYDSRNYEAQENAILPKNADANGAYNIARKVLWAIGQFKKAEDEKLDKVKIAISNKEWLEYAQTSVKH

SEQ ID NO: 130 - protein, 1323 aa, synthetic construct
MSKLEKFTNCYSLSKTLRFKAIPVGKTQENIDNKRLLVEDEKRAEDYKGVKKLLDRYYLSFINDVLHSIKLKNLNNYISLFRKKTRTEKENKELENLEINLRKEIAKAFKGNEGYKSLFKKDIIETILPEFLDDKDEIALVNSFNGFTTAFTGFFDNRENMFSEEAKSTSIAFRCINENLTRYISNMDIFEKVDAIFDKHEVQEIKEKILNSDYDVEDFFEGEFFNFVLTQEGIDVYNAIIGGFVTESGGSSGMKSKISEYTEKEFLEFVKDIYTNNKKKFPTEESHIQAVLEFKKLTEHPSGSDLLYYPNENREDSPAGVVKEVKEWRASKGLPGFKAGGSSGEKIKGLNEYINLYNQKTKQKLPKFKPLYKQVLSDRESLSFYGEGYTSDEEVLEVFRNTLNKNSEIFSSIKKLEKLFKNFDEYSSAGIFVKNGPAISTISKDIFGEWNVIRDKWNAEYDDIHLKKKAVVTEKYEDDRRKSFKKIGSFSLEQLQEYADADLSVVEKLKEIIIQKVDEIYKVYGSSEKLFDADFVLEKSLKKNDAVVAIMKDLLDSVKSFENYIKAFFGEGKETNRDESFYGDFVLAYDILLKVDHIYDAIRNYVTQKPYSKDKFKLYFQNPQFMGGWDKDKETDYRATILRYGSKYYLAIMDKKYAKCLQKIDKDDVNGNYEKINYKLLPGPNKMLPKVFFSKKWMAYYNPSEDIQKIYKNGTFKKGDMFNLNDCHKLIDFFKDSISRYPKWSNAYDFNFSETEKYKDIAGFYREVEEQGYKVSFESASKKEVDKLVEEGKLYMFQIYNKDFSDKSHGTPNLHTMYFKLLFDENNHGQIRLSGGAELFMRRASLKKEELVVHPANSPIANKNPDNPKKTTTLSYDVYKDKRFSEDQYELHIPIAINKCPKNIFKINTEVRVLLKHDDNPYVIGIARGERNLLYIVVVDGKGNIVEQYSLNEIINNFNGIRIKTDYHSLLDKKEKERFEARQNWTSIENIKELKAGYISQVVHKICELVEKYDAVIALEDLNSGFKNSRVKVEKQVYQKFEKMLIDKLNYMVDKKSNPCATGGALKGYQITNKFESFKSMSTQNGFIFYIPAWLTSKIDPSTGFVNLLKTKYTSIADSKKFISSFDRIMYVPEEDLFEFALDYKNFSRTDADYIKKWKLYSYGNRIRIFRNPKKNNVFDWEEVCLTSAYKELFNKYGINYQQGDIRALLCEQSDKAFYSSFMALMSLMLQMRNSITGRTDVDFLISPVKNSDGIFYDSRNYEAQENAILPKNADANGAYNIARKVLWAIGQFKKAEDEKLDKVKIAISNKEWLEYAQTSVKH

SEQ ID NO: 131 - protein, 1511 aa, synthetic construct
MSKLEKFTNCYSLSKTLRFKAIPVGKTQENIDNKRLLVEDEKRAEDYKGVKKLLDRYYLSFINDVLHSIKLKNLNNYISLFRKKTRTEKENKELENLEINLRKEIAKAFKGNEGYKSLFKKDIIETILPEFLDDKDEIALVNSFNGFTTAFTGFFDNRENMFSEEAKSTSIAFRCINENLTRYISNMDIFEKVDAIFDKHEVQEIKEKILNSDYDVEDFFEGEFFNFVLTQEGIDVYNAIIGGFVTESGGSSGWRRRREDARAAPGLLGRLPVLPVAAAAELPPVPGGPRGPGELAKYGLPGLAQLKSRESYVLCYDPRTRGALWVVEQLRPERLRGDGDRRECDFREDDSVHAYHRATNADYRGSGFDRGHLAAAANHRWSQKAMDDTFYLSNVAPQVPHLNQNAWNNLEKYSRSLTRSYQNVYVCTGPLFLPRTEADGKSYVKYQVIGKNHVAVPTHFFKVLILEAAGGQIELRTYVMPNAPVDEAIPLERFLVPIESIERASGLLFVPNILARAGSLKAITAGSKGSSGEKIKGLNEYINLYNQKTKQKLPKFKPLYKQVLSDRESLSFYGEGYTSDEEVLEVFRNTLNKNSEIFSSIKKLEKLFKNFDEYSSAGIFVKNGPAISTISKDIFGEWNVIRDKWNAEYDDIHLKKKAVVTEKYEDDRRKSFKKIGSFSLEQLQEYADADLSVVEKLKEIIIQKVDEIYKVYGSSEKLFDADFVLEKSLKKNDAVVAIMKDLLDSVKSFENYIKAFFGEGKETNRDESFYGDFVLAYDILLKVDHIYDAIRNYVTQKPYSKDKFKLYFQNPQFMGGWDKDKETDYRATILRYGSKYYLAIMDKKYAKCLQKIDKDDVNGNYEKINYKLLPGPNKMLPKVFFSKKWMAYYNPSEDIQKIYKNGTFKKGDMFNLNDCHKLIDFFKDSISRYPKWSNAYDFNFSETEKYKDIAGFYREVEEQGYKVSFESASKKEVDKLVEEGKLYMFQIYNKDFSDKSHGTPNLHTMYFKLLFDENNHGQIRLSGGAELFMRRASLKKEELVVHPANSPIANKNPDNPKKTTTLSYDVYKDKRFSEDQYELHIPIAINKCPKNIFKINTEVRVLLKHDDNPYVIGIARGERNLLYIVVVDGKGNIVEQYSLNEIINNFNGIRIKTDYHSLLDKKEKERFEARQNWTSIENIKELKAGYISQVVHKICELVEKYDAVIALEDLNSGFKNSRVKVEKQVYQKFEKMLIDKLNYMVDKKSNPCATGGALKGYQITNKFESFKSMSTQNGFIFYIPAWLTSKIDPSTGFVNLLKTKYTSIADSKKFISSFDRIMYVPEEDLFEFALDYKNFSRTDADYIKKWKLYSYGNRIRIFRNPKKNNVFDWEEVCLTSAYKELFNKYGINYQQGDIRALLCEQSDKAFYSSFMALMSLMLQMRNSITGRTDVDFLISPVKNSDGIFYDSRNYEAQENAILPKNADANGAYNIARKVLWAIGQFKKAEDEKLDKVKIAISNKEWLEYAQTSVKH

SEQ ID NO: 132 - protein, 1372 aa, synthetic construct
MSKLEKFTNCYSLSKTLRFKAIPVGKTQENIDNKRLLVEDEKRAEDYKGVKKLLDRYYLSFINDVLHSIKLKNLNNYISLFRKKTRTEKENKELENLEINLRKEIAKAFKGNEGYKSLFKKDIIETILPEFLDDKDEIALVNSFNGFTTAFTGFFDNRENMFSEEAKSTSIAFRCINENLTRYISNMDIFEKVDAIFDKHEVQEIKEKILNSDYDVEDFFEGEFFNFVLTQEGIDVYNAIIGGFVTESGGSSGDEPGVATGNGQPVTGNWLAGASQGDGVPIPSQIADQLRGKEFKSWRDFREQFWMAVSKDPSALENLSPSNRYFVSQGLAPYAVPEEHLGSKEKFEIHHVVPLESGGALYNIDNLVIVTPKRHSEIHKELKLKRKEKGSSGEKIKGLNEYINLYNQKTKQKLPKFKPLYKQVLSDRESLSFYGEGYTSDEEVLEVFRNTLNKNSEIFSSIKKLEKLFKNFDEYSSAGIFVKNGPAISTISKDIFGEWNVIRDKWNAEYDDIHLKKKAVVTEKYEDDRRKSFKKIGSFSLEQLQEYADADLSVVEKLKEIIIQKVDEIYKVYGSSEKLFDADFVLEKSLKKNDAVVAIMKDLLDSVKSFENYIKAFFGEGKETNRDESFYGDFVLAYDILLKVDHIYDAIRNYVTQKPYSKDKFKLYFQNPQFMGGWDKDKETDYRATILRYGSKYYLAIMDKKYAKCLQKIDKDDVNGNYEKINYKLLPGPNKMLPKVFFSKKWMAYYNPSEDIQKIYKNGTFKKGDMFNLNDCHKLIDFFKDSISRYPKWSNAYDFNFSETEKYKDIAGFYREVEEQGYKVSFESASKKEVDKLVEEGKLYMFQIYNKDFSDKSHGTPNLHTMYFKLLFDENNHGQIRLSGGAELFMRRASLKKEELVVHPANSPIANKNPDNPKKTTTLSYDVYKDKRFSEDQYELHIPIAINKCPKNIFKINTEVRVLLKHDDNPYVIGIARGERNLLYIVVVDGKGNIVEQYSLNEIINNFNGIRIKTDYHSLLDKKEKERFEARQNWTSIENIKELKAGYISQVVHKICELVEKYDAVIALEDLNSGFKNSRVKVEKQVYQKFEKMLIDKLNYMVDKKSNPCATGGALKGYQITNKFESFKSMSTQNGFIFYIPAWLTSKIDPSTGFVNLLKTKYTSIADSKKFISSFDRIMYVPEEDLFEFALDYKNFSRTDADYIKKWKLYSYGNRIRIFRNPKKNNVFDWEEVCLTSAYKELFNKYGINYQQGDIRALLCEQSDKAFYSSFMALMSLMLQMRNSITGRTDVDFLISPVKNSDGIFYDSRNYEAQENAILPKNADANGAYNIARKVLWAIGQFKKAEDEKLDKVKIAISNKEWLEYAQTSVKH

SEQ ID NO: 133 - protein, 1409 aa, Streptococcus thermophilus
MLFNKCIIISINLDFSNKEKCMTKPYSIGLDIGTNSVGWAVITDNYKVPSKKMKVLGNTSKKYIKKNLLGVLLFDSGITAEGRRLKRTARRRYTRRRNRILYLQEIFSTEMATLDDAFFQRLDDSFLVPDDKRDSKYPIFGNLVEEKVYHDEFPTIYHLRKYLADSTKKADLRLVYLALAHMIKYRGHFLIEGEFNSKNNDIQKNFQDFLDTYNAIFESDLSLENSKQLEEIVKDKISKLEKKDRILKLFPGEKNSGIFSEFLKLIVGNQADFRKCFNLDEKASLHFSKESYDEDLETLLGYIGDDYSDVFLKAKKLYDAILLSGFLTVTDNETEAPLSSAMIKRYNEHKEDLALLKEYIRNISLKTYNEVFKDDTKNGYAGYIDGKTNQEDFYVYLKNLLAEFEGADYFLEKIDREDFLRKQRTFDNGSIPYQIHLQEMRAILDKQAKFYPFLAKNKERIEKILTFRIPYYVGPLARGNSDFAWSIRKRNEKITPWNFEDVIDKESSAEAFINRMTSFDLYLPEEKVLPKHSLLYETFNVYNELTKVRFIAESMRDYQFLDSKQKKDIVRLYFKDKRKVTDKDIIEYLHAIYGYDGIELKGIEKQFNSSLSTYHDLLNIINDKEFLDDSSNEAIIEEIIHTLTIFEDREMIKQRLSKFENIFDKSVLKKLSRRHYTGWGKLSAKLINGIRDEKSGNTILDYLIDDGISNRNFMQLIHDDALSFKKKIQKAQIIGDEDKGNIKEVVKSLPGSPAIKKGILQSIKIVDELVKVMGGRKPESIVVEMARENQYTNQGKSNSQQRLKRLEKSLKELGSKILKENIPAKLSKIDNNALQNDRLYLYYLQNGKDMYTGDDLDIDRLSNYDIDHIIPQAFLKDNSIDNKVLVSSASNRGKSDDFPSLEVVKKRKTFWYQLLKSKLISQRKFDNLTKAERGGLLPEDKAGFIQRQLVETRQITKHVARLLDEKFNNKKDENNRAVRTVKIITLKSTLVSQFRKDFELYKVREINDFHHAHDAYLNAVIASALLKKYPKLEPEFVYGDYPKYNSFRERKSATEKVYFYSNIMNIFKKSISLADGRVIERPLIEVNEETGESVWNKESDLATVRRVLSYPQVNVVKKVEEQNHGLDRGKPKGLFNANLSSKPKPNSNENLVGAKEYLDPKKYGGYAGISNSFAVLVKGTIEKGAKKKITNVLEFQGISILDRINYRKDKLNFLLEKGYKDIELIIELPKYSLFELSDGSRRMLASILSTNNKRGEIHKGNQIFLSQKFVKLLYHAKRISNTINENHRKYVENHKKEFEELFYYILEFNENYVGAKKNGKLLNSAFQSWQNHSIDELCSSFIGPTGSERKGLFELTSRGSAADFEFLGVKIPRYRDYTPSSLLKDATLIHQSVTGLYETRIDLAKLGEG

SEQ ID NO: 134 - protein, 1053 aa, Staphylococcus aureus
MKRNYILGLDIGITSVGYGIIDYETRDVIDAGVRLFKEANVENNEGRRSKRGARRLKRRRRHRIQRVKKLLFDYNLLTDHSELSGINPYEARVKGLSQKLSEEEFSAALLHLAKRRGVHNVNEVEEDTGNELSTKEQISRNSKALEEKYVAELQLERLKKDGEVRGSINRFKTSDYVKEAKQLLKVQKAYHQLDQSFIDTYIDLLETRRTYYEGPGEGSPFGWKDIKEWYEMLMGHCTYFPEELRSVKYAYNADLYNALNDLNNLVITRDENEKLEYYEKFQIIENVFKQKKKPTLKQIAKEILVNEEDIKGYRVTSTGKPEFTNLKVYHDIKDITARKEIIENAELLDQIAKILTIYQSSEDIQEELTNLNSELTQEEIEQISNLKGYTGTHNLSLKAINLILDELWHTNDNQIAIFNRLKLVPKKVDLSQQKEIPTTLVDDFILSPVVKRSFIQSIKVINAIIKKYGLPNDIIIELAREKNSKDAQKMINEMQKRNRQTNERIEEIIRTTGKENAKYLIEKIKLHDMQEGKCLYSLEAIPLEDLLNNPFNYEVDHIIPRSVSFDNSFNNKVLVKQEENSKKGNRTPFQYLSSSDSKISYETFKKHILNLAKGKGRISKTKKEYLLEERDINRFSVQKDFINRNLVDTRYATRGLMNLLRSYFRVNNLDVKVKSINGGFTSFLRRKWKFKKERNKGYKHHAEDALIIANADFIFKEWKKLDKAKKVMENQMFEEKQAESMPEIETEQEYKEIFITPHQIKHIKDFKDYKYSHRVDKKPNRELINDTLYSTRKDDKGNTLIVNNLNGLYDKDNDKLKKLINKSPEKLLMYHHDPQTYQKLKLIMEQYGDEKNPLYKYYEETGNYLTKYSKKDNGPVIKKIKYYGNKLNAHLDITDDYPNSRNKVVKLSLKPYRFDVYLDNGVYKFVTVKNLDVIKKENYYEVNSKCYEEAKKLKKISNQAEFIASFYNNDLIKINGELYRVIGVNNDLLNRIEVNMIDITYREYLENMNDKRPPRIIKTIASKTQSIKKYSTDILGNLYEVKSKKHPQIIKKG

SEQ ID NO: 135 - protein, 1629 aa, Francisella tularensis
MNFKILPIAIDLGVKNTGVFSAFYQKGTSLERLDNKNGKVYELSKDSYTLLMNNRTARRHQRRGIDRKQLVKRLFKLIWTEQLNLEWDKDTQQAISFLFNRRGFSFITDGYSPEYLNIVPEQVKAILMDIFDDYNGEDDLDSYLKLATEQESKISEIYNKLMQKILEFKLMKLCTDIKDDKVSTKTLKEITSYEFELLADYLANYSESLKTQKFSYTDKQGNLKELSYYHHDKYNIQEFLKRHATINDRILDTLLTDDLDIWNFNFEKFDFDKNEEKLQNQEDKDHIQAHLHHFVFAVNKIKSEMASGGRHRSQYFQEITNVLDENNHQEGYLKNFCENLHNKKYSNLSVKNLVNLIGNLSNLELKPLRKYFNDKIHAKADHWDEQKFTETYCHWILGEWRVGVKDQDKKDGAKYSYKDLCNELKQKVTKAGLVDFLLELDPCRTIPPYLDNNNRKPPKCQSLILNPKFLDNQYPNWQQYLQELKKLQSIQNYLDSFETDLKVLKSSKDQPYFVEYKSSNQQIASGQRDYKDLDARILQFIFDRVKASDELLLNEIYFQAKKLKQKASSELEKLESSKKLDEVIANSQLSQILKSQHTNGIFEQGTFLHLVCKYYKQRQRARDSRLYIMPEYRYDKKLHKYNNTGRFDDDNQLLTYCNHKPRQKRYQLLNDLAGVLQVSPNFLKDKIGSDDDLFISKWLVEHIRGFKKACEDSLKIQKDNRGLLNHKINIARNTKGKCEKEIFNLICKIEGSEDKKGNYKHGLAYELGVLLFGEPNEASKPEFDRKIKKFNSIYSFAQIQQIAFAERKGNANTCAVCSADNAHRMQQIKITEPVEDNKDKIILSAKAQRLPAIPTRIVDGAVKKMATILAKNIVDDNWQNIKQVLSAKHQLHIPIITESNAFEFEPALADVKGKSLKDRRKKALERISPENIFKDKNNRIKEFAKGISAYSGANLTDGDFDGAKEELDHIIPRSHKKYGTLNDEANLICVTRGDNKNKGNRIFCLRDLADNYKLKQFETTDDLEIEKKIADTIWDANKKDFKFGNYRSFINLTPQEQKAFRHALFLADENPIKQAVIRAINNRNRTFVNGTQRYFAEVLANNIYLRAKKENLNTDKISFDYFGIPTIGNGRGIAEIRQLYEKVDSDIQAYAKGDKPQASYSHLIDAMLAFCIAADEHRNDGSIGLEIDKNYSLYPLDKNTGEVFTKDIFSQIKITDNEFSDKKLVRKKAIEGFNTHRQMTRDGIYAENYLPILIHKELNEVRKGYTWKNSEEIKIFKGKKYDIQQLNNLVYCLKFVDKPISIDIQISTLEELRNILTTNNIAATAEYYYINLKTQKLHEYYIENYNTALGYKKYSKEMEFLRSLAYRSERVKIKSIDDVKQVLDKDSNFIIGKITLPFKKEWQRLYREWQNTTIKDDYEFLKSFFNVKSITKLHKKVRKDFSLPISTNEGKFLVKRKTWDNNFIYQILNDSDSRADGTKPFIPAFDISKNEIVEAIIDSFTSKNIFWLPKNIELQKVDNKNIFAIDTSKWFEVETPSDLRDIGIATIQYKIDNNSRPKVRVKLDYVIDDDSKINYFMNHSLLKSRYPDKVLEILKQSTIIEFESSGFNKTIKEMLGMKLAGIYNETSNN

SEQ ID NO: 136 - protein, 1101 aa, Actinomyces naeslundii
MWYASLMSAHHLRVGIDVGTHSVGLATLRVDDHGTPIELLSALSHIHDSGVGKEGKKDHDTRKKLSGIARRARRLLHHRRTQLQQLDEVLRDLGFPIPTPGEFLDLNEQTDPYRVWRVRARLVEEKLPEELRGPAISMAVRHIARHRGWRNPYSKVESLLSPAEESPFMKALRERILATTGEVLDDGITPGQAMAQVALTHNISMRGPEGILGKLHQSDNANEIRKICARQGVSPDVCKQLLRAVFKADSPRGSAVSRVAPDPLPGQGSFRRAPKCDPEFQRFRIISIVANLRISETKGENRPLTADERRHVVTFLTEDSQADLTWVDVAEKLGVHRRDLRGTAVHTDDGERSAARPPIDATDRIMRQTKISSLKTWWEEADSEQRGAMIRYLYEDPTDSECAEIIAELPEEDQAKLDSLHLPAGRAAYSRESLTALSDHMLATTDDLHEARKRLFGVDDSWAPPAEAINAPVGNPSVDRTLKIVGRYLSAVESMWGTPEVIHVEHVRDGFTSERMADERDKANRRRYNDNQEAMKKIQRDYGKEGYISRGDIVRLDALELQGCACLYCGTTIGYHTCQLDHIVPQAGPGSNNRRGNLVAVCERCNRSKSNTPFAVWAQKCGIPHVGVKEAIGRVRGWRKQTPNTSSEDLTRLKKEVIARLRRTQEDPEIDERSMESVAWMANELHHRIAAAYPETTVMVYRGSITAAARKAAGIDSRINLIGEKGRKDRIDRRHHAVDASVVALMEASVAKTLAERSSLRGEQRLTGKEQTWKQYTGSTVGAREHFEMWRGHMLHLTELFNERLAEDKVYVTQNIRLRLSDGNAHTVNPSKLVSHRLGDGLTVQQIDRACTPALWCALTREKDFDEKNGLPAREDRAIRVHGHEIKSSDYIQVFSKRKKTDSDRDETPFGAIAVRGGFVEIGPSIHHARIYRVEGKKPVYAMLRVFTHDLLSQRHGDLFSAVIPPQSISMRCAEPKLRKAITTGNATYLGWVVVGDELEINVDSFTKYAIGRFLEDFPNTTRWRICGYDTNSKLTLKPIVLAAEGLENPSSAVNEIVELKGWRVAINVLTKVHPTVVRRDALGRPRYSSRSNLPTSWTIE

SEQ ID NO: 137 - protein, 1082 aa, Neisseria meningitidis
MAAFKPNSINYILGLDIGIASVGWAMVEIDEEENPIRLIDLGVRVFERAEVPKTGDSLAMARRLARSVRRLTRRRAHRLLRTRRLLKREGVLQAANFDENGLIKSLPNTPWQLRAAALDRKLTPLEWSAVLLHLIKHRGYLSQRKNEGETADKELGALLKGVAGNAHALQTGDFRTPAELALNKFEKESGHIRNQRSDYSHTFSRKDLQAELILLFEKQKEFGNPHVSGGLKEGIETLLMTQRPALSGDAVQKMLGHCTFEPAEPKAAKNTYTAERFIWLTKLNNLRILEQGSERPLTDTERATLMDEPYRKSKLTYAQARKLLGLEDTAFFKGLRYGKDNAEASTLMEMKAYHAISRALEKEGLKDKKSPLNLSPELQDEIGTAFSLFKTDEDITGRLKDRIQPEILEALLKHISFDKFVQISLKALRRIVPLMEQGKRYDEACAEIYGDHYGKKNTEEKIYLPPIPADEIRNPVVLRALSQARKVINGVVRRYGSPARIHIETAREVGKSFKDRKEIEKRQEENRKDREKAAAKFREYFPNFVGEPKSKDILKLRLYEQQHGKCLYSGKEINLGRLNEKGYVEIDHALPFSRTWDDSFNNKVLVLGSENQNKGNQTPYEYFNGKDNSREWQEFKARVETSRFPRSKKQRILLQKFDEDGFKERNLNDTRYVNRFLCQFVADRMRLTGKGKKRVFASNGQITNLLRGFWGLRKVRAENDRHHALDAVVVACSTVAMQQKITRFVRYKEMNAFDGKTIDKETGEVLHQKTHFPQPWEFFAQEVMIRVFGKPDGKPEFEEADTLEKLRTLLAEKLSSRPEAVHEYVTPLFVSRAPNRKMSGQGHMETVKSAKRLDEGVSVLRVPLTQLKLKDLEKMVNREREPKLYEALKARLEAHKDDPAKAFAEPFYKYDKAGNRTQQVKAVRVEQVQKTGVWVRNHNGIADNATMVRVDVFEKGDKYYLVPIYSWQVAKGILPDRAVVQGKDEEDWQLIDDSFNFKFSLHPNDLVEVITKKARMFGYFASCHRGTGNINIRIHDLDHKIGKNGILEGIGVKTALSFQKYQIDELGKEIRPCRLKKRPPVR

SEQ ID NO: 138 - protein, 1334 aa, Listeria innocua
MKKPYTIGLDIGTNSVGWAVLTDQYDLVKRKMKIAGDSEKKQIKKNFWGVRLFDEGQTAADRRMARTARRRIERRRNRISYLQGIFAEEMSKTDANFFCRLSDSFYVDNEKRNSRHPFFATIEEEVEYHKNYPTIYHLREELVNSSEKADLRLVYLALAHIIKYRGNFLIEGALDTQNTSVDGIYKQFIQTYNQVFASGIEDGSLKKLEDNKDVAKILVEKVTRKEKLERILKLYPGEKSAGMFAQFISLIVGSKGNFQKPFDLIEKSDIECAKDSYEEDLESLLALIGDEYAELFVAAKNAYSAVVLSSIITVAETETNAKLSASMIERFDTHEEDLGELKAFIKLHLPKHYEEIFSNTEKHGYAGYIDGKTKQADFYKYMKMTLENIEGADYFIAKIEKENFLRKQRTFDNGAIPHQLHLEELEAILHQQAKYYPFLKENYDKIKSLVTFRIPYFVGPLANGQSEFAWLTRKADGEIRPWNIEEKVDFGKSAVDFIEKMTNKDTYLPKENVLPKHSLCYQKYLVYNELTKVRYINDQGKTSYFSGQEKEQIFNDLFKQKRKVKKKDLELFLRNMSHVESPTIEGLEDSFNSSYSTYHDLLKVGIKQEILDNPVNTEMLENIVKILTVFEDKRMIKEQLQQFSDVLDGVVLKKLERRHYTGWGRLSAKLLMGIRDKQSHLTILDYLMNDDGLNRNLMQLINDSNLSFKSIIEKEQVTTADKDIQSIVADLAGSPAIKKGILQSLKIVDELVSVMGYPPQTIVVEMARENQTTGKGKNNSRPRYKSLEKAIKEFGSQILKEHPTDNQELRNNRLYLYYLQNGKDMYTGQDLDIHNLSNYDIDHIVPQSFITDNSIDNLVLTSSAGNREKGDDVPPLEIVRKRKVFWEKLYQGNLMSKRKFDYLTKAERGGLTEADKARFIHRQLVETRQITKNVANILHQRFNYEKDDHGNTMKQVRIVTLKSALVSQFRKQFQLYKVRDVNDYHHAHDAYLNGVVANTLLKVYPQLEPEFVYGDYHQFDWFKANKATAKKQFYTNIMLFFAQKDRIIDENGEILWDKKYLDTVKKVMSYRQMNIVKKTEIQKGEFSKATIKPKGNSSKLIPRKTNWDPMKYGGLDSPNMAYAVVIEYAKGKNKLVFEKKIIRVTIMERKAFEKDEKAFLEEQGYRQPKVLAKLPKYTLYECEEGRRRMLASANEAQKGNQQVLPNHLVTLLHHAANCEVSDGKSLDYIESNREMFAELLAHVSEFAKRYTLAEANLNKINQLFEQNKEGDIKAIAQSFVDLMAFNAMGAPASFKFFETTIERKRYNNLKELLNSTIIYQSITGLYESRKRLDD

SEQ ID NO: 139 - protein, 1345 aa, Streptococcus mutans
MKKPYSIGLDIGTNSVGWAVVTDDYKVPAKKMKVLGNTDKSHIEKNLLGALLFDSGNTAEDRRLKRTARRRYTRRRNRILYLQEIFSEEMGKVDDSFFHRLEDSFLVTEDKRGERHPIFGNLEEEVKYHENFPTIYHLRQYLADNPEKVDLRLVYLALAHIIKFRGHFLIEGKFDTRNNDVQRLFQEFLAVYDNTFENSSLQEQNVQVEEILTDKISKSAKKDRVLKLFPNEKSNGRFAEFLKLIVGNQADFKKHFELEEKAPLQFSKDTYEEELEVLLAQIGDNYAELFLSAKKLYDSILLSGILTVTDVGTKAPLSASMIQRYNEHQMDLAQLKQFIRQKLSDKYNEVFSDVSKDGYAGYIDGKTNQEAFYKYLKGLLNKIEGSGYFLDKIEREDFLRKQRTFDNGSIPHQIHLQEMRAIIRRQAEFYPFLADNQDRIEKLLTFRIPYYVGPLARGKSDFAWLSRKSADKITPWNFDEIVDKESSAEAFINRMTNYDLYLPNQKVLPKHSLLYEKFTVYNELTKVKYKTEQGKTAFFDANMKQEIFDGVFKVYRKVTKDKLMDFLEKEFDEFRIVDLTGLDKENKVFNASYGTYHDLCKILDKDFLDNSKNEKILEDIVLTLTLFEDREMIRKRLENYSDLLTKEQVKKLERRHYTGWGRLSAELIHGIRNKESRKTILDYLIDDGNSNRNFMQLINDDALSFKEEIAKAQVIGETDNLNQVVSDIAGSPAIKKGILQSLKIVDELVKIMGHQPENIVVEMARENQFTNQGRRNSQQRLKGLTDSIKEFGSQILKEHPVENSQLQNDRLFLYYLQNGRDMYTGEELDIDYLSQYDIDHIIPQAFIKDNSIDNRVLTSSKENRGKSDDVPSKDVVRKMKSYWSKLLSAKLITQRKFDNLTKAERGGLTDDDKAGFIKRQLVETRQITKHVARILDERFNTETDENNKKIRQVKIVTLKSNLVSNFRKEFELYKVREINDYHHAHDAYLNAVIGKALLGVYPQLEPEFVYGDYPHFHGHKENKATAKKFFYSNIMNFFKKDDVRTDKNGEIIWKKDEHISNIKKVLSYPQVNIVKKVEEQTGGFSKESILPKGNSDKLIPRKTKKFYWDTKKYGGFDSPIVAYSILVIADIEKGKSKKLKTVKALVGVTIMEKMTFERDPVAFLERKGYRNVQEENIIKLPKYSLFKLENGRKRLLASARELQKGNEIVLPNHLGTLLYHAKNIHKVDEPKHLDYVDKHKDEFKELLDVVSNFSKKYTLAEGNLEKIKELYAQNNGEDLKELASSFINLLTFTAIGAPATFKFFDKNIDRKRYTSTTEILNATLIHQSITGLYETRIDLNKLGGD

SEQ ID NO: 140 - protein, 1084 aa, Corynebacterium diphtheriae
MKYHVGIDVGTFSVGLAAIEVDDAGMPIKTLSLVSHIHDSGLDPDEIKSAVTRLASSGIARRTRRLYRRKRRRLQQLDKFIQRQGWPVIELEDYSDPLYPWKVRAELAASYIADEKERGEKLSVALRHIARHRGWRNPYAKVSSLYLPDGPSDAFKAIREEIKRASGQPVPETATVGQMVTLCELGTLKLRGEGGVLSARLQQSDYAREIQEICRMQEIGQELYRKIIDVVFAAESPKGSASSRVGKDPLQPGKNRALKASDAFQRYRIAALIGNLRVRVDGEKRILSVEEKNLVFDHLVNLTPKKEPEWVTIAEILGIDRGQLIGTATMTDDGERAGARPPTHDTNRSIVNSRIAPLVDWWKTASALEQHAMVKALSNAEVDDFDSPEGAKVQAFFADLDDDVHAKLDSLHLPVGRAAYSEDTLVRLTRRMLSDGVDLYTARLQEFGIEPSWTPPTPRIGEPVGNPAVDRVLKTVSRWLESATKTWGAPERVIIEHVREGFVTEKRAREMDGDMRRRAARNAKLFQEMQEKLNVQGKPSRADLWRYQSVQRQNCQCAYCGSPITFSNSEMDHIVPRAGQGSTNTRENLVAVCHRCNQSKGNTPFAIWAKNTSIEGVSVKEAVERTRHWVTDTGMRSTDFKKFTKAVVERFQRATMDEEIDARSMESVAWMANELRSRVAQHFASHGTTVRVYRGSLTAEARRASGISGKLKFFDGVGKSRLDRRHHAIDAAVIAFTSDYVAETLAVRSNLKQSQAHRQEAPQWREFTGKDAEHRAAWRVWCQKMEKLSALLTEDLRDDRVVVMSNVRLRLGNGSAHKETIGKLSKVKLSSQLSVSDIDKASSEALWCALTREPGFDPKEGLPANPERHIRVNGTHVYAGDNIGLFPVSAGSIALRGGYAELGSSFHHARVYKITSGKKPAFAMLRVYTIDLLPYRNQDLFSVELKPQTMSMRQAEKKLRDALATGNAEYLGWLVVDDELVVDTSKIATDQVKAVEAELGTIRRWRVDGFFSPSKLRLRPLQMSKEGIKKESAPELSKIIDRPGWLPAVNKLFSDGNVTVVRRDSLGRVRLESTAHLPVTWKVQ

SEQ ID NO: 141 - DNA, 4101 bp, synthetic construct
  source 1..4101: mol_type = other DNA
gacaagaagtactccattggcctggcgattgggacaaactcggtggggtgggccgtgattacggatgagtacaaggttccaagcaagaagttcaaggtcctcgggaacacagatcggcattcgattaagaagaatctcattggggcgctcctcttcgactcgggggagacagcggaggctaccaggctcaagcggacagccaggcggcggtacacaaggcggaagaatcgcatctgctacctccaggagattttctcgaatgagatggcgaaggtggacgacagcttcttccatcggctggaggagtccttcctggtggaggaggataagaagcacgagaggcatccaattttcgggaacatcgtggacgaggttgcgtaccatgagaagtaccctacaatctaccatctgcggaagaagctggttgactccacagacaaggcggacctgaggctgatctacctcgctctggcccacatgattaagttccgcgggcatttcctgatcgagggggacctgaatcccgacaattcggatgtggacaagctcttcatccagctggtgcagacctacaaccagctgttcgaggagaatcccatcaatgcgtcgggcgttgacgctaaggccattctgtccgctaggctgtcgaagagcaggaggctggagaacctgatcgcccagctgccaggcgagaagaagaatgggctcttcgggaatctgattgcgctctccctggggctgacaccgaacttcaagagcaatttcgatctggctgaggacgcgaagctccagctctcgaaggacacttacgacgatgacctcgataacctcctcgcgcagatcggggaccagtacgctgatctcttcctcgccgctaagaacctctcggatgctatcctgctctccgacattctccgggttaataccgagattacaaaggccccactgtcggcgtccatgatcaagcggtacgatgagcatcatcaggatctcaccctgctcaaggccctcgtgcggcagcagctgcccgagaagtacaaggagattttcttcgaccagagcaagaatgggtacgctggctacattgacggcggggcctcacaggaggagttctacaagttcatcaagccaatcctggagaagatggatgggacagaggagctgctggtgaagctcaaccgggaggatctgctcaggaagcagcggacgttcgacaacgggtcgattccccatcagatccacctgggggagctgcacgcgatcctgcgccggcaggaggatttctaccctttcctgaaggataatcgggagaagatcgagaagattctcaccttccggattccctactacgtcgggccactcgcgcggggcaatagcaggttcgcctggatgacacggaagagcgaggagacaatcaccccctggaacttcgaggaggttgtcgacaagggggcgtccgcccagtcattcattgagcggatgaccaatttcgacaagaatctgccaaatgagaaggttctcccaaagcatagcctcctctacgagtacttcactgtttacaacgagctgaccaaggtgaagtatgtgaccgagggcatgcggaagcccgcgttcctgtccggcgagcagaagaaggccattgtggacctcctgttcaagaccaatcgcaaggtcacagtcaagcagctcaaggaggattacttcaagaagatcgagtgcttcgactcggttgagattagcggggtggaggatcggttcaacgcgagcctcggcacttaccacgacctcctgaagatcatcaaggataaggacttcctcgacaacgaggagaacgaggatattctggaggacatcgtgctcaccctgacgctgttcgaggatcgggagatgatcgaggagcgcctgaagacctacgctcatctcttcgatgataaggtcatgaagcagctgaagaggaggcggtacaccgggtggggccgcctgagcaggaagctcattaacgggatcagggacaagcagagcggcaagaccatcctggacttcctcaagagcgatggcttcgccaaccggaatttcatgcagctcatccacgacgactccctcaccttcaaggaggacattcagaaggctcaggtcagcggccagggcgactcgctgcatgagcacatcgctaacctggcgggcagcccagccatcaagaagggcatcctccagacagtgaaggtcgtggatgagctggtgaaggtcatgggccggcataagcccgagaatattgtgattgagatggcgcgggagaatcagaccactcagaagggccagaagaactcgcgggagcgcatgaagaggatcgaggaggggattaaggagctgggcagccagattctcaaggagcaccccgtggagaatacccagctccagaacgagaagctgtacctctactacctccagaatgggcgggacatgtatgttgatcaggagctggacatcaatcgcctctcggattacgacgtggaccacatcgtgccccagagcttcctgaaggatgatagcatcgacaataaggtcctgacccgctccgacaagaatcgcggcaagagcgacaacgtgccgagcgaggaggtcgtgaagaagatgaagaactactggcggcagctgctgaacgcgaagctcattacacagcggaagttcgataacctgacgaaggcggagaggggcggcctctccgagctggacaaggcgggcttcattaagaggcagctcgtggagactcgccagatcaccaagcacgtggctcagatcctcgatagccggatgaatacgaagtacgatgagaatgacaagctcatccgggaggtgaaggtaatcaccctgaagtcaaagctcgttagcgatttccggaaggacttccagttctacaaggtgcgggagattaacaactaccatcatgcgcacgatgcgtacctcaatgcggtggtgggcacagccctgattaagaagtaccccaagctggagagcgagttcgtctacggggactacaaggtgtacgatgttcggaagatgatcgccaagagcgagcaggagattgggaaggccaccgctaagtacttcttctactcgaatattatgaatttcttcaagaccgagatcacactcgctaatggggagattcggaagcggcccctcatcgagactaacggggagactggcgagattgtgtgggacaaggggcgcgacttcgctaccgtgcgcaaggtcctctcgatgccccaggttaatattgttaagaagacagaggtgcagacgggcgggttctccaaggagtctatcctgccgaagcggaactcggacaagctgatcgcccgcaagaaggattgggaccccaagaagtacgggggattcgatagcccaaccgtggcttacagcgtcctggtggtcgccaaggttgagaaggggaagtcgaagaagctcaagagcgttaaggagctgctgggcatcaccatcatggagcggtccagcttcgagaagaatcctatcgacttcctggaggctaaggggtacaaggaggtcaagaaggacctgatcattaagctgcccaagtactctctgttcgagctggagaacgggaggaagcggatgctggcgtctgctggcgagctacagaagggcaatgagctggcgctcccctcgaagtatgtcaacttcctctacctggcttcccattacgagaagctgaagggctcgcccgaggataatgagcagaagcagctcttcgtggagcagcacaagcactacctcgacgagatcattgagcagatttcggagttctcgaagcgggtcattctcgcggacgcgaacctcgacaaggtcctctcggcgtacaacaagcaccgggacaagcccatccgggagcaggccgagaacattatccacctcttcacactgaccaacctcggcgctcccgccgcgttcaagtacttcgacaccaccattgaccgcaagagatacacatccaccaaggaggtgctggacgcgaccctcatccaccagagcatcacaggcctctacgagacacggatcgacctctcgcagctcgggggcgat

SEQ ID NO: 142 - DNA, 4092 bp, synthetic construct
  source 1..4092: mol_type = other DNA
gacaagaagtactcgatcggcctggcgattggcacaaacagcgtggggtgggctgtgatcactgatgagtacaaggtgccatcgaagaagttcaaggtgctggggaatacagaccggcattcgatcaagaagaatctcattggcgctctcctcttcgattccggcgagactgctgaggcgacccgcctgaagcgcaccgcccggcggcgctacactcggcggaagaataggatttgctacctccaggagattttctcgaatgagatggccaaggtggatgacagcttcttccaccgcctggaggagtcgttcctggtcgaggaggacaagaagcatgagcggcaccctatcttcgggaatatcgttgatgaggtcgcctaccacgagaagtaccccactatctaccatctccgcaagaagctcgtggacagcacagataaggccgacctccgcctgatctacctcgccctcgcgcacatgattaagttccgggggcacttcctcattgagggggatctgaatcccgataactccgacgtggacaagctgttcatccagctggtgcagacatacaaccagctgttcgaggagaatcccatcaacgcgagcggcgtggacgctaaggccattctgtcggctaggctctcgaagtcgaggcggctggagaacctgattgcgcagctccccggcgagaagaagaacgggctgttcgggaatctcatcgccctctccctcggcctcacaccaaacttcaagagcaatttcgacctggctgaggacgctaagctgcaactctcaaaggatacatacgatgacgacctggacaatctcctggctcagatcggcgaccagtacgctgacctgttcctcgcggccaagaatctgtcggacgcgattctcctcagcgacatcctgcgcgtcaataccgagattacgaaggctccactgtctgcgtcaatgattaagcggtacgatgagcatcaccaggatctgaccctcctgaaggcgctcgtgcggcagcagctgcccgagaagtacaaggagattttcttcgatcagagcaagaatggctacgccggctacatcgacgggggcgcgagccaggaggagttctacaagttcatcaagcccatcctggagaagatggacggcaccgaggagctactcgtgaagctcaatcgggaggatctcctccggaagcagcggacattcgataacgggtctatcccacaccagatccacctcggcgagctgcatgcgattctgcggcggcaggaggatttctaccctttcctgaaggacaaccgggagaagatcgagaagatcctcacattccggattccatactacgtcggccccctggcgaggggcaatagccggttcgcgtggatgacaaggaagtccgaggagactattaccccgtggaatttcgaggaggtggttgacaagggcgcttccgcgcagagcttcattgagcggatgacaaacttcgacaagaatctccccaacgagaaggtcctgccgaagcatagcctcctgtacgagtacttcaccgtctacaatgagctaactaaggtcaagtatgtgacagagggcatgaggaagccagccttcctctcaggcgagcagaagaaggccattgtggacctcctgttcaagacaaaccgcaaggtgacagtgaagcagctgaaggaggattacttcaagaagattgagtgcttcgactcagtggagatttcaggcgtggaggatcggttcaacgcgagcctggggacttaccacgacctgctgaagattattaaggacaaggacttcctggataacgaggagaatgaggacatcctggaggatattgtgctcaccctcaccctgttcgaggacagggagatgattgaggagaggctcaagacctacgcgcacctgttcgatgacaaggtcatgaagcagctgaagaggcggcgctacactgggtggggccgcctgtcgcggaagctgatcaacggcattcgggataagcagtccgggaagaccattctggatttcctgaagtcggacggcttcgccaacaggaatttcatgcagctgatccacgacgactccctcaccttcaaggaggacattcagaaggcccaggttagcggccagggggactcactccacgagcatattgccaatctggccggctctccagctatcaagaagggcatcctgcaaacagttaaggttgttgacgagctggttaaggtcatggggcggcataagcccgagaacattgtcatcgagatggctcgggagaaccagacaactcagaagggccagaagaactccagggagcgcatgaagcggattgaggagggcattaaggagctggggtcccagatcctcaaggagcaccctgtcgagaacactcagctgcaaaacgagaagctctacctgtactacctccagaacgggcgggatatgtatgtggatcaggagctggacatcaacaggctctccgactacgacgtggatcacattgtcccacagtctttcctcaaggatgattccatcgacaacaaggtgctgacgcgcagcgacaagaatagggggaagtcggacaacgttccgagcgaggaggtcgtgaagaagatgaagaattactggaggcagctcctgaatgcgaagctgatcactcagaggaagttcgacaatctgacaaaggcggagaggggcgggctctcggagctggataaggcgggcttcatcaagcggcagctcgttgaaacccggcagatcaccaagcatgtcgcccagatcctcgatagccgcatgaacaccaagtacgatgagaacgacaagctcattcgggaggttaaggtcattacgctgaagtccaagctcgtcagcgacttcaggaaggatttccagttctacaaggttcgggagattaacaactaccaccacgcgcatgatgcgtacctgaacgctgttgtcggcactgctctcatcaagaagtacccaaagctggagtccgagttcgtctacggggactacaaggtctacgatgtccggaagatgatcgccaagtcggagcaggagatcgggaaggctactgcgaagtacttcttctacagcaacattatgaatttcttcaagacggagattacgctggcgaacggggagattaggaagaggcccctcattgagactaatggggagacaggcgagattgtttgggacaagggccgcgacttcgcgactgtgcggaaggtcctgtccatgccacaggtgaatattgttaagaagacagaggtgcagactgggggcttctcgaaggagagcattctcccaaagcggaacagcgataagctcatcgcgcgcaagaaggattgggaccctaagaagtacggcggcttcgattctcccactgtggcctactccgttctcgtggttgccaaggttgagaaggggaagtcgaagaagctgaagtcggtcaaggagctgctcgggattacaatcatggagcggagcagcttcgagaagaaccctattgatttcctggaggccaagggctacaaggaggttaagaaggatctcattatcaagctccctaagtactctctgttcgagctggagaatggccggaagaggatgctggcctcggctggcgagctacagaaggggaatgagctggccctcccgtcgaagtatgtgaatttcctgtacctcgcgtcgcactacgagaagctcaagggcagcccggaggataatgagcagaagcagctcttcgtggagcagcataagcactacctggacgagatcattgagcagatcagcgagttctcgaagcgggttattctggctgatgctaacctggacaaggttctgagcgcctacaataagcatcgcgacaagccgattcgcgagcaggcggagaatattatccacctgttcaccctcactaacctcggggctcccgcggccttcaagtacttcgataccacaatagataggaagcggtacacctcgacgaaggaggtcctcgacgccacactcatccatcagtcgattacaggcctgtacgagacacggattgacctctcgcagctg

SEQ ID NO: 143 - DNA, 4101 bp, synthetic construct
  source 1..4101: mol_type = other DNA
gacaagaagtattccataggcctggctatcggcaccaacagcgtgggctgggccgtcatcaccgacgagtacaaagtgccgagtaaaaagttcaaagtgctcggcaacaccgaccgccactccataaagaaaaacctgatcggggcgctcctgttcgacagcggcgagacggcggaggccacccgcttgaaacgcacggcccgacggcgctacacgcggcgcaagaaccggatctgttacctacaggagattttctctaacgagatggcgaaggtggacgactcgttctttcaccgcctcgaagagtccttcctcgtggaggaggacaagaaacacgagcgccacccgatcttcggcaacatcgtggacgaggtggcctaccacgagaagtacccgaccatctaccacctccggaagaaactcgtggacagcacggacaaggccgacctgaggctcatctacctcgccctggcgcacatgattaagttccggggccacttcctgatcgagggcgacctgaacccggacaacagcgacgtggacaagctgttcatccagctagtccagacctacaaccagcttttcgaggaaaaccccatcaacgccagcggggtggacgcgaaggcgatcctgtccgcccggctgagcaagtcccggcggctggagaacctcatcgcgcagttgcccggcgagaagaagaacgggctgttcgggaacctgatcgccctctccctggggctcaccccgaacttcaagtccaacttcgacctcgccgaggacgccaaactacagctgagcaaggacacctacgacgacgacctcgacaacctgctggcccagatcggggaccagtacgcagacctgttcctcgccgccaagaacctctccgacgccatcctgctgtcggacatcctgcgggtgaacacggagatcacgaaggccccgctctcggcctcgatgattaaacgctacgacgagcaccaccaggacttgaccctcctcaaggcgctggtccgccagcagcttcccgagaagtacaaggaaatctttttcgatcagagcaagaacgggtacgccgggtacatcgacggcggggcgtcccaggaggagttctacaagttcatcaagcccatcctggagaaaatggacgggaccgaggagctgctcgtgaagctcaaccgcgaagatttgctccgcaagcagcgcacgttcgacaacgggtcgatcccgcaccagatccacctgggcgagctgcacgcgatcctcaggcgtcaggaagacttctaccccttcctcaaggacaaccgcgagaagatagagaagattctgaccttcagaattccttattacgtgggcccgctggctcggggcaactcgcgcttcgcctggatgacgcgcaagtccgaggagaccatcaccccgtggaacttcgaggaggtggtggataagggtgcctcggcccagtccttcatcgagcggatgaccaacttcgacaagaacctgccgaacgagaaggtgctccccaagcacagcctgctctacgaatatttcacggtgtacaacgagctgacgaaggtcaagtacgtgaccgagggaatgaggaaacctgcattcctctccggggagcagaagaaagccatagtcgacctcctgttcaagaccaaccggaaggtcaccgtcaagcagctcaaggaggactacttcaagaagatcgagtgcttcgattcagtggagatcagcggcgtcgaggaccggttcaacgccagcctgggcacctaccacgacctgctcaagatcatcaaggacaaggacttcctcgacaacgaggagaacgaggacatcctggaggacatcgtgctgaccctgacgctcttcgaggaccgcgagatgatcgaggagcgcctcaagacctacgcccacctgttcgacgacaaggtgatgaagcagctcaagcggcggagatatactgggtggggccgcctctcccggaagctcattaacggtatcagggataagcagtccgggaagacgatcctcgacttcctcaagtcggacgggttcgccaaccgcaacttcatgcagctcatccacgacgactccctgacgttcaaggaggacatccagaaggcccaagtgtctggtcaaggtgactcgctccacgagcacatcgccaacctcgcgggcagcccggccatcaagaagggaatactccagaccgtcaaggtggtggacgagctggtgaaggtcatgggccgccacaagccggagaacatcgtcatcgagatggcgcgggagaaccagaccacgcagaaggggcagaaaaatagccgtgagcgcatgaagcgcatcgaggaggggattaaggagttgggcagccagatcctcaaggagcaccctgtggagaacacgcagttgcaaaacgagaagctctacctgtactacctccagaacgggagggatatgtacgtggaccaagaactggacatcaaccgcctgtccgactacgacgtggaccacatcgtgccgcagagcttcctcaaggacgacagcatcgacaacaaggtgctcacccggtccgacaagaatcggggcaagtccgacaacgtgcccagcgaggaggtcgtcaaaaagatgaaaaactactggcgacaactactgaacgccaagctcatcacccagcgcaagttcgacaacctcacaaaagccgagcgcggcgggttgagcgagctggacaaggccgggttcatcaagcgccagctcgtcgagacgcgccagatcacgaagcacgtcgcgcagatactcgacagccggatgaacaccaagtacgacgagaacgacaagctcatccgggaggtgaaggtcatcaccctcaagtcgaagctcgtgagcgacttccgcaaggacttccagttctacaaggtccgggagatcaacaactaccaccacgcccacgatgcttatcttaacgccgtggtggggacggccctcattaagaaatacccgaagctggagtcggagttcgtgtacggcgactacaaggtgtacgacgtcaggaagatgatcgccaagtccgaacaggagatcgggaaggccacggcgaaatacttcttctacagcaacatcatgaacttcttcaagaccgagatcaccctcgccaacggcgagatccgcaagcgcccgctcatcgagacgaacggggagaccggcgagatcgtctgggacaaggggcgcgacttcgccactgtgcggaaggtgctgtcgatgccccaggtcaacatcgtcaagaagacggaggtccagacgggcgggttcagcaaggagagcatcctgccgaagcgcaacagcgacaagctgatcgcccgcaaaaaggactgggatccaaaaaagtacggcggcttcgacagccccaccgtcgcctacagcgtcctcgtcgtcgctaaagtcgagaagggcaagtccaaaaagctcaagagcgtcaaggagctgctcgggatcaccatcatggagcggtccagcttcgagaagaacccaattgatttcctggaggcgaagggctacaaggaggtcaagaaagacctcatcataaagctgccgaagtactcactcttcgagctggagaacgggcgcaagcggatgctggcgtcggccggagagctccaaaagggcaacgagctggcgctgccgagcaagtacgtgaacttcctctacctggcgtcccactacgagaagctcaagggcagtccagaggataacgagcagaagcagctattcgtggagcagcacaagcactacctggacgagatcatcgagcagatcagcgagttctccaagcgcgtcatcctggcggacgccaacctggacaaggtgctgtccgcgtacaacaagcaccgcgacaagccgatccgcgagcaagccgagaacatcatccacctgttcaccctcacgaacctcggggcacccgccgccttcaaatatttcgacacgaccatcgaccgcaagcgctacaccagcacgaaggaggtgctcgacgccaccctgatccaccagagcatcaccgggctgtacgagacccgcatcgacctctcgcagctcggcggggac

SEQ ID NO: 144 - DNA, 4101 bp, synthetic construct
  source 1..4101: mol_type = other DNA
gacaagaagtacagtattggattggccatcgggacgaacagcgtgggctgggccgtcatcaccgacgagtacaaggtgccatccaagaagtttaaggttctggggaataccgaccgccactcgatcaagaaaaatctcatcggggcgctgcttttcgacagcggcgagacggcggaagcgacgcggctcaagcggacggctcgtcgccgttacacccggcgtaagaaccgcatctgttacctccaggagatattcagcaacgagatggcgaaggtggacgactcctttttccaccgtcttgaggagtccttcctggtcgaggaggacaagaagcacgagcgccacccgatcttcgggaacatcgtggacgaggtggcctaccacgagaagtaccccacgatctaccacctccgcaaaaaactcgtggactcaactgacaaggccgatttgaggcttatctacctcgccctcgcccacatgattaagttccgtgggcacttcctaatcgagggtgacctcaaccccgacaactctgacgtggacaagctgttcatccagcttgtgcagacctacaatcagctctttgaggagaatccgatcaacgcatctggtgtggacgcaaaggccatcctcagcgcgcggctgagcaagtctaggcggttggagaacctgatcgcccaactgcccggcgagaagaaaaatggcctcttcggcaacctgatcgccctgtcgctggggctcacgccgaacttcaagagtaactttgacctggcggaggacgctaagctccagctatctaaggacacatacgacgacgacctggacaacctgctggcccagatcggcgaccagtacgccgacctcttcctagccgccaagaacctgtccgacgccatcctcctcagcgacatcctgcgcgtgaacacggagatcacgaaggctccgctcagcgcctccatgattaagcggtacgacgagcaccaccaagacctaactttactcaaagccctcgtgcggcagcagcttcccgagaagtacaaagagatattttttgatcagtccaagaacggttatgcgggctacatcgacggcggcgcgagccaggaggagttctacaagttcatcaagcccatcctggagaagatggacggcacggaggagctgctcgtgaagctcaaccgtgaagacctcctgcgaaagcagcgaaccttcgacaacggttcgatcccgcaccagatccacctcggggagctgcacgccatcctgaggcgacaggaggacttctaccctttcctaaaggacaaccgcgagaagattgaaaaaatcctgacgtttcgcataccctactacgtcggcccgctggcgcgcggcaactcccggttcgcctggatgacccgtaagagcgaggagacgatcaccccgtggaacttcgaggaggtcgtggacaagggcgcgagcgcgcagagcttcatcgagcgcatgaccaacttcgacaagaacctcccgaacgagaaggtgctcccaaagcactccctcctgtacgagtatttcaccgtgtacaacgagttgacaaaggtgaagtacgtgacggagggaatgcggaagcctgcgttcctctcgggcgagcagaagaaggcaatcgtggacctgctcttcaagaccaaccggaaggtgacggtgaagcagctcaaggaggactacttcaaaaaaatcgagtgcttcgactccgtggagataagcggcgtggaggaccgattcaacgcctccctcggcacctaccacgacctccttaagatcatcaaggacaaggacttcctggacaacgaggagaacgaggacatcctggaggacatcgtgctcaccctgaccctcttcgaggaccgggagatgatcgaggagcgcctcaagacgtacgcccacttgttcgacgacaaggtgatgaagcagctcaagcggcggcgatacaccgggtggggccgcctatcccgcaaacttatcaacggcatccgcgacaagcagtccggcaagacgatcctggatttcctcaagtcggacgggttcgccaaccggaacttcatgcagctcatccacgacgacagcctcacgttcaaggaggacatccagaaggcccaagtgagcggtcaaggggacagcctccacgagcacattgcgaaccttgctgggagccctgcgatcaagaaggggatattgcaaaccgtgaaggtcgtggacgagttggtgaaggtcatggggcgacacaagcccgagaacatcgtgatcgagatggccagggaaaatcagaccacgcagaagggccaaaaaaacagccgcgagcggatgaagcggatcgaggagggcatcaaggagctggggtcgcagatcctcaaggagcacccggtggagaacacgcagctccagaacgagaagctgtacctctattacctacagaacgggcgggatatgtacgtggaccaggagctagacatcaaccgcctgtccgactacgacgtggaccatatcgtcccgcagtcgttcttgaaggacgacagcatcgacaacaaggtgctcacaagatcggataagaatcgaggcaagtccgacaacgtgccctcggaggaggtggtcaagaaaatgaaaaactactggcggcagttgctgaacgccaagctcattacgcagcggaagttcgacaacctgacgaaggctgaacgtggtgggctcagcgagctagacaaggcggggttcatcaagcggcagctcgtcgagacccggcagatcaccaagcacgtggcgcagatcctggactcgcgcatgaacaccaagtacgacgagaacgacaagctcatccgtgaggtgaaggtcatcacccttaagtctaagctggtcagtgacttccgcaaggacttccagttctacaaggtccgggagatcaacaactaccaccacgcgcacgacgcctacctcaacgcggtggtggggacggcgcttattaagaaatatcccaagctggaaagcgagttcgtttacggcgactacaaggtgtacgacgtccgcaagatgatcgcaaagtcggaacaggaaatcggaaaggcgacggccaaatatttcttttactccaacatcatgaatttttttaagacggagatcaccctggcgaacggggagatccgcaagcggcccctcatcgagaccaacggggagacgggcgagatcgtctgggacaagggccgggacttcgccaccgtgcggaaggtgctttctatgcctcaagtcaatatcgtcaaaaagacagaggtgcagaccggcgggttcagcaaggagtctatcctgccgaagcgcaactcggacaagctcatcgcgcgcaagaaagactgggaccccaaaaaatatggcgggttcgactcgccgaccgtcgcctacagcgtcctcgtggtggctaaggtcgagaagggcaagagcaaaaagctaaagtcggtgaaggagctgctgggcatcaccatcatggagcgctcgtctttcgagaagaatccaatcgacttcctagaggcgaaggggtacaaggaggtcaaaaaggatcttatcatcaaactgccgaagtacagtctgttcgagctggagaacgggcggaagcggatgctggctagtgcgggcgagttgcagaagggcaacgagttggcactgccctccaagtacgtgaacttcctgtacctggcctcccactacgagaagctcaaggggagccccgaggacaacgagcagaagcagctattcgtcgagcagcacaagcactacctggacgagatcatcgagcagatcagtgagttctccaagcgggtcatcctcgcggacgccaacctggacaaggtgctgagcgcgtacaacaagcacagggacaagccaatcagggaacaggccgagaacatcatccacctgttcaccctgaccaacctgggtgcaccggctgccttcaagtactttgacacgaccatcgaccggaagcgctacacctccacgaaggaggtgctggacgccacgctgatccaccagagcatcaccgggctctacgagacacggatcgacctgagccagcttggcggggac

SEQ ID NO: 145 - DNA, 4092 bp, synthetic construct
  source 1..4092: mol_type = other DNA
gacaaaaagtattccattggactcgctatcggcacgaacagcgtcgggtgggcggtcatcactgacgagtacaaggtgccgagcaagaagtttaaggtgctgggaaacaccgacaggcactcgatcaagaaaaatcttatcggggccctactcttcgactccggagaaaccgccgaggccacccggttgaagcgcacggcccgccgtcgctacaccaggcgcaagaaccggatctgctacctccaggagatattcagcaatgagatggcgaaggtggacgactcgttttttcacaggctagaggagtctttcctcgtggaggaggacaagaaacacgagcgccaccccatcttcggcaacatcgtggatgaggtggcatatcacgagaagtacccaaccatctaccacctccgcaaaaagctcgtggactctaccgacaaggccgacctccgtctgatctacctcgcgctggcccacatgattaagttccgaggacactttctgatcgagggcgacctgaacccagacaacagcgacgtggacaagctgttcatccaacttgtccagacctacaatcagctcttcgaggagaaccctatcaacgcctcgggcgtggacgcgaaggccatcctgtccgcccgcctgagcaagtcgcggcggctggagaacctgatcgcccagctccccggcgaaaaaaagaacggcctcttcggcaacctcatcgcgttgtcgctggggctcaccccgaacttcaagtccaacttcgacctggccgaggacgctaaactccagctctcgaaggatacctacgacgacgacctcgacaacctgctggcccagatcggcgaccagtacgcggaccttttcctggcggccaagaacctgagcgacgcgatcctccttagcgacatactccgtgtgaacaccgagatcacgaaggccccgctctccgcgtccatgattaagcgctacgacgagcaccaccaagaccttaccctgcttaaggcgctggtcaggcagcagttaccggagaagtacaaggagatcttttttgatcaatctaagaacggttacgccgggtacatcgacggcggcgcgtcccaggaggagttctacaagttcatcaagccgatcttggagaaaatggacgggaccgaggagctgctcgtgaagctcaaccgcgaagacctcctccgcaagcagcgcaccttcgacaacgggagcatcccgcaccagatccacctgggagagctgcacgcgatcctgcggagacaagaggacttctaccccttcctcaaggacaaccgggagaagattgaaaaaatacttacttttcgtatcccgtactacgtcgggccccttgcgaggggcaactccagattcgcgtggatgacccgcaagtccgaggagaccatcaccccgtggaacttcgaggaggtggtggacaagggcgcgtcggcccagtcgttcatcgagcgcatgaccaacttcgacaagaaccttccgaacgagaaggtgctcccgaagcacagcctgctctacgaatattttactgtgtacaacgagctgacgaaggtcaagtacgttacggaggggatgaggaagcccgccttcctctccggcgagcagaagaaagccattgtggatctcctgttcaagaccaaccgcaaggtgacggtgaaacagctcaaagaggactacttcaagaagatcgagtgcttcgactccgtagagatcagcggggtcgaggaccgcttcaacgcctcgctgggcacgtaccacgacctgctaaagattatcaaggacaaagacttcctagacaatgaggagaacgaggacattctggaggacatcgtgctgactctgacgctgttcgaagaccgcgagatgatcgaggagcggcttaagacgtacgcccacctgttcgacgacaaggtgatgaagcagttgaaacggcggcgctacaccgggtggggccgcctctcccgcaagctcatcaacggcatccgcgacaagcagtcggggaagacgatcctggacttcctcaagagcgacggcttcgccaaccgaaacttcatgcagctaatccacgacgacagcctgacgttcaaggaggacatccagaaggcccaagtgagcggccagggagactcgctacacgagcatatcgccaacctggctggcagcccggcgattaagaaaggaatcctccaaaccgtcaaagtggtggacgagctggtgaaggtgatgggccgccacaagcccgagaacattgtgatcgagatggcgcgggagaaccagacgacgcagaagggccaaaaaaatagcagggaaaggatgaagcgaatagaggaggggatcaaggagctggggagccagattctcaaagagcacccggtcgagaacacacagctccagaacgagaagctgtacctctactacctccaaaacggccgcgatatgtacgtggaccaggaactagacatcaaccggctgagcgactatgacgtggaccacatcgtgccgcagtccttcctcaaggacgactcgattgacaacaaagtgctcactagatccgacaagaacagaggcaagagcgataacgtcccgtcggaggaggtcgtcaagaaaatgaaaaactactggcggcagctcctaaacgccaagctcatcacgcagcgtaagttcgacaacctgacgaaggcggagcggggcgggctgagcgagctggacaaagcggggttcatcaagcggcagctcgttgagacgcggcagatcacaaagcacgtcgcgcaaatcctcgactcccgcatgaacaccaagtacgacgagaacgacaagctcatccgggaggtgaaggtcattacccttaaatcgaagctcgtcagcgactttcgtaaggacttccagttctacaaggtcagagagatcaacaactaccaccacgcccacgacgcctatctgaacgccgtggtgggcaccgcgcttattaagaagtaccccaagctggagtccgagttcgtgtacggcgactacaaggtttatgacgtcaggaagatgatcgccaagtcggaacaggagatcggaaaagctaccgccaaatatttcttctatagcaacatcatgaacttcttcaaaaccgagatcaccctcgccaacggcgagatccggaagcgcccgctcatcgagaccaacggggagaccggggagatcgtctgggacaaggggcgggacttcgctactgtccgaaaggtgctctccatgccacaagtgaatatcgtcaagaaaacagaggtgcagaccggagggttcagtaaggagtccatcctgcccaagcggaactccgacaagctaattgctcgcaaaaaggattgggatcctaaaaaatatggcggcttcgactcgcccacggtcgcctactctgtgctggtcgtggcgaaggtggagaagggcaagtccaagaagctcaagagcgtcaaggagctgctggggatcacgatcatggagcgtagttcgtttgagaagaatcccatcgacttcctggaggctaagggctacaaggaggtcaaaaaggacctcatcattaagctgccgaagtacagcctcttcgagctggagaacgggcggaagcgtatgctcgcctccgctggggagttacaaaaggggaacgagctggcgctgccgtctaagtacgtcaacttcctgtacctggcctcccactacgagaagctcaaggggtcgccggaggacaacgagcagaagcagctcttcgtagagcagcacaagcactacctggacgagatcatcgagcagatttcagagttctcaaagcgggtcatcctcgccgacgccaacctggacaaggtgctctcggcctacaacaagcaccgggacaagccgatccgcgaacaggccgaaaacatcatccacctgttcacgctcaccaacctcggtgccccggcggccttcaagtactttgacacgaccatcgaccggaagcgctatacctcgacgaaggaggtgctggacgccaccctgatccaccagtccatcaccgggctttacgagacccggatcgacctctcgcagcta

SEQ ID NO: 146 - DNA, 4101 bp, synthetic construct
  source 1..4101: mol_type = other DNA
gacaagaagtatagtattggactcgccatcggaaccaactctgtggggtgggctgttattacagatgaatataaggtgccatccaaaaagtttaaagttctgggcaatactgatagacactcaatcaagaagaatctgataggtgcacttctgtttgatagtggagagactgccgaggcaaccagacttaaaaggactgcaagaagaagatataccagaagaaagaataggatttgctatttgcaggaaatcttcagcaacgaaatggccaaggttgatgactcatttttccataggttggaggagagttttcttgtggaggaagataagaagcacgaaagacacccaattttcgggaatatagtggacgaggtggcttatcatgagaagtatcccactatctaccacctgagaaagaaacttgtggactcaaccgataaggctgatcttaggcttatatacttggcccttgcacatatgatcaaattcaggggccattttcttatcgaaggcgatcttaatcccgataactcagatgtggacaagctgtttatacaacttgtgcaaacctacaatcaactcttcgaggagaatcccattaacgcctccggcgtggatgcaaaagccatactgtcagccagactgagcaaaagtaggagactggagaatcttatagcccaactgcccggtgaaaagaagaatgggctcttcggaaatctgatcgctctttcattggggttgacacccaactttaagagtaactttgacttggcagaagatgcaaagttgcagctcagtaaagacacatatgacgatgaccttgacaatctcttggcacaaataggggatcaatacgctgaccttttcctcgctgccaagaacctcagcgacgctatactgttgtccgacattcttagggttaataccgaaattacaaaggcccctcttagtgcaagtatgatcaaaaggtatgatgagcatcaccaagaccttacactgctgaaggctctggttagacagcaactccctgaaaagtataaggaaatattcttcgaccaaagtaagaacgggtacgccggttatattgatgggggcgcaagtcaagaagaattttacaaattcatcaagccaattcttgaaaagatggacgggactgaggaattgctggtgaaactgaatagagaggaccttcttagaaaacagaggacatttgacaatgggtccatcccacaccagattcatctgggggaactccacgcaatattgaggagacaagaagacttttacccattccttaaggataatagagagaaaatcgaaaaaatcctgactttcaggattccttactatgttgggccactggccagggggaactcaagattcgcttggatgacaaggaagtcagaagaaaccataaccccttggaattttgaagaggtggttgataagggggcatcagcccagtctttcatagagaggatgaccaactttgataaaaatcttccaaatgagaaggttttgccaaaacatagtcttttgtacgagtactttactgtttataacgaattgaccaaggtgaagtatgtgaccgagggaatgaggaagccagcatttttgtccggggagcaaaagaaagcaatcgttgatcttctcttcaagaccaacagaaaagtgaccgtgaaacaactgaaggaagactacttcaaaaagatagaatgtttcgattcagtggaaattagcggtgttgaagacaggttcaatgcttcattgggtacttaccacgacctgttgaagataatcaaagacaaggactttctcgataatgaggagaacgaagacatcttggaagacattgtgcttacactcactttgtttgaggacagggaaatgattgaggaaagactcaaaacttacgctcatttgtttgatgataaggttatgaaacaactaaaaagaagaaggtacaccggctggggaagattgagtaggaaactgatcaacggtattagagataaacaatccggaaagactatcctcgatttccttaagagtgatggctttgcaaataggaattttatgcagctgattcatgacgactcacttaccttcaaagaagacatccaaaaagctcaggtgtctgggcaaggcgacagtctgcatgaacatatagctaacttggctgggagtcccgccatcaagaaggggatacttcaaacagttaaagttgtggacgaattggtgaaggtaatgggaaggcacaagcctgaaaatatagtgatagaaatggcaagggaaaatcaaacaacccagaagggacagaagaacagtagggaaaggatgaaaaggatagaagaggggatcaaagagcttggtagccagatcctcaaggaacatccagtggagaatacccaacttcaaaacgagaaactctatttgtactacttgcagaacggaagagatatgtatgtggaccaagagcttgatattaacaggctgagcgattatgacgttgaccacatagtgccccaatcattcctcaaggatgactctattgataataaggtgctgacaaggagtgacaagaatagagggaaatccgacaacgttccatccgaggaagttgtgaagaagatgaagaactactggaggcagttgctgaacgctaagctcattacccagaggaaattcgataacctgaccaaagcagagagaggcgggctgagcgaactcgataaagcaggtttcatcaagagacaactcgtggagactaggcaaattactaagcacgtggctcaaatactcgacagcaggatgaacacaaagtacgacgagaacgacaagctcattagagaggttaaggttattactctgaaaagtaaattggttagcgatttcagaaaggatttccaattctataaggttagagagatcaacaattatcatcatgcacatgatgcctatctgaatgctgtggttggtacagcccttatcaagaagtaccctaagctagagagcgagtttgtgtacggagattataaggtgtatgatgtgaggaaaatgatcgctaaaagtgagcaagagattggaaaggctaccgccaaatacttcttttattccaatattatgaatttcttcaagacagaaatcaccctggctaacggcgagataaggaagaggccgcttatcgaaactaatggggagacaggcgaaatagtgtgggacaaagggagggatttcgcaactgtgaggaaggttttgagcatgcctcaggtgaatatcgttaagaaaaccgaagttcaaactggagggttctctaaggaaagcattctccccaagaggaactccgacaagctgattgctagaaagaaagactgggaccccaagaagtatggcggattcgactcacccactgtggcatatagcgttctcgtggtggcaaaggttgaaaagggtaaatccaaaaaactcaaatccgtgaaggaactccttggcataactattatggaaaggagtagctttgaaaagaatcccatcgactttctcgaagctaagggctataaggaagttaagaaggaccttataatcaaacttccaaaatactccctttttgagttggaaaacggcagaaagagaatgttggccagtgccggggagcttcaaaagggcaacgaactggctctgcctagcaaatatgtgaactttttgtatctggcatcacactacgagaaacttaaaggctctcctgaggacaacgagcaaaaacagctctttgttgaacagcataagcactacctcgacgagattattgagcagatcagcgagttctcaaagagagttattctggctgacgctaatcttgacaaggttttgtccgcttacaacaaacacagggataagccaatcagggagcaggcagaaaacataatccatctctttaccctgacaaacctcggtgcccccgctgctttcaagtattttgatactaccattgacaggaagagatatacttccactaaggaagtgctcgacgcaaccctcatacaccaaagtatcacaggcctctatgaaactaggatagatttgtctcaacttgggggcgat

SEQ ID NO: 147 - DNA, 4101 bp, synthetic construct
  source 1..4101: mol_type = other DNA
gacaaaaagtattccatcgggcttgctatcggaaccaactctgtggggtgggcagttattaccgacgaatacaaggtgcccagcaagaagtttaaggttctggggaacacagatagacatagcataaagaaaaacctgataggcgcactgttgttcgactccggggaaacagccgaagctaccaggctgaagagaactgcaagaagaaggtacaccagaagaaaaaacagaatatgttatctccaagagattttctctaacgagatggccaaggtggacgactcattctttcacagactggaagaatctttccttgtggaagaagataagaaacacgagaggcaccctatttttggcaatatcgtggatgaggtggcttaccacgaaaaataccctacaatataccacctcaggaaaaaattggttgatagtacagacaaggccgacctcaggctcatctatttggccctggcccatatgattaaattcagggggcactttctcatcgagggagatttgaaccccgacaacagtgatgttgataagctctttattcagctcgtgcagacttacaatcagttgtttgaggaaaaccccattaatgcttccggggtggacgccaaggcaatcctttctgcaagactctcaaagtcaaggagactcgaaaatctgatagcacagcttccaggagagaagaagaacgggctctttggaaacctgatcgctctgtcactcggactcacacccaatttcaaaagcaattttgatttggcagaggacgctaagctgcaactcagtaaggatacctacgacgatgacttggataatctgctcgcacaaattggggaccagtatgcagacctgtttctcgcagctaagaacttgagtgacgccatattgctcagtgacatcctcagggttaataccgagattacaaaagctccactctctgcaagcatgatcaagaggtatgacgagcaccatcaagacctgacactccttaaggcgttggttaggcagcaacttcctgaaaagtataaggaaatcttcttcgatcaaagcaaaaacggctacgccggctatatagacgggggagcatcccaagaagaattttataagttcataaaacctatattggagaagatggacgggacagaggaattgctcgtgaaactgaacagggaggatctcctcaggaagcaaaggaccttcgacaatggctccatcccacatcagattcacctcggcgaactgcacgcaatactgagaagacaagaggacttttatcctttcctgaaggacaacagggagaaaatcgagaaaatcttgacattcagaatcccatactacgttgggcctctggccagaggtaacagtaggttcgcctggatgactaggaaatcagaggagactattacaccctggaactttgaagaagttgttgataagggagcttcagcacaatcattcatcgaaagaatgacaaactttgacaaaaatctgcctaatgagaaagtgctcccaaaacattccctgctgtatgagtattttaccgtttataacgagcttaccaaggtgaaatacgttactgaaggtatgagaaagccagcttttctttcaggggagcaaaagaaggctatcgtggatcttctctttaagaccaacagaaaggttaccgtgaagcagcttaaggaagactactttaaaaagatcgagtgttttgactcagtggaaataagcggtgttgaagatagattcaacgcatccttgggaacttatcatgatcttcttaagataatcaaggataaagactttctcgacaacgaggaaaacgaagatatactggaggacatagttctgacacttactttgttcgaggatagggagatgatcgaggaaagactgaaaacatatgctcaccttttcgacgacaaagttatgaaacaactcaagagaaggagatatacagggtgggggagattgagcaggaaactgattaatggtatcagagacaaacagtcaggaaaaacaatactcgactttttgaaatcagacgggttcgcaaataggaatttcatgcagcttatacacgacgattcacttacttttaaagaggacattcaaaaggctcaagttagtggacaaggtgactccctccacgaacacatcgcaaatctcgctggcagccctgcaattaagaagggtatactccagacagttaaggttgttgacgagctggttaaagtgatgggaagacacaaacccgagaacatagtgatagagatggccagggaaaaccaaaccactcaaaaagggcagaaaaattccagagagaggatgaaaaggattgaagaaggtatcaaggagctgggtagccaaattctgaaagaacatcctgtggaaaacactcaactccagaatgagaaactctatctgtactatctgcaaaatgggagagatatgtatgtggaccaggaactggacataaacaggctctcagattacgatgtggatcatatcgtgccacagtcctttcttaaggatgatagcatcgacaataaggtgcttaccaggtccgacaagaacaggggaaagtcagataacgtgccttctgaagaagttgttaaaaagatgaagaactactggagacagctgcttaacgctaagctcataacacagaggaagtttgacaacttgaccaaggccgagagaggcggactctcagaattggataaggcagggttcataaaaaggcagctggtggaaacaaggcagataactaaacatgtggctcagatcctcgatagtaggatgaatacaaaatacgatgagaacgacaagctcataagggaggttaaagtgataactctgaaatccaaactggttagcgattttaggaaggatttccagttttacaaagttagggagatcaacaattatcatcacgcccacgatgcctacttgaacgcagttgtgggtactgcacttatcaaaaagtaccctaagctggaatccgagtttgtttatggagactataaggtgtacgacgttagaaaaatgattgcaaagtcagagcaggagatagggaaagccactgcaaaatatttcttttatagcaatatcatgaatttctttaagacagaaatcacactggccaatggggaaataaggaagaggcccctgatcgaaactaatggcgagacaggggagattgtgtgggataaaggtagggactttgcaacagtgaggaaagtgctgagcatgccccaagttaatatcgttaaaaagaccgaggttcaaacagggggctttagtaaggaaagcattttgcccaagaggaatagtgacaaattgattgctaggaaaaaagattgggaccccaaaaagtatggcggatttgatagccccactgttgcttactccgtgctcgtggttgcaaaggtggagaagggaaagagcaagaaactgaagtcagttaaggaactccttggtatcactatcatggaaagaagctcctttgagaagaaccctattgacttcctggaggctaaagggtacaaagaggttaagaaagaccttatcattaaattgcccaaatatagtcttttcgagcttgaaaacggaagaaagaggatgcttgcatccgctggcgaattgcaaaagggcaatgagcttgctctcccttccaagtatgtgaacttcctttatcttgcctcacactatgaaaaactcaaaggttcacccgaagacaacgaacaaaagcaactatttgtggaacaacacaagcactacctggacgaaatcattgagcaaatttctgagttttcaaaaagggtaatcttggctgacgcaaatctcgacaaagttttgtcagcttacaacaaacatagagataagccaattagagagcaagctgagaatatcatccatctgtttaccctgactaaccttggagcgcctgctgcttttaaatatttcgacaccacaatcgacaggaagaggtacactagcactaaggaagttctcgacgccaccctcatccaccagagtattacaggcctgtacgagacaagaattgatctttctcaacttggtggtgac

SEQ ID NO: 148 - DNA, 4101 bp, synthetic construct
  source 1..4101: mol_type = other DNA
gataagaagtactcaatcggtctggcaatcggaaccaactctgtgggttgggcagtgattacagatgagtataaggtgccaagcaaaaaattcaaggtgctgggtaataccgacagacacagcattaagaagaatttgattggagcactcctctttgactcaggggaaacagcagaggcaacaaggctgaagaggacagcaaggcggaggtacacaaggcggaaaaacaggatatgctacctccaggaaatctttagcaacgagatggctaaagtggatgatagctttttccatagactcgaagaatcctttcttgttgaagaggacaaaaagcatgaaaggcatcccatcttcggcaatatagttgatgaggttgcataccatgagaagtaccccacaatctaccacctcagaaagaaacttgtggactccacagataaagcagacctgaggctcatatacctcgcactcgcacacatgatcaagttcagagggcactttctcatcgaaggtgacctgaatccagataattcagatgtggataaactgtttatacagctggtgcaaacatacaaccaacttttcgaggaaaacccaatcaatgcctccggtgttgatgcaaaggccatcctgtcagcaagactcagcaaaagcaggcggctcgaaaacctcatcgcccagcttcccggtgaaaagaagaacgggctctttggtaatctcatcgcattgagccttggtcttactccaaacttcaagagcaattttgatctggcagaggatgctaaactgcaactctcaaaggacacatatgacgatgaccttgacaatctgttggcccagatcggggaccaatatgcagacctcttcctggccgcaaagaatctgtcagatgcaatcctcttgtccgacatactgagagttaacactgagatcacaaaggcacctctgtccgcctccatgattaagagatacgatgagcatcaccaggatctgactttgctcaaagccctcgttagacagcagttgccagaaaagtacaaagaaatattctttgatcaatcaaaaaacggatatgcagggtacatcgacggtggggcaagccaggaagagttctacaaattcatcaaacctatcctggaaaagatggatgggacagaagagctgctggttaagctgaatagggaagacctcctcagaaagcagaggacatttgataacgggagcatccctcatcaaatccacctcggtgaactccatgctatcctgagaaggcaggaagacttttatccatttttgaaggacaatagggagaaaatcgaaaaaatcctgacattcagaatcccatactacgttggtcctctggcaagaggtaacagtaggttcgcatggatgacaaggaaaagcgaggagacaatcacaccctggaattttgaggaagttgttgacaagggtgccagcgcacaatcctttatcgaaagaatgacaaatttcgacaagaatctgcctaacgaaaaggttctcccaaagcattcactcctgtacgaatattttacagtttataacgaactgactaaagttaaatacgttaccgagggtatgaggaagccagcattcctttccggggaacagaagaaagctattgtggacctcctgttcaagacaaatagaaaagtgacagttaagcaactcaaagaggattacttcaaaaagatcgaatgttttgactctgtggagatcagcggggtggaggatagattcaacgccagcctgggtacatatcatgatctcctgaaaatcattaaagacaaggacttccttgacaacgaggagaacgaggacattctggaagacattgttctgaccctcacactctttgaggatagggagatgattgaggaaagactgaagacctacgcccacctctttgacgataaagtgatgaaacagctcaagagaagaaggtatacaggttgggggagactgagcaggaagttgatcaatgggattagggacaaacagtccgggaaaacaatcctcgattttctgaagtcagacggtttcgcaaacagaaattttatgcagctcattcacgatgacagcttgacattcaaggaagacatccaaaaggctcaagtgagcggccaaggggatagcctccacgagcatattgcaaatctggcaggttcaccagccatcaaaaagggcatacttcagacagttaaggttgtggacgaattggttaaagttatgggcaggcataagccagagaatatcgttatcgaaatggcaagggagaaccaaacaactcaaaaagggcagaaaaatagcagagagaggatgaaaagaatcgaggaagggatcaaggaacttgggtcccaaatcctcaaggagcacccagttgaaaatactcaactgcaaaacgagaagctctatctctactatctccaaaacgggagggatatgtatgttgaccaggagctggatattaacagactgtcagattatgatgttgatcatatcgtgccccagtcattcctgaaggacgattccatcgacaacaaagttctcacaaggtccgataaaaacaggggcaagtccgataacgttccaagcgaagaagtggtgaaaaagatgaaaaactattggagacaacttctgaatgcaaagttgattactcagagaaagtttgacaacctcacaaaagcagaaagaggcgggcttagcgaactcgataaggcagggtttatcaaaagacagctggttgagacaaggcagatcacaaaacatgtggcacagatccttgactcaaggatgaataccaagtatgatgagaatgataagttgatcagggaggttaaagttatcacactcaaatccaaactggtgtcagacttcaggaaagactttcaattttataaggtgagggagatcaataactaccaccatgcacatgacgcctacctgaacgcagtggtgggtacagcattgattaaaaaataccctaagctggagtctgagtttgtgtacggggactacaaggtgtacgacgtgaggaaaatgatagccaagtccgagcaggagatcgggaaagcaacagctaagtatttcttttacagtaatatcatgaatttctttaaaactgagattactctggcaaacggggagatcaggaaaagacccctcatcgagactaatggtgaaacaggtgagatcgtttgggacaaggggagggattttgctactgttagaaaagttctgagtatgccacaagtgaatattgtgaaaaagacagaagttcagacaggtgggttctccaaagaatccatcctgcccaagagaaattcagacaagctcatcgcaagaaagaaggactgggaccctaagaagtacggaggatttgacagccccaccgtggcctattccgtgcttgttgtggcaaaggtggagaaagggaagagcaaaaaactgaaatccgtgaaagaactgctgggaattaccatcatggaaagaagctcctttgagaagaacccaatcgacttcctggaagcaaaaggatataaggaagtgaaaaaggacctcattatcaagctcccaaaatactcacttttcgagttggagaacggtagaaagaggatgctggcaagcgcaggggaacttcagaaaggcaatgagctggcattgccatcaaagtatgtgaacttcctctacttggccagccattacgagaaacttaaaggtagcccagaagataacgagcaaaaacagctctttgtggaacagcataagcattatctggatgagatcatagaacaaatctcagagttttccaagagagttatcctcgcagatgcaaacctggataaggttctctcagcctataataagcatagagacaagccaattagagagcaagcagagaacattatccacttgttcactcttacaaacctgggggcaccagccgccttcaaatatttcgatacaacaatagacagaaagaggtataccagcaccaaagaagttctcgacgccacactgatccatcaatcaatcacaggcctttacgaaactaggatcgacttgtcacaactgggtggggat

SEQ ID NO: 149 - DNA, 3307 bp, synthetic construct
  source 1..3307: mol_type = other DNA
gagcaaggacacctacgacgacgacttggacaacctattggcccagataggtgaccagtatgcagacctcttccttgcggccaagaacttgagtgacgctatactgctcagtgacatcctgagggtgaacactgagatcactaaggcccctctctctgcctcaatgattaagcgttacgacgagcatcaccaggatctcaccctgcttaaggcccttgttcggcagcagctccctgagaagtacaaggagatattttttgaccagtctaagaacggctacgccggttacattgacggtggggcaagccaggaggagttctacaagttcatcaagccgatccttgagaagatggacggcaccgaggagctacttgtcaagttgaaccgggaagacctgctccggaaacagcgtacattcgacaacggcagcatccctcaccagatccacctgggcgaactacacgccatcctccgacgtcaggaggacttctatccattcttgaaagataacagggaaaaaatcgaaaaaatacttacgtttcgaataccttactacgtggggccccttgctcggggaaactccagattcgcatggatgaccaggaagtcagaggagaccatcacaccctggaactttgaggaggtggttgacaaaggtgcttctgcccagtccttcattgagcggatgactaacttcgacaagaacctgcccaacgagaaggtgctgccaaagcacagcctgctctacgaatactttactgtgtacaatgagctgacgaaggtgaagtacgtgacagaggggatgcggaagcccgctttcctgagcggcgagcaaaaaaaagcaatcgtggacctactgttcaagaccaaccgaaaggtgacagtgaagcagctcaaggaggactacttcaaaaaaatcgagtgcttcgactctgttgagataagcggcgtggaggaccgattcaacgcctcattgggaacctatcacgacctgctcaagatcattaaggacaaggacttcctggataatgaggagaatgaggacatcctggaggatattgtgctgacccttactctattcgaggacagggagatgatcgaggagcgactcaagacctacgctcacctgttcgacgacaaggttatgaagcaattgaagcgtaggcgatacacggggtggggaagactctcccgaaaactgataaacggcatcagggacaagcagtcagggaagacgatcttggacttcctgaaatccgacgggttcgccaaccgcaacttcatgcagctcattcacgacgactcactaacgttcaaagaggacattcagaaggctcaagtcagtggacaaggcgactccctgcacgagcacattgcaaaccttgcgggctccccggcgattaaaaagggcattctccaaacggttaaggtggtggacgagctggtgaaggtgatgggccgacacaagcctgagaacatcgtgatcgagatggccagggagaaccagactacccagaagggtcagaagaactctcgggaacgtatgaagcgtattgaggaggggattaaggagttgggctctcaaatcctcaaggagcaccctgtggagaacactcagctccaaaacgagaagctgtacctgtactacctgcaaaacgggcgcgatatgtacgtggatcaggagttggacatcaacaggcttagcgattacgacgtggaccacatcgtgccacagtcattcttaaaggacgacagcatcgacaacaaggttctgacgaggagcgacaagaatcgagggaaaagtgacaatgttccatccgaggaggtggtcaagaaaatgaagaactattggcgtcagcttctgaacgccaagctcatcacccagcggaaattcgacaacctgactaaggctgagcgaggcggactctccgagcttgacaaggctggcttcatcaagcggcagttggtcgaaacccgacagataacgaagcacgttgcccagatacttgactcccgtatgaacaccaagtacgacgagaacgacaagctcatcagggaggtgaaggtcattacccttaagtccaaactcgtcagcgactttcgtaaggacttccagttctacaaggtgcgcgagatcaataactaccaccacgcacacgacgcctacctgaacgcagtggttggaaccgcgttgattaaaaagtaccccaagttggagtcggagttcgtttacggggactacaaggtgtacgacgttcggaagatgatcgccaagtctgaacaggagatcgggaaagcaaccgccaagtatttcttctatagcaacatcatgaacttctttaaaaccgagatcacacttgccaatggcgagatccgtaagaggccgctgatcgagacaaatggggagactggcgagatcgtgtgggacaagggccgcgacttcgcaaccgttcggaaagtcttgtccatgcctcaagtcaacatcgtcaagaagactgaggtgcaaacaggcgggttctcgaaggagtccatactgcccaagaggaactcagacaagctcatagcacgcaaaaaagactgggatccaaagaaatacggcgggttcgactcgccgacagtcgcatactccgtgttagtggtggctaaagtggaaaaggggaagtccaagaagctcaagtccgtcaaggagttgctcgggatcaccattatggaacggtcctcattcgagaagaatcccattgacttcctagaggcgaagggctacaaagaggtcaaaaaggacctaattattaagctccccaagtattcactcttcgaacttgaaaatggtcgtaagcggatgttggcaagcgctggagagcttcagaaggggaacgagcttgcactgccttccaagtacgtgaacttcctgtacctcgcctctcattacgagaagttgaagggctcaccggaggacaacgagcagaagcagttgttcgtggagcagcacaagcactacctcgacgagatcattgagcagataagtgagttcagcaaacgggtgatccttgccgacgctaacctggacaaggtgctgagcgcctacaacaagcacagagacaagccgatccgagagcaagcggagaacatcatacacctgttcaccctcacgaacctcggggctcccgcagccttcaaatattttgacacgaccatcgaccgtaaacgctacactagcacgaaggaggtgctggacgctacccttatccaccagtccatcaccggcctgtacgagacgagaatcgacttgtcgcagctcggtggtgac

SEQ ID NO: 150 - DNA, 4101 bp, synthetic construct
  source 1..4101: mol_type = other DNA
gacaaaaaatactcaattggtctggcaattgggaccaacagtgtcggatgggccgtgattaccgacgagtacaaggtgccgtccaaaaaattcaaggtgcttgggaacaccgaccgccactcgatcaagaaaaacctaatcggtgcgttgcttttcgacagtggggagaccgccgaggcaacacgcttaaaacgcacagctaggaggagatatacacggcgcaagaaccgaatatgctacttacaggagatattctccaatgagatggcgaaggtggacgactctttcttccatcggcttgaggaatccttcctggtcgaggaggacaagaagcacgagcgacacccgatattcgggaacatcgttgatgaggtggcgtaccacgagaagtacccaacgatataccacttacgcaagaagctcgtggactctacggacaaggccgacttgcgccttatctacttggcactggcccacatgattaagttccgaggccacttccttatcgagggtgacctgaaccccgataactccgacgtggacaagctcttcatccaactcgtccagacatacaaccagctattcgaggagaatcctatcaacgcctctggggtggacgctaaagctatcctctcagcccgcctgtcaaagtcgaggaggttggagaacctaatcgcccagcttccaggcgagaagaaaaatgggctgttcggaaaccttatcgcactctcactgggcctaaccccgaacttcaagtccaacttcgacctggcagaggacgcgaaattgcagttgtcgaaagacacctatgacgatgacctggacaacctgttggcccagataggggaccagtacgccgacctgttcctagcggccaagaacctgtccgacgccatcttgctgtcggatatactgcgggtgaacaccgagatcactaaagcacctctctccgccagcatgattaagcgttacgacgagcaccaccaagatttgaccctgctaaaggcacttgtacggcagcagcttcccgagaagtacaaggagatctttttcgaccaaagcaagaacggctacgccgggtacatcgacggaggtgccagccaggaggagttctacaagttcattaagcccatcctggagaagatggacgggactgaggaactacttgtgaagctgaaccgggaagacttactacggaagcagcgtaccttcgacaacggttctatcccacatcagatccatcttggggagttgcacgcgatcctgcgacgccaggaggacttttaccccttcctgaaagacaaccgcgagaaaatcgagaagatactgaccttcagaataccttactacgtcggaccccttgcgcgaggcaactcaagattcgcgtggatgaccaggaaatcagaggagaccatcacaccctggaatttcgaggaggtggttgacaagggtgcctccgcccagtcctttatcgaacgaatgaccaacttcgacaagaacttgcccaacgagaaggtgctccccaaacacagcctcctctacgaatatttcacagtgtacaacgagcttactaaagttaagtatgttactgagggcatgaggaaacccgccttcctgtcaggcgagcagaagaaagctattgtggacctccttttcaagaccaaccggaaggtgacagtgaagcagctcaaggaggactacttcaagaagatagagtgcttcgacagcgtggagatcagcggggtggaggacagattcaatgcctctctcggaacataccacgacttgcttaagatcatcaaggacaaggacttcctcgacaacgaggaaaacgaggatattctggaggatattgttctgactcttaccctgttcgaggaccgggagatgatcgaggagcgtctcaagacctacgcccacctgttcgacgacaaagttatgaagcagctcaagcgtcggagatataccggatggggccgtctgtctcggaagctcatcaacgggatcagggacaagcagtcagggaagacgatcttagacttccttaagtctgacggcttcgccaacaggaacttcatgcagttgatccacgacgacagccttaccttcaaggaggacatccagaaggcccaagtgagtggccagggtgacagcctccacgagcatattgctaatcttgcgggttccccagcgattaaaaagggcatacttcaaaccgttaaggtggtggacgagcttgtcaaggtgatggggcgacacaagcccgagaacatcgtgatcgagatggccagggagaaccagaccacccagaaggggcagaagaatagccgagaacgcatgaagcgcatcgaggaggggattaaggagctagggagccagatcctcaaggaacatcccgtcgagaacacccagctccagaacgagaagctatacctctactacttgcaaaacgggagggatatgtacgtggatcaggagttggacattaaccgcctaagcgactacgacgtagatcacatcgtgcctcagtcattcctcaaagacgacagcattgacaacaaagtcttgacccgatccgacaagaaccgaggaaaatccgacaatgtgccctcagaggaggtcgtcaagaaaatgaagaactattggaggcagctacttaacgccaaactcataacccagcggaagttcgacaacctgacaaaggctgagcggggtgggctcagcgagcttgacaaggctggcttcatcaagcggcagttggtggagacaagacagataacgaagcacgtggctcagatcctggactctcgcatgaacacgaagtacgacgagaacgacaaattgatccgcgaggtcaaggttattacgctcaagagcaaacttgtcagcgatttccgcaaggacttccagttctacaaggtgagggagattaacaactaccaccatgcacatgatgcctacttgaacgcagtggtggggaccgcgcttattaaaaagtaccctaagttggagtcagagttcgtttatggggactacaaggtgtacgacgtccggaagatgattgcaaagtctgaacaggaaatcgggaaggccaccgccaaatatttcttctacagtaacattatgaatttttttaagactgaaattactctcgcaaacggcgagatcaggaagcgtcccctcatcgagacaaacggggagaccggggagatagtctgggacaaggggcgggacttcgctacggtgaggaaggtgctctcgatgccacaagtgaacatcgtcaaaaagacagaggtgcagaccggtggcttctcaaaggagtcaatcctgccaaaacgtaacagcgacaagctcatcgcccgcaagaaagactgggaccctaagaagtatggtgggttcgactcaccgacggtcgcatactccgttctggtcgtggcaaaggtggaaaagggcaagtccaaaaaactgaaatccgtgaaggagttgcttggcattaccatcatggaacgcagcagcttcgagaagaaccccattgacttcctggaggctaaagggtacaaggaggtcaagaaagatttaattattaagctacctaagtacagcttgttcgagctggagaacggccgaaaacgaatgctcgcatccgccggggaacttcaaaagggcaacgagcttgcgctgccctccaagtacgtgaacttcctgtacttggcatcccactacgagaaactcaagggtagcccagaggacaacgagcagaagcagctattcgtggagcagcacaagcactacctcgacgagataatcgagcagatcagtgagttcagtaagcgggtgatactcgcggacgccaacttggacaaggtgcttagtgcctacaacaagcaccgtgacaagcccatccgagaacaggctgagaacatcatccaccttttcactctgacaaacctcggtgctcccgccgccttcaaatacttcgacactaccatcgacaggaagcgctacacatctacgaaggaagttcttgacgctacgcttattcatcagtctatcacagggctgtacgagacaaggatcgaccttagccaactcggcggggat

SEQ ID NO: 151 - DNA, 4101 bp, synthetic construct
  source 1..4101: mol_type = other DNA
gacaagaagtacagcatcgggctggcgatcgggaccaactccgtcggctgggctgtgattaccgacgagtacaaggtgccatccaagaagttcaaggtcctcggcaacactgaccggcacagcattaagaagaacctgattggggcgctgctgttcgattcgggggagactgcggaggcgaccaggctgaagcggactgcgcgccggaggtacaccaggaggaagaatcggatctgctacctccaggagattttctcgaatgagatggccaaggtggacgattccttcttccatcgcctggaggagtcgttcctcgttgaggaggacaagaagcatgagaggcatcccattttcgggaatatcgttgacgaggtggcttaccatgagaagtacccgaccatctaccatctgcggaagaagctcgtcgattcgaccgataaggccgacctgcggctgatctacctggccctcgcgcacatgattaagttccggggccatttcctcatcgagggcgacctcaacccggacaactcggacgtggataagctcttcattcagctcgtgcagacatacaaccagctcttcgaggagaatcccattaacgcctcgggggtcgacgctaaggctattctctcggctcggctgtcgaagtcgcgccggctggagaatctcattgcccagctcccaggcgagaagaagaacggcctcttcggcaacctgattgccctgtcgctggggctcacaccgaatttcaagtcgaacttcgacctcgccgaggacgctaagctccagctcagcaaggatacttacgatgatgacctcgataacctgctcgcccagattggggatcagtacgcggatctgttcctcgcggccaagaatctcagcgatgctattctcctgtcggacattctccgcgtcaacacagagattactaaggccccactgtcggcgagcatgattaagaggtacgatgagcatcatcaggacctgacactgctcaaggcgctggtccggcagcagctccccgagaagtacaaggagattttcttcgatcagtcaaagaatgggtacgcgggctacattgatggcggcgcgtcccaggaggagttctacaagttcattaagcccatcctggagaagatggacgggaccgaggagctgctggtgaagctcaatcgggaggacctgctccggaagcagcgcacattcgacaatggctcgattcctcaccagattcacctgggcgagctgcacgccattctccgcaggcaggaggacttctacccgttcctcaaggacaaccgcgagaagatcgagaagatcctgaccttccggattccatactacgtggggccgctcgcgcgggggaactcccggttcgcgtggatgactcgcaagtccgaagaaacgattacaccgtggaatttcgaggaggtcgtcgacaagggcgctagtgcgcagtcattcattgagaggatgaccaatttcgataagaacctgcctaacgagaaggtgctgccgaagcattcgctgctctacgagtacttcaccgtttacaatgagctgaccaaggtgaagtatgtgactgagggcatgaggaagccagcgttcctgagcggcgagcagaagaaggctatcgtggacctgctcttcaagactaaccggaaggtgactgtgaagcagctcaaggaggactacttcaagaagattgagtgcttcgattccgttgagattagcggggtggaggatcggttcaatgcttcgctcgggacataccacgatctcctgaagatcattaaggataaggacttcctcgacaacgaggagaacgaggacattctcgaagatattgtcctgaccctcaccctcttcgaggatcgggagatgatcgaggagaggctcaagacatacgctcatctgttcgatgataaggtcatgaagcagctgaagcgcaggcggtacacagggtgggggcggctgagccggaagctgatcaacgggattcgggataagcagtccgggaagacaattctcgacttcctcaagtccgacgggttcgctaaccggaacttcatgcagctcattcatgatgactcgctgacattcaaggaggatattcagaaggcgcaggtttcggggcagggcgactcgctccacgagcatattgcgaatctggcgggctcccccgcgattaagaagggcattctgcaaaccgtcaaggtggttgatgagctggtcaaggtcatggggcggcataagccagagaatattgtcatcgagatggcgcgggagaatcagaccacacagaaggggcagaagaactcacgggagcggatgaagcgcatcgaggagggcatcaaggagctggggtcgcagatcctgaaggagcatcccgtggagaacactcagctgcaaaatgagaagctgtacctctactacctccagaacgggagggacatgtatgtggatcaggagctggatattaataggctgagcgattacgatgtcgaccacattgtcccacagtcgttcctgaaggacgacagcattgacaacaaggtgctgacccgctcggataagaacaggggcaagagcgataatgttccaagcgaggaggttgtgaagaagatgaagaactactggcggcagctcctgaacgcgaagctcatcacacagcggaagttcgacaacctcaccaaggctgagcgcgggggcctgagcgagctggacaaggcggggttcattaagaggcagctggtcgagacacggcagattacaaagcatgttgcgcagattctcgattcccggatgaacaccaagtacgatgagaacgataagctgattcgggaggtcaaggtaattaccctgaagtccaagctggtgtccgacttcaggaaggacttccagttctacaaggttcgggagatcaacaactaccaccacgcgcatgatgcctacctcaacgcggtcgtggggaccgctctcatcaagaagtacccaaagctggagtcagagttcgtctacggggattacaaggtttacgacgtgcggaagatgatcgctaagagcgagcaggagattggcaaggctaccgctaagtacttcttctactccaacatcatgaacttcttcaagacagagattaccctcgcgaatggcgagatccggaagaggcccctcatcgagacaaatggggagacaggggagattgtctgggataaggggcgggatttcgcgaccgtccggaaggtcctgtcgatgccccaggttaatattgtcaagaagactgaggtccagactggcggcttctcaaaggagtcgattctcccaaagaggaactccgataagctcattgctcggaagaaggattgggaccccaagaagtacgggggattcgactcccccactgttgcttactctgttctggttgttgctaaggtggagaaggggaagtcgaagaagctgaagagcgtgaaggagctgctcgggattacaattatggagaggtcatccttcgagaagaatcccatcgacttcctggaggccaagggctacaaggaggtgaagaaggacctgattattaagctgcccaagtactcgctcttcgagctggagaatgggcggaagcggatgctggcgtccgcgggggagctgcaaaaggggaacgagctggcgctcccctccaagtatgtgaacttcctctacctggcgtcgcactacgagaagctgaaggggtccccagaggataatgagcagaagcagctcttcgtcgagcagcataagcactacctggacgagattatcgagcagattagcgagttctcgaagcgggtcatcctcgcggatgcgaacctggataaggtgctcagcgcctacaataagcaccgggacaagccgattcgggagcaggcggagaatattattcacctcttcacactcaccaacctcggggcaccagctgcgttcaagtacttcgacactactatcgaccggaagcggtacacctcgacgaaggaggtgctcgacgccaccctcattcaccagtcgatcacaggcctgtacgagacacggattgacctgtcccagctcgggggcgac

SEQ ID NO: 152 - DNA, 4101 bp, synthetic construct
  source 1..4101: mol_type = other DNA
gacaagaagtacagcatcggcctggacatcggcaccaactctgtgggctgggccgtgatcaccgacgagtacaaggtgcccagcaagaaattcaaggtgctgggcaacaccgaccggcacagcatcaagaagaacctgatcggagccctgctgttcgacagcggcgaaacagccgaggccacccggctgaagagaaccgccagaagaagatacaccagacggaagaaccggatctgctatctgcaagagatcttcagcaacgagatggccaaggtggacgacagcttcttccacagactggaagagtccttcctggtggaagaggataagaagcacgagcggcaccccatcttcggcaacatcgtggacgaggtggcctaccacgagaagtaccccaccatctaccacctgagaaagaaactggtggacagcaccgacaaggccgacctgcggctgatctatctggccctggcccacatgatcaagttccggggccacttcctgatcgagggcgacctgaaccccgacaacagcgacgtggacaagctgttcatccagctggtgcagacctacaaccagctgttcgaggaaaaccccatcaacgccagcggcgtggacgccaaggccatcctgtctgccagactgagcaagagcagacggctggaaaatctgatcgcccagctgcccggcgagaagaagaatggcctgttcggaaacctgattgccctgagcctgggcctgacccccaacttcaagagcaacttcgacctggccgaggatgccaaactgcagctgagcaaggacacctacgacgacgacctggacaacctgctggcccagatcggcgaccagtacgccgacctgtttctggccgccaagaacctgtccgacgccatcctgctgagcgacatcctgagagtgaacaccgagatcaccaaggcccccctgagcgcctctatgatcaagagatacgacgagcaccaccaggacctgaccctgctgaaagctctcgtgcggcagcagctgcctgagaagtacaaagagattttcttcgaccagagcaagaacggctacgccggctacattgacggcggagccagccaggaagagttctacaagttcatcaagcccatcctggaaaagatggacggcaccgaggaactgctcgtgaagctgaacagagaggacctgctgcggaagcagcggaccttcgacaacggcagcatcccccaccagatccacctgggagagctgcacgccattctgcggcggcaggaagatttttacccattcctgaaggacaaccgggaaaagatcgagaagatcctgaccttccgcatcccctactacgtgggccctctggccaggggaaacagcagattcgcctggatgaccagaaagagcgaggaaaccatcaccccctggaacttcgaggaagtggtggacaagggcgcttccgcccagagcttcatcgagcggatgaccaacttcgataagaacctgcccaacgagaaggtgctgcccaagcacagcctgctgtacgagtacttcaccgtgtataacgagctgaccaaagtgaaatacgtgaccgagggaatgagaaagcccgccttcctgagcggcgagcagaaaaaggccatcgtggacctgctgttcaagaccaaccggaaagtgaccgtgaagcagctgaaagaggactacttcaagaaaatcgagtgcttcgactccgtggaaatctccggcgtggaagatcggttcaacgcctccctgggcacataccacgatctgctgaaaattatcaaggacaaggacttcctggacaatgaggaaaacgaggacattctggaagatatcgtgctgaccctgacactgtttgaggacagagagatgatcgaggaacggctgaaaacctatgcccacctgttcgacgacaaagtgatgaagcagctgaagcggcggagatacaccggctggggcaggctgagccggaagctgatcaacggcatccgggacaagcagtccggcaagacaatcctggatttcctgaagtccgacggcttcgccaacagaaacttcatgcagctgatccacgacgacagcctgacctttaaagaggacatccagaaagcccaggtgtccggccagggcgatagcctgcacgagcacattgccaatctggccggcagccccgccattaagaagggcatcctgcagacagtgaaggtggtggacgagctcgtgaaagtgatgggccggcacaagcccgagaacatcgtgatcgaaatggccagagagaaccagaccacccagaagggacagaagaacagccgcgagagaatgaagcggatcgaagagggcatcaaagagctgggcagccagatcctgaaagaacaccccgtggaaaacacccagctgcagaacgagaagctgtacctgtactacctgcagaatgggcgggatatgtacgtggaccaggaactggacatcaaccggctgtccgactacgatgtggaccatatcgtgcctcagagctttctgaaggacgactccatcgacaacaaggtgctgaccagaagcgacaagaaccggggcaagagcgacaacgtgccctccgaagaggtcgtgaagaagatgaagaactactggcggcagctgctgaacgccaagctgattacccagagaaagttcgacaatctgaccaaggccgagagaggcggcctgagcgaactggataaggccggcttcatcaagagacagctggtggaaacccggcagatcacaaagcacgtggcacagatcctggactcccggatgaacactaagtacgacgagaatgacaagctgatccgggaagtgaaagtgatcaccctgaagtccaagctggtgtccgatttccggaaggatttccagttttacaaagtgcgcgagatcaacaactaccaccacgcccacgacgcctacctgaacgccgtcgtgggaaccgccctgatcaaaaagtaccctaagctggaaagcgagttcgtgtacggcgactacaaggtgtacgacgtgcggaagatgatcgccaagagcgagcaggaaatcggcaaggctaccgccaagtacttcttctacagcaacatcatgaactttttcaagaccgagattaccctggccaacggcgagatccggaagcggcctctgatcgagacaaacggcgaaaccggggagatcgtgtgggataagggccgggattttgccaccgtgcggaaagtgctgagcatgccccaagtgaatatcgtgaaaaagaccgaggtgcagacaggcggcttcagcaaagagtctatcctgcccaagaggaacagcgataagctgatcgccagaaagaaggactgggaccctaagaagtacggcggcttcgacagccccaccgtggcctattctgtgctggtggtggccaaagtggaaaagggcaagtccaagaaactgaagagtgtgaaagagctgctggggatcaccatcatggaaagaagcagcttcgagaagaatcccatcgactttctggaagccaagggctacaaagaagtgaaaaaggacctgatcatcaagctgcctaagtactccctgttcgagctggaaaacggccggaagagaatgctggcctctgccggcgaactgcagaagggaaacgaactggccctgccctccaaatatgtgaacttcctgtacctggccagccactatgagaagctgaagggctcccccgaggataatgagcagaaacagctgtttgtggaacagcacaagcactacctggacgagatcatcgagcagatcagcgagttctccaagagagtgatcctggccgacgctaatctggacaaagtgctgtccgcctacaacaagcaccgggataagcccatcagagagcaggccgagaatatcatccacctgtttaccctgaccaatctgggagcccctgccgccttcaagtactttgacaccaccatcgaccggaagaggtacaccagcaccaaagaggtgctggacgccaccctgatccaccagagcatcaccggcctgtacgagacacggatcgacctgtctcagctgggaggtgac

SEQ ID NO: 153 - DNA, 4101 bp, synthetic construct
  source 1..4101: mol_type = other DNA
gacaagaagtacagcatcggcctggacatcggcaccaactctgtgggctgggccgtgatcaccgacgagtacaaggtgcccagcaagaaattcaaggtgctgggcaacaccgaccggcacagcatcaagaagaacctgatcggagccctgctgttcgacagcggcgaaacagccgaggccacccggctgaagagaaccgccagaagaagatacaccagacggaagaaccggatctgctatctgcaagagatcttcagcaacgagatggccaaggtggacgacagcttcttccacagactggaagagtccttcctggtggaagaggataagaagcacgagcggcaccccatcttcggcaacatcgtggacgaggtggcctaccacgagaagtaccccaccatctaccacctgagaaagaaactggtggacagcaccgacaaggccgacctgcggctgatctatctggccctggcccacatgatcaagttccggggccacttcctgatcgagggcgacctgaaccccgacaacagcgacgtggacaagctgttcatccagctggtgcagacctacaaccagctgttcgaggaaaaccccatcaacgccagcggcgtggacgccaaggccatcctgtctgccagactgagcaagagcagacggctggaaaatctgatcgcccagctgcccggcgagaagaagaatggcctgttcggaaacctgattgccctgagcctgggcctgacccccaacttcaagagcaacttcgacctggccgaggatgccaaactgcagctgagcaaggacacctacgacgacgacctggacaacctgctggcccagatcggcgaccagtacgccgacctgtttctggccgccaagaacctgtccgacgccatcctgctgagcgacatcctgagagtgaacaccgagatcaccaaggcccccctgagcgcctctatgatcaagagatacgacgagcaccaccaggacctgaccctgctgaaagctctcgtgcggcagcagctgcctgagaagtacaaagagattttcttcgaccagagcaagaacggctacgccggctacattgacggcggagccagccaggaagagttctacaagttcatcaagcccatcctggaaaagatggacggcaccgaggaactgctcgtgaagctgaacagagaggacctgctgcggaagcagcggaccttcgacaacggcagcatcccccaccagatccacctgggagagctgcacgccattctgcggcggcaggaagatttttacccattcctgaaggacaaccgggaaaagatcgagaagatcctgaccttccgcatcccctactacgtgggccctctggccaggggaaacagcagattcgcctggatgaccagaaagagcgaggaaaccatcaccccctggaacttcgaggaagtggtggacaagggcgcttccgcccagagcttcatcgagcggatgaccaacttcgataagaacctgcccaacgagaaggtgctgcccaagcacagcctgctgtacgagtacttcaccgtgtataacgagctgaccaaagtgaaatacgtgaccgagggaatgagaaagcccgccttcctgagcggcgagcagaaaaaggccatcgtggacctgctgttcaagaccaaccggaaagtgaccgtgaagcagctgaaagaggactacttcaagaaaatcgagtgcttcgactccgtggaaatctccggcgtggaagatcggttcaacgcctccctgggcacataccacgatctgctgaaaattatcaaggacaaggacttcctggacaatgaggaaaacgaggacattctggaagatatcgtgctgaccctgacactgtttgaggacagagagatgatcgaggaacggctgaaaacctatgcccacctgttcgacgacaaagtgatgaagcagctgaagcggcggagatacaccggctggggcaggctgagccggaagctgatcaacggcatccgggacaagcagtccggcaagacaatcctggatttcctgaagtccgacggcttcgccaacagaaacttcatgcagctgatccacgacgacagcctgacctttaaagaggacatccagaaagcccaggtgtccggccagggcgatagcctgcacgagcacattgccaatctggccggcagccccgccattaagaagggcatcctgcagacagtgaaggtggtggacgagctcgtgaaagtgatgggccggcacaagcccgagaacatcgtgatcgaaatggccagagagaaccagaccacccagaagggacagaagaacagccgcgagagaatgaagcggatcgaagagggcatcaaagagctgggcagccagatcctgaaagaacaccccgtggaaaacacccagctgcagaacgagaagctgtacctgtactacctgcagaatgggcgggatatgtacgtggaccaggaactggacatcaaccggctgtccgactacgatgtggaccatatcgtgcctcagagctttctggccgacgactccatcgacaacaaggtgctgaccagaagcgacaagaaccggggcaagagcgacaacgtgccctccgaagaggtcgtgaagaagatgaagaactactggcggcagctgctgaacgccaagctgattacccagagaaagttcgacaatctgaccaaggccgagagaggcggcctgagcgaactggataaggccggcttcatcaagagacagctggtggaaacccggcagatcacaaagcacgtggcacagatcctggactcccggatgaacactaagtacgacgagaatgacaagctgatccgggaagtgaaagtgatcaccctgaagtccaagctggtgtccgatttccggaaggatttccagttttacaaagtgcgcgagatcaacaactaccaccacgcccacgacgcctacctgaacgccgtcgtgggaaccgccctgatcaaaaagtaccctgccctggaaagcgagttcgtgtacggcgactacaaggtgtacgacgtgcggaagatgatcgccaagagcgagcaggaaatcggcaaggctaccgccaagtacttcttctacagcaacatcatgaactttttcaagaccgagattaccctggccaacggcgagatccggaaggcccctctgatcgagacaaacggcgaaaccggggagatcgtgtgggataagggccgggattttgccaccgtgcggaaagtgctgagcatgccccaagtgaatatcgtgaaaaagaccgaggtgcagacaggcggcttcagcaaagagtctatcctgcccaagaggaacagcgataagctgatcgccagaaagaaggactgggaccctaagaagtacggcggcttcgacagccccaccgtggcctattctgtgctggtggtggccaaagtggaaaagggcaagtccaagaaactgaagagtgtgaaagagctgctggggatcaccatcatggaaagaagcagcttcgagaagaatcccatcgactttctggaagccaagggctacaaagaagtgaaaaaggacctgatcatcaagctgcctaagtactccctgttcgagctggaaaacggccggaagagaatgctggcctctgccggcgaactgcagaagggaaacgaactggccctgccctccaaatatgtgaacttcctgtacctggccagccactatgagaagctgaagggctcccccgaggataatgagcagaaacagctgtttgtggaacagcacaagcactacctggacgagatcatcgagcagatcagcgagttctccaagagagtgatcctggccgacgctaatctggacaaagtgctgtccgcctacaacaagcaccgggataagcccatcagagagcaggccgagaatatcatccacctgtttaccctgaccaatctgggagcccctgccgccttcaagtactttgacaccaccatcgaccggaagaggtacaccagcaccaaagaggtgctggacgccaccctgatccaccagagcatcaccggcctgtacgagacacggatcgacctgtctcagctgggaggtgac

SEQ ID NO: 154 - DNA, 4101 bp, synthetic construct
  source 1..4101: mol_type = other DNA
gacaagaagtacagcatcggcctggccatcggcaccaactctgtgggctgggccgtgatcaccgacgagtacaaggtgcccagcaagaaattcaaggtgctgggcaacaccgaccggcacagcatcaagaagaacctgatcggagccctgctgttcgacagcggcgaaacagccgaggccacccggctgaagagaaccgccagaagaagatacaccagacggaagaaccggatctgctatctgcaagagatcttcagcaacgagatggccaaggtggacgacagcttcttccacagactggaagagtccttcctggtggaagaggataagaagcacgagcggcaccccatcttcggcaacatcgtggacgaggtggcctaccacgagaagtaccccaccatctaccacctgagaaagaaactggtggacagcaccgacaaggccgacctgcggctgatctatctggccctggcccacatgatcaagttccggggccacttcctgatcgagggcgacctgaaccccgacaacagcgacgtggacaagctgttcatccagctggtgcagacctacaaccagctgttcgaggaaaaccccatcaacgccagcggcgtggacgccaaggccatcctgtctgccagactgagcaagagcagacggctggaaaatctgatcgcccagctgcccggcgagaagaagaatggcctgttcggaaacctgattgccctgagcctgggcctgacccccaacttcaagagcaacttcgacctggccgaggatgccaaactgcagctgagcaaggacacctacgacgacgacctggacaacctgctggcccagatcggcgaccagtacgccgacctgtttctggccgccaagaacctgtccgacgccatcctgctgagcgacatcctgagagtgaacaccgagatcaccaaggcccccctgagcgcctctatgatcaagagatacgacgagcaccaccaggacctgaccctgctgaaagctctcgtgcggcagcagctgcctgagaagtacaaagagattttcttcgaccagagcaagaacggctacgccggctacattgacggcggagccagccaggaagagttctacaagttcatcaagcccatcctggaaaagatggacggcaccgaggaactgctcgtgaagctgaacagagaggacctgctgcggaagcagcggaccttcgacaacggcagcatcccccaccagatccacctgggagagctgcacgccattctgcggcggcaggaagatttttacccattcctgaaggacaaccgggaaaagatcgagaagatcctgaccttccgcatcccctactacgtgggccctctggccaggggaaacagcagattcgcctggatgaccagaaagagcgaggaaaccatcaccccctggaacttcgaggaagtggtggacaagggcgcttccgcccagagcttcatcgagcggatgaccaacttcgataagaacctgcccaacgagaaggtgctgcccaagcacagcctgctgtacgagtacttcaccgtgtataacgagctgaccaaagtgaaatacgtgaccgagggaatgagaaagcccgccttcctgagcggcgagcagaaaaaggccatcgtggacctgctgttcaagaccaaccggaaagtgaccgtgaagcagctgaaagaggactacttcaagaaaatcgagtgcttcgactccgtggaaatctccggcgtggaagatcggttcaacgcctccctgggcacataccacgatctgctgaaaattatcaaggacaaggacttcctggacaatgaggaaaacgaggacattctggaagatatcgtgctgaccctgacactgtttgaggacagagagatgatcgaggaacggctgaaaacctatgcccacctgttcgacgacaaagtgatgaagcagctgaagcggcggagatacaccggctggggcaggctgagccggaagctgatcaacggcatccgggacaagcagtccggcaagacaatcctggatttcctgaagtccgacggcttcgccaacagaaacttcatgcagctgatccacgacgacagcctgacctttaaagaggacatccagaaagcccaggtgtccggccagggcgatagcctgcacgagcacattgccaatctggccggcagccccgccattaagaagggcatcctgcagacagtgaaggtggtggacgagctcgtgaaagtgatgggccggcacaagcccgagaacatcgtgatcgaaatggccagagagaaccagaccacccagaagggacagaagaacagccgcgagagaatgaagcggatcgaagagggcatcaaagagctgggcagccagatcctgaaagaacaccccgtggaaaacacccagctgcagaacgagaagctgtacctgtactacctgcagaatgggcgggatatgtacgtggaccaggaactggacatcaaccggctgtccgactacgatgtggaccatatcgtgcctcagagctttctgaaggacgactccatcgacaacaaggtgctgaccagaagcgacaagaaccggggcaagagcgacaacgtgccctccgaagaggtcgtgaagaagatgaagaactactggcggcagctgctgaacgccaagctgattacccagagaaagttcgacaatctgaccaaggccgagagaggcggcctgagcgaactggataaggccggcttcatcaagagacagctggtggaaacccggcagatcacaaagcacgtggcacagatcctggactcccggatgaacactaagtacgacgagaatgacaagctgatccgggaagtgaaagtgatcaccctgaagtccaagctggtgtccgatttccggaaggatttccagttttacaaagtgcgcgagatcaacaactaccaccacgcccacgacgcctacctgaacgccgtcgtgggaaccgccctgatcaaaaagtaccctaagctggaaagcgagttcgtgtacggcgactacaaggtgtacgacgtgcggaagatgatcgccaagagcgagcaggaaatcggcaaggctaccgccaagtacttcttctacagcaacatcatgaactttttcaagaccgagattaccctggccaacggcgagatccggaagcggcctctgatcgagacaaacggcgaaaccggggagatcgtgtgggataagggccgggattttgccaccgtgcggaaagtgctgagcatgccccaagtgaatatcgtgaaaaagaccgaggtgcagacaggcggcttcagcaaagagtctatcctgcccaagaggaacagcgataagctgatcgccagaaagaaggactgggaccctaagaagtacggcggcttcgacagccccaccgtggcctattctgtgctggtggtggccaaagtggaaaagggcaagtccaagaaactgaagagtgtgaaagagctgctggggatcaccatcatggaaagaagcagcttcgagaagaatcccatcgactttctggaagccaagggctacaaagaagtgaaaaaggacctgatcatcaagctgcctaagtactccctgttcgagctggaaaacggccggaagagaatgctggcctctgccggcgaactgcagaagggaaacgaactggccctgccctccaaatatgtgaacttcctgtacctggccagccactatgagaagctgaagggctcccccgaggataatgagcagaaacagctgtttgtggaacagcacaagcactacctggacgagatcatcgagcagatcagcgagttctccaagagagtgatcctggccgacgctaatctggacaaagtgctgtccgcctacaacaagcaccgggataagcccatcagagagcaggccgagaatatcatccacctgtttaccctgaccaatctgggagcccctgccgccttcaagtactttgacaccaccatcgaccggaagaggtacaccagcaccaaagaggtgctggacgccaccctgatccaccagagcatcaccggcctgtacgagacacggatcgacctgtctcagctgggaggtgac

SEQ ID NO: 155 - DNA, 4101 bp, synthetic construct
  source 1..4101: mol_type = other DNA
gacaagaagtacagcatcggcctggacatcggcaccaactctgtgggctgggccgtgatcaccgacgagtacaaggtgcccagcaagaaattcaaggtgctgggcaacaccgaccggcacagcatcaagaagaacctgatcggagccctgctgttcgacagcggcgaaacagccgaggccacccggctgaagagaaccgccagaagaagatacaccagacggaagaaccggatctgctatctgcaagagatcttcagcaacgagatggccaaggtggacgacagcttcttccacagactggaagagtccttcctggtggaagaggataagaagcacgagcggcaccccatcttcggcaacatcgtggacgaggtggcctaccacgagaagtaccccaccatctaccacctgagaaagaaactggtggacagcaccgacaaggccgacctgcggctgatctatctggccctggcccacatgatcaagttccggggccacttcctgatcgagggcgacctgaaccccgacaacagcgacgtggacaagctgttcatccagctggtgcagacctacaaccagctgttcgaggaaaaccccatcaacgccagcggcgtggacgccaaggccatcctgtctgccagactgagcaagagcagacggctggaaaatctgatcgcccagctgcccggcgagaagaagaatggcctgttcggaaacctgattgccctgagcctgggcctgacccccaacttcaagagcaacttcgacctggccgaggatgccaaactgcagctgagcaaggacacctacgacgacgacctggacaacctgctggcccagatcggcgaccagtacgccgacctgtttctggccgccaagaacctgtccgacgccatcctgctgagcgacatcctgagagtgaacaccgagatcaccaaggcccccctgagcgcctctatgatcaagagatacgacgagcaccaccaggacctgaccctgctgaaagctctcgtgcggcagcagctgcctgagaagtacaaagagattttcttcgaccagagcaagaacggctacgccggctacattgacggcggagccagccaggaagagttctacaagttcatcaagcccatcctggaaaagatggacggcaccgaggaactgctcgtgaagctgaacagagaggacctgctgcggaagcagcggaccttcgacaacggcagcatcccccaccagatccacctgggagagctgcacgccattctgcggcggcaggaagatttttacccattcctgaaggacaaccgggaaaagatcgagaagatcctgaccttccgcatcccctactacgtgggccctctggccaggggaaacagcagattcgcctggatgaccagaaagagcgaggaaaccatcaccccctggaacttcgaggaagtggtggacaagggcgcttccgcccagagcttcatcgagcggatgaccaacttcgataagaacctgcccaacgagaaggtgctgcccaagcacagcctgctgtacgagtacttcaccgtgtataacgagctgaccaaagtgaaatacgtgaccgagggaatgagaaagcccgccttcctgagcggcgagcagaaaaaggccatcgtggacctgctgttcaagaccaaccggaaagtgaccgtgaagcagctgaaagaggactacttcaagaaaatcgagtgcttcgactccgtggaaatctccggcgtggaagatcggttcaacgcctccctgggcacataccacgatctgctgaaaattatcaaggacaaggacttcctggacaatgaggaaaacgaggacattctggaagatatcgtgctgaccctgacactgtttgaggacagagagatgatcgaggaacggctgaaaacctatgcccacctgttcgacgacaaagtgatgaagcagctgaagcggcggagatacaccggctggggcaggctgagccggaagctgatcaacggcatccgggacaagcagtccggcaagacaatcctggatttcctgaagtccgacggcttcgccaacagaaacttcatgcagctgatccacgacgacagcctgacctttaaagaggacatccagaaagcccaggtgtccggccagggcgatagcctgcacgagcacattgccaatctggccggcagccccgccattaagaagggcatcctgcagacagtgaaggtggtggacgagctcgtgaaagtgatgggccggcacaagcccgagaacatcgtgatcgaaatggccagagagaaccagaccacccagaagggacagaagaacagccgcgagagaatgaagcggatcgaagagggcatcaaagagctgggcagccagatcctgaaagaacaccccgtggaaaacacccagctgcagaacgagaagctgtacctgtactacctgcagaatgggcgggatatgtacgtggaccaggaactggacatcaaccggctgtccgactacgatgtggacgccatcgtgcctcagagctttctgaaggacgactccatcgacaacaaggtgctgaccagaagcgacaagaaccggggcaagagcgacaacgtgccctccgaagaggtcgtgaagaagatgaagaactactggcggcagctgctgaacgccaagctgattacccagagaaagttcgacaatctgaccaaggccgagagaggcggcctgagcgaactggataaggccggcttcatcaagagacagctggtggaaacccggcagatcacaaagcacgtggcacagatcctggactcccggatgaacactaagtacgacgagaatgacaagctgatccgggaagtgaaagtgatcaccctgaagtccaagctggtgtccgatttccggaaggatttccagttttacaaagtgcgcgagatcaacaactaccaccacgcccacgacgcctacctgaacgccgtcgtgggaaccgccctgatcaaaaagtaccctaagctggaaagcgagttcgtgtacggcgactacaaggtgtacgacgtgcggaagatgatcgccaagagcgagcaggaaatcggcaaggctaccgccaagtacttcttctacagcaacatcatgaactttttcaagaccgagattaccctggccaacggcgagatccggaagcggcctctgatcgagacaaacggcgaaaccggggagatcgtgtgggataagggccgggattttgccaccgtgcggaaagtgctgagcatgccccaagtgaatatcgtgaaaaagaccgaggtgcagacaggcggcttcagcaaagagtctatcctgcccaagaggaacagcgataagctgatcgccagaaagaaggactgggaccctaagaagtacggcggcttcgacagccccaccgtggcctattctgtgctggtggtggccaaagtggaaaagggcaagtccaagaaactgaagagtgtgaaagagctgctggggatcaccatcatggaaagaagcagcttcgagaagaatcccatcgactttctggaagccaagggctacaaagaagtgaaaaaggacctgatcatcaagctgcctaagtactccctgttcgagctggaaaacggccggaagagaatgctggcctctgccggcgaactgcagaagggaaacgaactggccctgccctccaaatatgtgaacttcctgtacctggccagccactatgagaagctgaagggctcccccgaggataatgagcagaaacagctgtttgtggaacagcacaagcactacctggacgagatcatcgagcagatcagcgagttctccaagagagtgatcctggccgacgctaatctggacaaagtgctgtccgcctacaacaagcaccgggataagcccatcagagagcaggccgagaatatcatccacctgtttaccctgaccaatctgggagcccctgccgccttcaagtactttgacaccaccatcgaccggaagaggtacaccagcaccaaagaggtgctggacgccaccctgatccaccagagcatcaccggcctgtacgagacacggatcgacctgtctcagctgggaggtgac

SEQ ID NO: 156 - protein, 1367 aa, synthetic construct
DKKYSIGLAIGTNSVGWAVITDEYKVPSKKFKVLGNTDRHSIKKNLIGALLFDSGETAEATRLKRTARRRYTRRKNRICYLQEIFSNEMAKVDDSFFHRLEESFLVEEDKKHERHPIFGNIVDEVAYHEKYPTIYHLRKKLVDSTDKADLRLIYLALAHMIKFRGHFLIEGDLNPDNSDVDKLFIQLVQTYNQLFEENPINASGVDAKAILSARLSKSRRLENLIAQLPGEKKNGLFGNLIALSLGLTPNFKSNFDLAEDAKLQLSKDTYDDDLDNLLAQIGDQYADLFLAAKNLSDAILLSDILRVNTEITKAPLSASMIKRYDEHHQDLTLLKALVRQQLPEKYKEIFFDQSKNGYAGYIDGGASQEEFYKFIKPILEKMDGTEELLVKLNREDLLRKQRTFDNGSIPHQIHLGELHAILRRQEDFYPFLKDNREKIEKILTFRIPYYVGPLARGNSRFAWMTRKSEETITPWNFEEVVDKGASAQSFIERMTNFDKNLPNEKVLPKHSLLYEYFTVYNELTKVKYVTEGMRKPAFLSGEQKKAIVDLLFKTNRKVTVKQLKEDYFKKIECFDSVEISGVEDRFNASLGTYHDLLKIIKDKDFLDNEENEDILEDIVLTLTLFEDREMIEERLKTYAHLFDDKVMKQLKRRRYTGWGRLSRKLINGIRDKQSGKTILDFLKSDGFANRNFMQLIHDDSLTFKEDIQKAQVSGQGDSLHEHIANLAGSPAIKKGILQTVKVVDELVKVMGRHKPENIVIEMARENQTTQKGQKNSRERMKRIEEGIKELGSQILKEHPVENTQLQNEKLYLYYLQNGRDMYVDQELDINRLSDYDVDHIVPQSFLKDDSIDNKVLTRSDKNRGKSDNVPSEEVVKKMKNYWRQLLNAKLITQRKFDNLTKAERGGLSELDKAGFIKRQLVETRQITKHVAQILDSRMNTKYDENDKLIREVKVITLKSKLVSDFRKDFQFYKVREINNYHHAHDAYLNAVVGTALIKKYPKLESEFVYGDYKVYDVRKMIAKSEQEIGKATAKYFFYSNIMNFFKTEITLANGEIRKRPLIETNGETGEIVWDKGRDFATVRKVLSMPQVNIVKKTEVQTGGFSKESILPKRNSDKLIARKKDWDPKKYGGFDSPTVAYSVLVVAKVEKGKSKKLKSVKELLGITIMERSSFEKNPIDFLEAKGYKEVKKDLIIKLPKYSLFELENGRKRMLASAGELQKGNELALPSKYVNFLYLASHYEKLKGSPEDNEQKQLFVEQHKHYLDEIIEQISEFSKRVILADANLDKVLSAYNKHRDKPIREQAENIIHLFTLTNLGAPAAFKYFDTTIDRKRYTSTKEVLDATLIHQSITGLYETRIDLSQLGGD

SEQ ID NO: 157 - protein, 1367 aa, synthetic construct
DKKYSIGLAIGTNSVGWAVITDEYKVPSKKFKVLGNTDRHSIKKNLIGALLFDSGETAEATRLKRTARRRYTRRKNRICYLQEIFSNEMAKVDDSFFHRLEESFLVEEDKKHERHPIFGNIVDEVAYHEKYPTIYHLRKKLVDSTDKADLRLIYLALAHMIKFRGHFLIEGDLNPDNSDVDKLFIQLVQTYNQLFEENPINASGVDAKAILSARLSKSRRLENLIAQLPGEKKNGLFGNLIALSLGLTPNFKSNFDLAEDAKLQLSKDTYDDDLDNLLAQIGDQYADLFLAAKNLSDAILLSDILRVNTEITKAPLSASMIKRYDEHHQDLTLLKALVRQQLPEKYKEIFFDQSKNGYAGYIDGGASQEEFYKFIKPILEKMDGTEELLVKLNREDLLRKQRTFDNGSIPHQIHLGELHAILRRQEDFYPFLKDNREKIEKILTFRIPYYVGPLARGNSRFAWMTRKSEETITPWNFEEVVDKGASAQSFIERMTNFDKNLPNEKVLPKHSLLYEYFTVYNELTKVKYVTEGMRKPAFLSGEQKKAIVDLLFKTNRKVTVKQLKEDYFKKIECFDSVEISGVEDRFNASLGTYHDLLKIIKDKDFLDNEENEDILEDIVLTLTLFEDREMIEERLKTYAHLFDDKVMKQLKRRRYTGWGRLSRKLINGIRDKQSGKTILDFLKSDGFANRNFMQLIHDDSLTFKEDIQKAQVSGQGDSLHEHIANLAGSPAIKKGILQTVKVVDELVKVMGRHKPENIVIEMARENQTTQKGQKNSRERMKRIEEGIKELGSQILKEHPVENTQLQNEKLYLYYLQNGRDMYVDQELDINRLSDYDVDHIVPQSFLADDSIDNKVLTRSDKNRGKSDNVPSEEVVKKMKNYWRQLLNAKLITQRKFDNLTKAERGGLSELDKAGFIKRQLVETRQITKHVAQILDSRMNTKYDENDKLIREVKVITLKSKLVSDFRKDFQFYKVREINNYHHAHDAYLNAVVGTALIKKYPALESEFVYGDYKVYDVRKMIAKSEQEIGKATAKYFFYSNIMNFFKTEITLANGEIRKAPLIETNGETGEIVWDKGRDFATVRKVLSMPQVNIVKKTEVQTGGFSKESILPKRNSDKLIARKKDWDPKKYGGFDSPTVAYSVLVVAKVEKGKSKKLKSVKELLGITIMERSSFEKNPIDFLEAKGYKEVKKDLIIKLPKYSLFELENGRKRMLASAGELQKGNELALPSKYVNFLYLASHYEKLKGSPEDNEQKQLFVEQHKHYLDEIIEQISEFSKRVILADANLDKVLSAYNKHRDKPIREQAENIIHLFTLTNLGAPAAFKYFDTTIDRKRYTSTKEVLDATLIHQSITGLYETRIDLSQLGGD

SEQ ID NO: 158 - protein, 2010 aa, synthetic construct
TLNIEDEHRLHETSKEPDVSLGSTWLSDFPQAWAETGGMGLAVRQAPLIIPLKATSTPVSIKQYPMSQEARLGIKPHIQRLLDQGILVPCQSPWNTPLLPVKKPGTNDYRPVQDLREVNKRVEDIHPTVPNPYNLLSGLPPSHQWYTVLDLKDAFFCLRLHPTSQPLFAFEWRDPEMGISGQLTWTRLPQGFKNSPTLFNEALHRDLADFRIQHPDLILLQYVDDLLLAATSELDCQQGTRALLQTLGNLGYRASAKKAQICQKQVKYLGYLLKEGQRWLTEARKETVMGQPTPKTPRQLREFLGKAGFCRLFIPGFAEMAAPLYPLTKPGTLFNWGPDQQKAYQEIKQALLTAPALGLPDLTKPFELFVDEKQGYAKGVLTQKLGPWRRPVAYLSKKLDPVAAGWPPCLRMVAAIAVLTKDAGKLTMGQPLVILAPHAVEALVKQPPDRWLSNARMTHYQALLLDTDRVQFGPVVALNPATLLPLPEEGLQHNCLDILAEAHGTRPDLTDQPLPDADHTWYTDGSSLLQEGQRKAGAAVTTETEVIWAKALPAGTSAQRAELIALTQALKMAEGKKLNVYTDSRYAFATAHIHGEIYRRRGWLTSEGKEIKNKDEILALLKALFLPKRLSIIHCPGHQKGHSAEARGNRMADQAARKAAITETPDTSTLLIENSSPNSRLINSGGSSGGSSGSETPGTSESATPESSGGSSGGSSKLEKFTNCYSLSKTLRFKAIPVGKTQENIDNKRLLVEDEKRAEDYKGVKKLLDRYYLSFINDVLHSIKLKNLNNYISLFRKKTRTEKENKELENLEINLRKEIAKAFKGNEGYKSLFKKDIIETILPEFLDDKDEIALVNSFNGFTTAFTGFFDNRENMFSEEAKSTSIAFRCINENLTRYISNMDIFEKVDAIFDKHEVQEIKEKILNSDYDVEDFFEGEFFNFVLTQEGIDVYNAIIGGFVTESGEKIKGLNEYINLYNQKTKQKLPKFKPLYKQVLSDRESLSFYGEGYTSDEEVLEVFRNTLNKNSEIFSSIKKLEKLFKNFDEYSSAGIFVKNGPAISTISKDIFGEWNVIRDKWNAEYDDIHLKKKAVVTEKYEDDRRKSFKKIGSFSLEQLQEYADADLSVVEKLKEIIIQKVDEIYKVYGSSEKLFDADFVLEKSLKKNDAVVAIMKDLLDSVKSFENYIKAFFGEGKETNRDESFYGDFVLAYDILLKVDHIYDAIRNYVTQKPYSKDKFKLYFQNPQFMGGWDKDKETDYRATILRYGSKYYLAIMDKKYAKCLQKIDKDDVNGNYEKINYKLLPGPNKMLPKVFFSKKWMAYYNPSEDIQKIYKNGTFKKGDMFNLNDCHKLIDFFKDSISRYPKWSNAYDFNFSETEKYKDIAGFYREVEEQGYKVSFESASKKEVDKLVEEGKLYMFQIYNKDFSDKSHGTPNLHTMYFKLLFDENNHGQIRLSGGAELFMRRASLKKEELVVHPANSPIANKNPDNPKKTTTLSYDVYKDKRFSEDQYELHIPIAINKCPKNIFKINTEVRVLLKHDDNPYVIGIDRGERNLLYIVVVDGKGNIVEQYSLNEIINNFNGIRIKTDYHSLLDKKEKERFEARQNWTSIENIKELKAGYISQVVHKICELVEKYDAVIALEDLNSGFKNSRVKVEKQVYQKFEKMLIDKLNYMVDKKSNPCATGGALKGYQITNKFESFKSMSTQNGFIFYIPAWLTSKIDPSTGFVNLLKTKYTSIADSKKFISSFDRIMYVPEEDLFEFALDYKNFSRTDADYIKKWKLYSYGNRIRIFRNPKKNNVFDWEEVCLTSAYKELFNKYGINYQQGDIRALLCEQSDKAFYSSFMALMSLMLQMRNSITGRTDVDFLISPVKNSDGIFYDSRNYEAQENAILPKNADANGAYNIARKVLWAIGQFKKAEDEKLDKVKIAISNKEWLEYAQTSVKHSGGSSGGSSGSETPGTSESATPESSGGSSGGSALDFLSRLPLPPPVSPICTFVSPAAQKAFQPPRSCG

SEQ ID NO: 159 - protein, 1373 aa, synthetic construct
MGSKLEKFTNCYSLSKTLRFKAIPVGKTQENIDNKRLLVEDEKRAEDYKGVKKLLDRYYLSFINDVLHSIKLKNLNNYISLFRKKTRTEKENKELENLEINLRKEIAKAFKGNEGYKSLFKKDIIETILPEFLDDKDEIALVNSFNGFTTAFTGFFDNRENMFSEEAKSTSIAFRCINENLTRYISNMDIFEKVDAIFDKHEVQEIKEKILNSDYDVEDFFEGEFFNFVLTQEGIDVYNAIIGGFVTESGEKIKGLNEYINLYNQKTKQKLPKFKPLYKQVLSDRESLSFYGENQTTQKGQKNSRERMKRIEEGIKELGSQILKEHPVENTQLQNEKLYLYYLQNGRDMYVDQELDINRLSDYDVDHIVPQSFLKDDSIDNKVLTRSDKNRGKSDNVPSEEVVKKMKNYWRQLLNAKLITQRKFDNLTKAERGGLSEGYTSDEEVLEVFRNTLNKNSEIFSSIKKLEKLFKNFDEYSSAGIFVKNGPAISTISKDIFGEWNVIRDKWNAEYDDIHLKKKAVVTEKYEDDRRKSFKKIGSFSLEQLQEYADADLSVVEKLKEIIIQKVDEIYKVYGSSEKLFDADFVLEKSLKKNDAVVAIMKDLLDSVKSFENYIKAFFGEGKETNRDESFYGDFVLAYDILLKVDHIYDAIRNYVTQKPYSKDKFKLYFQNPQFMGGWDKDKETDYRATILRYGSKYYLAIMDKKYAKCLQKIDKDDVNGNYEKINYKLLPGPNKMLPKVFFSKKWMAYYNPSEDIQKIYKNGTFKKGDMFNLNDCHKLIDFFKDSISRYPKWSNAYDFNFSETEKYKDIAGFYREVEEQGYKVSFESASKKEVDKLVEEGKLYMFQIYNKDFSDKSHGTPNLHTMYFKLLFDENNHGQIRLSGGAELFMRRASLKKEELVVHPANSPIANKNPDNPKKTTTLSYDVYKDKRFSEDQYELHIPIAINKCPKNIFKINTEVRVLLKHDDNPYVIGIARGERNLLYIVVVDGKGNIVEQYSLNEIINNFNGIRIKTDYHSLLDKKEKERFEARQNWTSIENIKELKAGYISQVVHKICELVEKYDAVIALEDLNSGFKNSRVKVEKQVYQKFEKMLIDKLNYMVDKKSNPCATGGALKGYQITNKFESFKSMSTQNGFIFYIPAWLTSKIDPSTGFVNLLKTKYTSIADSKKFISSFDRIMYVPEEDLFEFALDYKNFSRTDADYIKKWKLYSYGNRIRIFRNPKKNNVFDWEEVCLTSAYKELFNKYGINYQQGDIRALLCEQSDKAFYSSFMALMSLMLQMRNSITGRTDVDFLISPVKNSDGIFYDSRNYEAQENAILPKNADANGAYNIARKVLWAIGQFKKAEDEKLDKVKIAISNKEWLEYAQTSVKH

SEQ ID NO: 160 - protein, 1375 aa, synthetic construct
MGSKLEKFTNCYSLSKTLRFKAIPVGKTQENIDNKRLLVEDEKRAEDYKGVKKLLDRYYLSFINDVLHSIKLKNLNNYISLFRKKTRTEKENKELENLEINLRKEIAKAFKGNEGYKSLFKKDIIETILPEFLDDKDEIALVNSFNGFTTAFTGFFDNRENMFSEEAKSTSIAFRCINENLTRYISNMDIFEKVDAIFDKHEVQEIKEKILNSDYDVEDFFEGEFFNFVLTQEGIDVYNAIIGGFVTESGEKIKGLNEYINLYNQKTKQKLPKFKPLYKQVLSDRESLSFYGSGENQTTQKGQKNSRERMKRIEEGIKELGSQILKEHPVENTQLQNEKLYLYYLQNGRDMYVDQELDINRLSDYDVDHIVPQSFLKDDSIDNKVLTRSDKNRGKSDNVPSEEVVKKMKNYWRQLLNAKLITQRKFDNLTKAERGGLSEGYTSDEEVLEVFRNTLNKNSEIFSSIKKLEKLFKNFDEYSSAGIFVKNGPAISTISKDIFGEWNVIRDKWNAEYDDIHLKKKAVVTEKYEDDRRKSFKKIGSFSLEQLQEYADADLSVVEKLKEIIIQKVDEIYKVYGSSEKLFDADFVLEKSLKKNDAVVAIMKDLLDSVKSFENYIKAFFGEGKETNRDESFYGDFVLAYDILLKVDHIYDAIRNYVTQKPYSKDKFKLYFQNPQFMGGWDKDKETDYRATILRYGSKYYLAIMDKKYAKCLQKIDKDDVNGNYEKINYKLLPGPNKMLPKVFFSKKWMAYYNPSEDIQKIYKNGTFKKGDMFNLNDCHKLIDFFKDSISRYPKWSNAYDFNFSETEKYKDIAGFYREVEEQGYKVSFESASKKEVDKLVEEGKLYMFQIYNKDFSDKSHGTPNLHTMYFKLLFDENNHGQIRLSGGAELFMRRASLKKEELVVHPANSPIANKNPDNPKKTTTLSYDVYKDKRFSEDQYELHIPIAINKCPKNIFKINTEVRVLLKHDDNPYVIGIARGERNLLYIVVVDGKGNIVEQYSLNEIINNFNGIRIKTDYHSLLDKKEKERFEARQNWTSIENIKELKAGYISQVVHKICELVEKYDAVIALEDLNSGFKNSRVKVEKQVYQKFEKMLIDKLNYMVDKKSNPCATGGALKGYQITNKFESFKSMSTQNGFIFYIPAWLTSKIDPSTGFVNLLKTKYTSIADSKKFISSFDRIMYVPEEDLFEFALDYKNFSRTDADYIKKWKLYSYGNRIRIFRNPKKNNVFDWEEVCLTSAYKELFNKYGINYQQGDIRALLCEQSDKAFYSSFMALMSLMLQMRNSITGRTDVDFLISPVKNSDGIFYDSRNYEAQENAILPKNADANGAYNIARKVLWAIGQFKKAEDEKLDKVKIAISNKEWLEYAQTSVKH

SEQ ID NO: 161 - protein, 1377 aa, synthetic construct
MGSKLEKFTNCYSLSKTLRFKAIPVGKTQENIDNKRLLVEDEKRAEDYKGVKKLLDRYYLSFINDVLHSIKLKNLNNYISLFRKKTRTEKENKELENLEINLRKEIAKAFKGNEGYKSLFKKDIIETILPEFLDDKDEIALVNSFNGFTTAFTGFFDNRENMFSEEAKSTSIAFRCINENLTRYISNMDIFEKVDAIFDKHEVQEIKEKILNSDYDVEDFFEGEFFNFVLTQEGIDVYNAIIGGFVTESGEKIKGLNEYINLYNQKTKQKLPKFKPLYKQVLSDRESLSFYGGSSGENQTTQKGQKNSRERMKRIEEGIKELGSQILKEHPVENTQLQNEKLYLYYLQNGRDMYVDQELDINRLSDYDVDHIVPQSFLKDDSIDNKVLTRSDKNRGKSDNVPSEEVVKKMKNYWRQLLNAKLITQRKFDNLTKAERGGLSEGYTSDEEVLEVFRNTLNKNSEIFSSIKKLEKLFKNFDEYSSAGIFVKNGPAISTISKDIFGEWNVIRDKWNAEYDDIHLKKKAVVTEKYEDDRRKSFKKIGSFSLEQLQEYADADLSVVEKLKEIIIQKVDEIYKVYGSSEKLFDADFVLEKSLKKNDAVVAIMKDLLDSVKSFENYIKAFFGEGKETNRDESFYGDFVLAYDILLKVDHIYDAIRNYVTQKPYSKDKFKLYFQNPQFMGGWDKDKETDYRATILRYGSKYYLAIMDKKYAKCLQKIDKDDVNGNYEKINYKLLPGPNKMLPKVFFSKKWMAYYNPSEDIQKIYKNGTFKKGDMFNLNDCHKLIDFFKDSISRYPKWSNAYDFNFSETEKYKDIAGFYREVEEQGYKVSFESASKKEVDKLVEEGKLYMFQIYNKDFSDKSHGTPNLHTMYFKLLFDENNHGQIRLSGGAELFMRRASLKKEELVVHPANSPIANKNPDNPKKTTTLSYDVYKDKRFSEDQYELHIPIAINKCPKNIFKINTEVRVLLKHDDNPYVIGIARGERNLLYIVVVDGKGNIVEQYSLNEIINNFNGIRIKTDYHSLLDKKEKERFEARQNWTSIENIKELKAGYISQVVHKICELVEKYDAVIALEDLNSGFKNSRVKVEKQVYQKFEKMLIDKLNYMVDKKSNPCATGGALKGYQITNKFESFKSMSTQNGFIFYIPAWLTSKIDPSTGFVNLLKTKYTSIADSKKFISSFDRIMYVPEEDLFEFALDYKNFSRTDADYIKKWKLYSYGNRIRIFRNPKKNNVFDWEEVCLTSAYKELFNKYGINYQQGDIRALLCEQSDKAFYSSFMALMSLMLQMRNSITGRTDVDFLISPVKNSDGIFYDSRNYEAQENAILPKNADANGAYNIARKVLWAIGQFKKAEDEKLDKVKIAISNKEWLEYAQTSVKH

SEQ ID NO: 162 - protein, 1379 aa, synthetic construct
MGSKLEKFTNCYSLSKTLRFKAIPVGKTQENIDNKRLLVEDEKRAEDYKGVKKLLDRYYLSFINDVLHSIKLKNLNNYISLFRKKTRTEKENKELENLEINLRKEIAKAFKGNEGYKSLFKKDIIETILPEFLDDKDEIALVNSFNGFTTAFTGFFDNRENMFSEEAKSTSIAFRCINENLTRYISNMDIFEKVDAIFDKHEVQEIKEKILNSDYDVEDFFEGEFFNFVLTQEGIDVYNAIIGGFVTESGEKIKGLNEYINLYNQKTKQKLPKFKPLYKQVLSDRESLSFYGGSSGENQTTQKGQKNSRERMKRIEEGIKELGSQILKEHPVENTQLQNEKLYLYYLQNGRDMYVDQELDINRLSDYDVDHIVPQSFLKDDSIDNKVLTRSDKNRGKSDNVPSEEVVKKMKNYWRQLLNAKLITQRKFDNLTKAERGGLSGSEGYTSDEEVLEVFRNTLNKNSEIFSSIKKLEKLFKNFDEYSSAGIFVKNGPAISTISKDIFGEWNVIRDKWNAEYDDIHLKKKAVVTEKYEDDRRKSFKKIGSFSLEQLQEYADADLSVVEKLKEIIIQKVDEIYKVYGSSEKLFDADFVLEKSLKKNDAVVAIMKDLLDSVKSFENYIKAFFGEGKETNRDESFYGDFVLAYDILLKVDHIYDAIRNYVTQKPYSKDKFKLYFQNPQFMGGWDKDKETDYRATILRYGSKYYLAIMDKKYAKCLQKIDKDDVNGNYEKINYKLLPGPNKMLPKVFFSKKWMAYYNPSEDIQKIYKNGTFKKGDMFNLNDCHKLIDFFKDSISRYPKWSNAYDFNFSETEKYKDIAGFYREVEEQGYKVSFESASKKEVDKLVEEGKLYMFQIYNKDFSDKSHGTPNLHTMYFKLLFDENNHGQIRLSGGAELFMRRASLKKEELVVHPANSPIANKNPDNPKKTTTLSYDVYKDKRFSEDQYELHIPIAINKCPKNIFKINTEVRVLLKHDDNPYVIGIARGERNLLYIVVVDGKGNIVEQYSLNEIINNFNGIRIKTDYHSLLDKKEKERFEARQNWTSIENIKELKAGYISQVVHKICELVEKYDAVIALEDLNSGFKNSRVKVEKQVYQKFEKMLIDKLNYMVDKKSNPCATGGALKGYQITNKFESFKSMSTQNGFIFYIPAWLTSKIDPSTGFVNLLKTKYTSIADSKKFISSFDRIMYVPEEDLFEFALDYKNFSRTDADYIKKWKLYSYGNRIRIFRNPKKNNVFDWEEVCLTSAYKELFNKYGINYQQGDIRALLCEQSDKAFYSSFMALMSLMLQMRNSITGRTDVDFLISPVKNSDGIFYDSRNYEAQENAILPKNADANGAYNIARKVLWAIGQFKKAEDEKLDKVKIAISNKEWLEYAQTSVKH

SEQ ID NO: 163 - protein, 1373 aa, synthetic construct
MGSKLEKFTNCYSLSKTLRFKAIPVGKTQENIDNKRLLVEDEKRAEDYKGVKKLLDRYYLSFINDVLHSIKLKNLNNYISLFRKKTRTEKENKELENLEINLRKEIAKAFKGNEGYKSLFKKDIIETILPEFLDDKDEIALVNSFNGFTTAFTGFFDNRENMFSEEAKSTSIAFRCINENLTRYISNMDIFEKVDAIFDKHEVQEIKEKILNSDYDVEDFFEGEFFNFVLTQEGIDVYNAIIGGFVTESGEKIKGLNEYINLYNQKTKQKLPKFKPLYKQVLSDRESLSFYGEENQTTQKGQKNSRERMKRIEEGIKELGSQILKEHPVENTQLQNEKLYLYYLQNGRDMYVDQELDINRLSDYDVDHIVPQSFLKDDSIDNKVLTRSDKNRGKSDNVPSEEVVKKMKNYWRQLLNAKLITQRKFDNLTKAERGGLSGYTSDEEVLEVFRNTLNKNSEIFSSIKKLEKLFKNFDEYSSAGIFVKNGPAISTISKDIFGEWNVIRDKWNAEYDDIHLKKKAVVTEKYEDDRRKSFKKIGSFSLEQLQEYADADLSVVEKLKEIIIQKVDEIYKVYGSSEKLFDADFVLEKSLKKNDAVVAIMKDLLDSVKSFENYIKAFFGEGKETNRDESFYGDFVLAYDILLKVDHIYDAIRNYVTQKPYSKDKFKLYFQNPQFMGGWDKDKETDYRATILRYGSKYYLAIMDKKYAKCLQKIDKDDVNGNYEKINYKLLPGPNKMLPKVFFSKKWMAYYNPSEDIQKIYKNGTFKKGDMFNLNDCHKLIDFFKDSISRYPKWSNAYDFNFSETEKYKDIAGFYREVEEQGYKVSFESASKKEVDKLVEEGKLYMFQIYNKDFSDKSHGTPNLHTMYFKLLFDENNHGQIRLSGGAELFMRRASLKKEELVVHPANSPIANKNPDNPKKTTTLSYDVYKDKRFSEDQYELHIPIAINKCPKNIFKINTEVRVLLKHDDNPYVIGIARGERNLLYIVVVDGKGNIVEQYSLNEIINNFNGIRIKTDYHSLLDKKEKERFEARQNWTSIENIKELKAGYISQVVHKICELVEKYDAVIALEDLNSGFKNSRVKVEKQVYQKFEKMLIDKLNYMVDKKSNPCATGGALKGYQITNKFESFKSMSTQNGFIFYIPAWLTSKIDPSTGFVNLLKTKYTSIADSKKFISSFDRIMYVPEEDLFEFALDYKNFSRTDADYIKKWKLYSYGNRIRIFRNPKKNNVFDWEEVCLTSAYKELFNKYGINYQQGDIRALLCEQSDKAFYSSFMALMSLMLQMRNSITGRTDVDFLISPVKNSDGIFYDSRNYEAQENAILPKNADANGAYNIARKVLWAIGQFKKAEDEKLDKVKIAISNKEWLEYAQTSVKH

SEQ ID NO: 164 - protein, 1375 aa, synthetic construct
MGSKLEKFTNCYSLSKTLRFKAIPVGKTQENIDNKRLLVEDEKRAEDYKGVKKLLDRYYLSFINDVLHSIKLKNLNNYISLFRKKTRTEKENKELENLEINLRKEIAKAFKGNEGYKSLFKKDIIETILPEFLDDKDEIALVNSFNGFTTAFTGFFDNRENMFSEEAKSTSIAFRCINENLTRYISNMDIFEKVDAIFDKHEVQEIKEKILNSDYDVEDFFEGEFFNFVLTQEGIDVYNAIIGGFVTESGEKIKGLNEYINLYNQKTKQKLPKFKPLYKQVLSDRESLSFYGEGSENQTTQKGQKNSRERMKRIEEGIKELGSQILKEHPVENTQLQNEKLYLYYLQNGRDMYVDQELDINRLSDYDVDHIVPQSFLKDDSIDNKVLTRSDKNRGKSDNVPSEEVVKKMKNYWRQLLNAKLITQRKFDNLTKAERGGLSGYTSDEEVLEVFRNTLNKNSEIFSSIKKLEKLFKNFDEYSSAGIFVKNGPAISTISKDIFGEWNVIRDKWNAEYDDIHLKKKAVVTEKYEDDRRKSFKKIGSFSLEQLQEYADADLSVVEKLKEIIIQKVDEIYKVYGSSEKLFDADFVLEKSLKKNDAVVAIMKDLLDSVKSFENYIKAFFGEGKETNRDESFYGDFVLAYDILLKVDHIYDAIRNYVTQKPYSKDKFKLYFQNPQFMGGWDKDKETDYRATILRYGSKYYLAIMDKKYAKCLQKIDKDDVNGNYEKINYKLLPGPNKMLPKVFFSKKWMAYYNPSEDIQKIYKNGTFKKGDMFNLNDCHKLIDFFKDSISRYPKWSNAYDFNFSETEKYKDIAGFYREVEEQGYKVSFESASKKEVDKLVEEGKLYMFQIYNKDFSDKSHGTPNLHTMYFKLLFDENNHGQIRLSGGAELFMRRASLKKEELVVHPANSPIANKNPDNPKKTTTLSYDVYKDKRFSEDQYELHIPIAINKCPKNIFKINTEVRVLLKHDDNPYVIGIARGERNLLYIVVVDGKGNIVEQYSLNEIINNFNGIRIKTDYHSLLDKKEKERFEARQNWTSIENIKELKAGYISQVVHKICELVEKYDAVIALEDLNSGFKNSRVKVEKQVYQKFEKMLIDKLNYMVDKKSNPCATGGALKGYQITNKFESFKSMSTQNGFIFYIPAWLTSKIDPSTGFVNLLKTKYTSIADSKKFISSFDRIMYVPEEDLFEFALDYKNFSRTDADYIKKWKLYSYGNRIRIFRNPKKNNVFDWEEVCLTSAYKELFNKYGINYQQGDIRALLCEQSDKAFYSSFMALMSLMLQMRNSITGRTDVDFLISPVKNSDGIFYDSRNYEAQENAILPKNADANGAYNIARKVLWAIGQFKKAEDEKLDKVKIAISNKEWLEYAQTSVKH

SEQ ID NO: 165 - protein, 1377 aa, synthetic construct
MGSKLEKFTNCYSLSKTLRFKAIPVGKTQENIDNKRLLVEDEKRAEDYKGVKKLLDRYYLSFINDVLHSIKLKNLNNYISLFRKKTRTEKENKELENLEINLRKEIAKAFKGNEGYKSLFKKDIIETILPEFLDDKDEIALVNSFNGFTTAFTGFFDNRENMFSEEAKSTSIAFRCINENLTRYISNMDIFEKVDAIFDKHEVQEIKEKILNSDYDVEDFFEGEFFNFVLTQEGIDVYNAIIGGFVTESGEKIKGLNEYINLYNQKTKQKLPKFKPLYKQVLSDRESLSFYGEGSSGENQTTQKGQKNSRERMKRIEEGIKELGSQILKEHPVENTQLQNEKLYLYYLQNGRDMYVDQELDINRLSDYDVDHIVPQSFLKDDSIDNKVLTRSDKNRGKSDNVPSEEVVKKMKNYWRQLLNAKLITQRKFDNLTKAERGGLSGYTSDEEVLEVFRNTLNKNSEIFSSIKKLEKLFKNFDEYSSAGIFVKNGPAISTISKDIFGEWNVIRDKWNAEYDDIHLKKKAVVTEKYEDDRRKSFKKIGSFSLEQLQEYADADLSVVEKLKEIIIQKVDEIYKVYGSSEKLFDADFVLEKSLKKNDAVVAIMKDLLDSVKSFENYIKAFFGEGKETNRDESFYGDFVLAYDILLKVDHIYDAIRNYVTQKPYSKDKFKLYFQNPQFMGGWDKDKETDYRATILRYGSKYYLAIMDKKYAKCLQKIDKDDVNGNYEKINYKLLPGPNKMLPKVFFSKKWMAYYNPSEDIQKIYKNGTFKKGDMFNLNDCHKLIDFFKDSISRYPKWSNAYDFNFSETEKYKDIAGFYREVEEQGYKVSFESASKKEVDKLVEEGKLYMFQIYNKDFSDKSHGTPNLHTMYFKLLFDENNHGQIRLSGGAELFMRRASLKKEELVVHPANSPIANKNPDNPKKTTTLSYDVYKDKRFSEDQYELHIPIAINKCPKNIFKINTEVRVLLKHDDNPYVIGIARGERNLLYIVVVDGKGNIVEQYSLNEIINNFNGIRIKTDYHSLLDKKEKERFEARQNWTSIENIKELKAGYISQVVHKICELVEKYDAVIALEDLNSGFKNSRVKVEKQVYQKFEKMLIDKLNYMVDKKSNPCATGGALKGYQITNKFESFKSMSTQNGFIFYIPAWLTSKIDPSTGFVNLLKTKYTSIADSKKFISSFDRIMYVPEEDLFEFALDYKNFSRTDADYIKKWKLYSYGNRIRIFRNPKKNNVFDWEEVCLTSAYKELFNKYGINYQQGDIRALLCEQSDKAFYSSFMALMSLMLQMRNSITGRTDVDFLISPVKNSDGIFYDSRNYEAQENAILPKNADANGAYNIARKVLWAIGQFKKAEDEKLDKVKIAISNKEWLEYAQTSVKH

SEQ ID NO: 166 - protein, 1379 aa, synthetic construct
MGSKLEKFTNCYSLSKTLRFKAIPVGKTQENIDNKRLLVEDEKRAEDYKGVKKLLDRYYLSFINDVLHSIKLKNLNNYISLFRKKTRTEKENKELENLEINLRKEIAKAFKGNEGYKSLFKKDIIETILPEFLDDKDEIALVNSFNGFTTAFTGFFDNRENMFSEEAKSTSIAFRCINENLTRYISNMDIFEKVDAIFDKHEVQEIKEKILNSDYDVEDFFEGEFFNFVLTQEGIDVYNAIIGGFVTESGEKIKGLNEYINLYNQKTKQKLPKFKPLYKQVLSDRESLSFYGEGSSGENQTTQKGQKNSRERMKRIEEGIKELGSQILKEHPVENTQLQNEKLYLYYLQNGRDMYVDQELDINRLSDYDVDHIVPQSFLKDDSIDNKVLTRSDKNRGKSDNVPSEEVVKKMKNYWRQLLNAKLITQRKFDNLTKAERGGLSGSGYTSDEEVLEVFRNTLNKNSEIFSSIKKLEKLFKNFDEYSSAGIFVKNGPAISTISKDIFGEWNVIRDKWNAEYDDIHLKKKAVVTEKYEDDRRKSFKKIGSFSLEQLQEYADADLSVVEKLKEIIIQKVDEIYKVYGSSEKLFDADFVLEKSLKKNDAVVAIMKDLLDSVKSFENYIKAFFGEGKETNRDESFYGDFVLAYDILLKVDHIYDAIRNYVTQKPYSKDKFKLYFQNPQFMGGWDKDKETDYRATILRYGSKYYLAIMDKKYAKCLQKIDKDDVNGNYEKINYKLLPGPNKMLPKVFFSKKWMAYYNPSEDIQKIYKNGTFKKGDMFNLNDCHKLIDFFKDSISRYPKWSNAYDFNFSETEKYKDIAGFYREVEEQGYKVSFESASKKEVDKLVEEGKLYMFQIYNKDFSDKSHGTPNLHTMYFKLLFDENNHGQIRLSGGAELFMRRASLKKEELVVHPANSPIANKNPDNPKKTTTLSYDVYKDKRFSEDQYELHIPIAINKCPKNIFKINTEVRVLLKHDDNPYVIGIARGERNLLYIVVVDGKGNIVEQYSLNEIINNFNGIRIKTDYHSLLDKKEKERFEARQNWTSIENIKELKAGYISQVVHKICELVEKYDAVIALEDLNSGFKNSRVKVEKQVYQKFEKMLIDKLNYMVDKKSNPCATGGALKGYQITNKFESFKSMSTQNGFIFYIPAWLTSKIDPSTGFVNLLKTKYTSIADSKKFISSFDRIMYVPEEDLFEFALDYKNFSRTDADYIKKWKLYSYGNRIRIFRNPKKNNVFDWEEVCLTSAYKELFNKYGINYQQGDIRALLCEQSDKAFYSSFMALMSLMLQMRNSITGRTDVDFLISPVKNSDGIFYDSRNYEAQENAILPKNADANGAYNIARKVLWAIGQFKKAEDEKLDKVKIAISNKEWLEYAQTSVKH

SEQ ID NO: 167 - protein, 1373 aa, synthetic construct
MGSKLEKFTNCYSLSKTLRFKAIPVGKTQENIDNKRLLVEDEKRAEDYKGVKKLLDRYYLSFINDVLHSIKLKNLNNYISLFRKKTRTEKENKELENLEINLRKEIAKAFKGNEGYKSLFKKDIIETILPEFLDDKDEIALVNSFNGFTTAFTGFFDNRENMFSEEAKSTSIAFRCINENLTRYISNMDIFEKVDAIFDKHEVQEIKEKILNSDYDVEDFFEGEFFNFVLTQEGIDVYNAIIGGFVTESGEKIKGLNEYINLYNQKTKQKLPKFKPLYKQVLSDRESLSFYGENQTTQKGQKNSRERMKRIEEGIKELGSQILKEHPVENTQLQNEKLYLYYLQNGRDMYVDQELDINRLSDYDVDHIVPQSFLKDDSIDNKVLTRSDKNRGKSDNVPSEEVVKKMKNYWRQLLNAKLITQRKFDNLTKAERGGLSEGYTSDEEVLEVFRNTLNKNSEIFSSIKKLEKLFKNFDEYSSAGIFVKNGPAISTISKDIFGEWNVIRDKWNAEYDDIHLKKKAVVTEKYEDDRRKSFKKIGSFSLEQLQEYADADLSVVEKLKEIIIQKVDEIYKVYGSSEKLFDADFVLEKSLKKNDAVVAIMKDLLDSVKSFENYIKAFFGEGKETNRDESFYGDFVLAYDILLKVDHIYDAIRNYVTQKPYSKDKFKLYFQNPQFMGGWDKDKETDYRATILRYGSKYYLAIMDKKYAKCLQKIDKDDVNGNYEKINYKLLPGPNKMLPKVFFSKKWMAYYNPSEDIQKIYKNGTFKKGDMFNLNDCHKLIDFFKDSISRYPKWSNAYDFNFSETEKYKDIAGFYREVEEQGYKVSFESASKKEVDKLVEEGKLYMFQIYNKDFSDKSHGTPNLHTMYFKLLFDENNHGQIRLSGGAELFMRRASLKKEELVVHPANSPIANKNPDNPKKTTTLSYDVYKDKRFSEDQYELHIPIAINKCPKNIFKINTEVRVLLKHDDNPYVIGIDRGERNLLYIVVVDGKGNIVEQYSLNEIINNFNGIRIKTDYHSLLDKKEKERFEARQNWTSIENIKELKAGYISQVVHKICELVEKYDAVIALEDLNSGFKNSRVKVEKQVYQKFEKMLIDKLNYMVDKKSNPCATGGALKGYQITNKFESFKSMSTQNGFIFYIPAWLTSKIDPSTGFVNLLKTKYTSIADSKKFISSFDRIMYVPEEDLFEFALDYKNFSRTDADYIKKWKLYSYGNRIRIFRNPKKNNVFDWEEVCLTSAYKELFNKYGINYQQGDIRALLCEQSDKAFYSSFMALMSLMLQMRNSITGRTDVDFLISPVKNSDGIFYDSRNYEAQENAILPKNADANGAYNIARKVLWAIGQFKKAEDEKLDKVKIAISNKEWLEYAQTSVKH

SEQ ID NO: 168 - protein, 1375 aa, synthetic construct
MGSKLEKFTNCYSLSKTLRFKAIPVGKTQENIDNKRLLVEDEKRAEDYKGVKKLLDRYYLSFINDVLHSIKLKNLNNYISLFRKKTRTEKENKELENLEINLRKEIAKAFKGNEGYKSLFKKDIIETILPEFLDDKDEIALVNSFNGFTTAFTGFFDNRENMFSEEAKSTSIAFRCINENLTRYISNMDIFEKVDAIFDKHEVQEIKEKILNSDYDVEDFFEGEFFNFVLTQEGIDVYNAIIGGFVTESGEKIKGLNEYINLYNQKTKQKLPKFKPLYKQVLSDRESLSFYGSGENQTTQKGQKNSRERMKRIEEGIKELGSQILKEHPVENTQLQNEKLYLYYLQNGRDMYVDQELDINRLSDYDVDHIVPQSFLKDDSIDNKVLTRSDKNRGKSDNVPSEEVVKKMKNYWRQLLNAKLITQRKFDNLTKAERGGLSEGYTSDEEVLEVFRNTLNKNSEIFSSIKKLEKLFKNFDEYSSAGIFVKNGPAISTISKDIFGEWNVIRDKWNAEYDDIHLKKKAVVTEKYEDDRRKSFKKIGSFSLEQLQEYADADLSVVEKLKEIIIQKVDEIYKVYGSSEKLFDADFVLEKSLKKNDAVVAIMKDLLDSVKSFENYIKAFFGEGKETNRDESFYGDFVLAYDILLKVDHIYDAIRNYVTQKPYSKDKFKLYFQNPQFMGGWDKDKETDYRATILRYGSKYYLAIMDKKYAKCLQKIDKDDVNGNYEKINYKLLPGPNKMLPKVFFSKKWMAYYNPSEDIQKIYKNGTFKKGDMFNLNDCHKLIDFFKDSISRYPKWSNAYDFNFSETEKYKDIAGFYREVEEQGYKVSFESASKKEVDKLVEEGKLYMFQIYNKDFSDKSHGTPNLHTMYFKLLFDENNHGQIRLSGGAELFMRRASLKKEELVVHPANSPIANKNPDNPKKTTTLSYDVYKDKRFSEDQYELHIPIAINKCPKNIFKINTEVRVLLKHDDNPYVIGIDRGERNLLYIVVVDGKGNIVEQYSLNEIINNFNGIRIKTDYHSLLDKKEKERFEARQNWTSIENIKELKAGYISQVVHKICELVEKYDAVIALEDLNSGFKNSRVKVEKQVYQKFEKMLIDKLNYMVDKKSNPCATGGALKGYQITNKFESFKSMSTQNGFIFYIPAWLTSKIDPSTGFVNLLKTKYTSIADSKKFISSFDRIMYVPEEDLFEFALDYKNFSRTDADYIKKWKLYSYGNRIRIFRNPKKNNVFDWEEVCLTSAYKELFNKYGINYQQGDIRALLCEQSDKAFYSSFMALMSLMLQMRNSITGRTDVDFLISPVKNSDGIFYDSRNYEAQENAILPKNADANGAYNIARKVLWAIGQFKKAEDEKLDKVKIAISNKEWLEYAQTSVKH

SEQ ID NO: 169 - protein, 1377 aa, synthetic construct
MGSKLEKFTNCYSLSKTLRFKAIPVGKTQENIDNKRLLVEDEKRAEDYKGVKKLLDRYYLSFINDVLHSIKLKNLNNYISLFRKKTRTEKENKELENLEINLRKEIAKAFKGNEGYKSLFKKDIIETILPEFLDDKDEIALVNSFNGFTTAFTGFFDNRENMFSEEAKSTSIAFRCINENLTRYISNMDIFEKVDAIFDKHEVQEIKEKILNSDYDVEDFFEGEFFNFVLTQEGIDVYNAIIGGFVTESGEKIKGLNEYINLYNQKTKQKLPKFKPLYKQVLSDRESLSFYGGSSGENQTTQKGQKNSRERMKRIEEGIKELGSQILKEHPVENTQLQNEKLYLYYLQNGRDMYVDQELDINRLSDYDVDHIVPQSFLKDDSIDNKVLTRSDKNRGKSDNVPSEEVVKKMKNYWRQLLNAKLITQRKFDNLTKAERGGLSEGYTSDEEVLEVFRNTLNKNSEIFSSIKKLEKLFKNFDEYSSAGIFVKNGPAISTISKDIFGEWNVIRDKWNAEYDDIHLKKKAVVTEKYEDDRRKSFKKIGSFSLEQLQEYADADLSVVEKLKEIIIQKVDEIYKVYGSSEKLFDADFVLEKSLKKNDAVVAIMKDLLDSVKSFENYIKAFFGEGKETNRDESFYGDFVLAYDILLKVDHIYDAIRNYVTQKPYSKDKFKLYFQNPQFMGGWDKDKETDYRATILRYGSKYYLAIMDKKYAKCLQKIDKDDVNGNYEKINYKLLPGPNKMLPKVFFSKKWMAYYNPSEDIQKIYKNGTFKKGDMFNLNDCHKLIDFFKDSISRYPKWSNAYDFNFSETEKYKDIAGFYREVEEQGYKVSFESASKKEVDKLVEEGKLYMFQIYNKDFSDKSHGTPNLHTMYFKLLFDENNHGQIRLSGGAELFMRRASLKKEELVVHPANSPIANKNPDNPKKTTTLSYDVYKDKRFSEDQYELHIPIAINKCPKNIFKINTEVRVLLKHDDNPYVIGIDRGERNLLYIVVVDGKGNIVEQYSLNEIINNFNGIRIKTDYHSLLDKKEKERFEARQNWTSIENIKELKAGYISQVVHKICELVEKYDAVIALEDLNSGFKNSRVKVEKQVYQKFEKMLIDKLNYMVDKKSNPCATGGALKGYQITNKFESFKSMSTQNGFIFYIPAWLTSKIDPSTGFVNLLKTKYTSIADSKKFISSFDRIMYVPEEDLFEFALDYKNFSRTDADYIKKWKLYSYGNRIRIFRNPKKNNVFDWEEVCLTSAYKELFNKYGINYQQGDIRALLCEQSDKAFYSSFMALMSLMLQMRNSITGRTDVDFLISPVKNSDGIFYDSRNYEAQENAILPKNADANGAYNIARKVLWAIGQFKKAEDEKLDKVKIAISNKEWLEYAQTSVKH

SEQ ID NO: 170 - protein, 1379 aa, synthetic construct
MGSKLEKFTNCYSLSKTLRFKAIPVGKTQENIDNKRLLVEDEKRAEDYKGVKKLLDRYYLSFINDVLHSIKLKNLNNYISLFRKKTRTEKENKELENLEINLRKEIAKAFKGNEGYKSLFKKDIIETILPEFLDDKDEIALVNSFNGFTTAFTGFFDNRENMFSEEAKSTSIAFRCINENLTRYISNMDIFEKVDAIFDKHEVQEIKEKILNSDYDVEDFFEGEFFNFVLTQEGIDVYNAIIGGFVTESGEKIKGLNEYINLYNQKTKQKLPKFKPLYKQVLSDRESLSFYGGSSGENQTTQKGQKNSRERMKRIEEGIKELGSQILKEHPVENTQLQNEKLYLYYLQNGRDMYVDQELDINRLSDYDVDHIVPQSFLKDDSIDNKVLTRSDKNRGKSDNVPSEEVVKKMKNYWRQLLNAKLITQRKFDNLTKAERGGLSGSEGYTSDEEVLEVFRNTLNKNSEIFSSIKKLEKLFKNFDEYSSAGIFVKNGPAISTISKDIFGEWNVIRDKWNAEYDDIHLKKKAVVTEKYEDDRRKSFKKIGSFSLEQLQEYADADLSVVEKLKEIIIQKVDEIYKVYGSSEKLFDADFVLEKSLKKNDAVVAIMKDLLDSVKSFENYIKAFFGEGKETNRDESFYGDFVLAYDILLKVDHIYDAIRNYVTQKPYSKDKFKLYFQNPQFMGGWDKDKETDYRATILRYGSKYYLAIMDKKYAKCLQKIDKDDVNGNYEKINYKLLPGPNKMLPKVFFSKKWMAYYNPSEDIQKIYKNGTFKKGDMFNLNDCHKLIDFFKDSISRYPKWSNAYDFNFSETEKYKDIAGFYREVEEQGYKVSFESASKKEVDKLVEEGKLYMFQIYNKDFSDKSHGTPNLHTMYFKLLFDENNHGQIRLSGGAELFMRRASLKKEELVVHPANSPIANKNPDNPKKTTTLSYDVYKDKRFSEDQYELHIPIAINKCPKNIFKINTEVRVLLKHDDNPYVIGIDRGERNLLYIVVVDGKGNIVEQYSLNEIINNFNGIRIKTDYHSLLDKKEKERFEARQNWTSIENIKELKAGYISQVVHKICELVEKYDAVIALEDLNSGFKNSRVKVEKQVYQKFEKMLIDKLNYMVDKKSNPCATGGALKGYQITNKFESFKSMSTQNGFIFYIPAWLTSKIDPSTGFVNLLKTKYTSIADSKKFISSFDRIMYVPEEDLFEFALDYKNFSRTDADYIKKWKLYSYGNRIRIFRNPKKNNVFDWEEVCLTSAYKELFNKYGINYQQGDIRALLCEQSDKAFYSSFMALMSLMLQMRNSITGRTDVDFLISPVKNSDGIFYDSRNYEAQENAILPKNADANGAYNIARKVLWAIGQFKKAEDEKLDKVKIAISNKEWLEYAQTSVKH

SEQ ID NO: 171 - protein, 1373 aa, synthetic construct
MGSKLEKFTNCYSLSKTLRFKAIPVGKTQENIDNKRLLVEDEKRAEDYKGVKKLLDRYYLSFINDVLHSIKLKNLNNYISLFRKKTRTEKENKELENLEINLRKEIAKAFKGNEGYKSLFKKDIIETILPEFLDDKDEIALVNSFNGFTTAFTGFFDNRENMFSEEAKSTSIAFRCINENLTRYISNMDIFEKVDAIFDKHEVQEIKEKILNSDYDVEDFFEGEFFNFVLTQEGIDVYNAIIGGFVTESGEKIKGLNEYINLYNQKTKQKLPKFKPLYKQVLSDRESLSFYGEENQTTQKGQKNSRERMKRIEEGIKELGSQILKEHPVENTQLQNEKLYLYYLQNGRDMYVDQELDINRLSDYDVDHIVPQSFLKDDSIDNKVLTRSDKNRGKSDNVPSEEVVKKMKNYWRQLLNAKLITQRKFDNLTKAERGGLSGYTSDEEVLEVFRNTLNKNSEIFSSIKKLEKLFKNFDEYSSAGIFVKNGPAISTISKDIFGEWNVIRDKWNAEYDDIHLKKKAVVTEKYEDDRRKSFKKIGSFSLEQLQEYADADLSVVEKLKEIIIQKVDEIYKVYGSSEKLFDADFVLEKSLKKNDAVVAIMKDLLDSVKSFENYIKAFFGEGKETNRDESFYGDFVLAYDILLKVDHIYDAIRNYVTQKPYSKDKFKLYFQNPQFMGGWDKDKETDYRATILRYGSKYYLAIMDKKYAKCLQKIDKDDVNGNYEKINYKLLPGPNKMLPKVFFSKKWMAYYNPSEDIQKIYKNGTFKKGDMFNLNDCHKLIDFFKDSISRYPKWSNAYDFNFSETEKYKDIAGFYREVEEQGYKVSFESASKKEVDKLVEEGKLYMFQIYNKDFSDKSHGTPNLHTMYFKLLFDENNHGQIRLSGGAELFMRRASLKKEELVVHPANSPIANKNPDNPKKTTTLSYDVYKDKRFSEDQYELHIPIAINKCPKNIFKINTEVRVLLKHDDNPYVIGIDRGERNLLYIVVVDGKGNIVEQYSLNEIINNFNGIRIKTDYHSLLDKKEKERFEARQNWTSIENIKELKAGYISQVVHKICELVEKYDAVIALEDLNSGFKNSRVKVEKQVYQKFEKMLIDKLNYMVDKKSNPCATGGALKGYQITNKFESFKSMSTQNGFIFYIPAWLTSKIDPSTGFVNLLKTKYTSIADSKKFISSFDRIMYVPEEDLFEFALDYKNFSRTDADYIKKWKLYSYGNRIRIFRNPKKNNVFDWEEVCLTSAYKELFNKYGINYQQGDIRALLCEQSDKAFYSSFMALMSLMLQMRNSITGRTDVDFLISPVKNSDGIFYDSRNYEAQENAILPKNADANGAYNIARKVLWAIGQFKKAEDEKLDKVKIAISNKEWLEYAQTSVKH

SEQ ID NO: 172 - protein, 1375 aa, synthetic construct
MGSKLEKFTNCYSLSKTLRFKAIPVGKTQENIDNKRLLVEDEKRAEDYKGVKKLLDRYYLSFINDVLHSIKLKNLNNYISLFRKKTRTEKENKELENLEINLRKEIAKAFKGNEGYKSLFKKDIIETILPEFLDDKDEIALVNSFNGFTTAFTGFFDNRENMFSEEAKSTSIAFRCINENLTRYISNMDIFEKVDAIFDKHEVQEIKEKILNSDYDVEDFFEGEFFNFVLTQEGIDVYNAIIGGFVTESGEKIKGLNEYINLYNQKTKQKLPKFKPLYKQVLSDRESLSFYGEGSENQTTQKGQKNSRERMKRIEEGIKELGSQILKEHPVENTQLQNEKLYLYYLQNGRDMYVDQELDINRLSDYDVDHIVPQSFLKDDSIDNKVLTRSDKNRGKSDNVPSEEVVKKMKNYWRQLLNAKLITQRKFDNLTKAERGGLSGYTSDEEVLEVFRNTLNKNSEIFSSIKKLEKLFKNFDEYSSAGIFVKNGPAISTISKDIFGEWNVIRDKWNAEYDDIHLKKKAVVTEKYEDDRRKSFKKIGSFSLEQLQEYADADLSVVEKLKEIIIQKVDEIYKVYGSSEKLFDADFVLEKSLKKNDAVVAIMKDLLDSVKSFENYIKAFFGEGKETNRDESFYGDFVLAYDILLKVDHIYDAIRNYVTQKPYSKDKFKLYFQNPQFMGGWDKDKETDYRATILRYGSKYYLAIMDKKYAKCLQKIDKDDVNGNYEKINYKLLPGPNKMLPKVFFSKKWMAYYNPSEDIQKIYKNGTFKKGDMFNLNDCHKLIDFFKDSISRYPKWSNAYDFNFSETEKYKDIAGFYREVEEQGYKVSFESASKKEVDKLVEEGKLYMFQIYNKDFSDKSHGTPNLHTMYFKLLFDENNHGQIRLSGGAELFMRRASLKKEELVVHPANSPIANKNPDNPKKTTTLSYDVYKDKRFSEDQYELHIPIAINKCPKNIFKINTEVRVLLKHDDNPYVIGIDRGERNLLYIVVVDGKGNIVEQYSLNEIINNFNGIRIKTDYHSLLDKKEKERFEARQNWTSIENIKELKAGYISQVVHKICELVEKYDAVIALEDLNSGFKNSRVKVEKQVYQKFEKMLIDKLNYMVDKKSNPCATGGALKGYQITNKFESFKSMSTQNGFIFYIPAWLTSKIDPSTGFVNLLKTKYTSIADSKKFISSFDRIMYVPEEDLFEFALDYKNFSRTDADYIKKWKLYSYGNRIRIFRNPKKNNVFDWEEVCLTSAYKELFNKYGINYQQGDIRALLCEQSDKAFYSSFMALMSLMLQMRNSITGRTDVDFLISPVKNSDGIFYDSRNYEAQENAILPKNADANGAYNIARKVLWAIGQFKKAEDEKLDKVKIAISNKEWLEYAQTSVKH

SEQ ID NO: 173 - protein, 1377 aa, synthetic construct
MGSKLEKFTNCYSLSKTLRFKAIPVGKTQENIDNKRLLVEDEKRAEDYKGVKKLLDRYYLSFINDVLHSIKLKNLNNYISLFRKKTRTEKENKELENLEINLRKEIAKAFKGNEGYKSLFKKDIIETILPEFLDDKDEIALVNSFNGFTTAFTGFFDNRENMFSEEAKSTSIAFRCINENLTRYISNMDIFEKVDAIFDKHEVQEIKEKILNSDYDVEDFFEGEFFNFVLTQEGIDVYNAIIGGFVTESGEKIKGLNEYINLYNQKTKQKLPKFKPLYKQVLSDRESLSFYGEGSSGENQTTQKGQKNSRERMKRIEEGIKELGSQILKEHPVENTQLQNEKLYLYYLQNGRDMYVDQELDINRLSDYDVDHIVPQSFLKDDSIDNKVLTRSDKNRGKSDNVPSEEVVKKMKNYWRQLLNAKLITQRKFDNLTKAERGGLSGYTSDEEVLEVFRNTLNKNSEIFSSIKKLEKLFKNFDEYSSAGIFVKNGPAISTISKDIFGEWNVIRDKWNAEYDDIHLKKKAVVTEKYEDDRRKSFKKIGSFSLEQLQEYADADLSVVEKLKEIIIQKVDEIYKVYGSSEKLFDADFVLEKSLKKNDAVVAIMKDLLDSVKSFENYIKAFFGEGKETNRDESFYGDFVLAYDILLKVDHIYDAIRNYVTQKPYSKDKFKLYFQNPQFMGGWDKDKETDYRATILRYGSKYYLAIMDKKYAKCLQKIDKDDVNGNYEKINYKLLPGPNKMLPKVFFSKKWMAYYNPSEDIQKIYKNGTFKKGDMFNLNDCHKLIDFFKDSISRYPKWSNAYDFNFSETEKYKDIAGFYREVEEQGYKVSFESASKKEVDKLVEEGKLYMFQIYNKDFSDKSHGTPNLHTMYFKLLFDENNHGQIRLSGGAELFMRRASLKKEELVVHPANSPIANKNPDNPKKTTTLSYDVYKDKRFSEDQYELHIPIAINKCPKNIFKINTEVRVLLKHDDNPYVIGIDRGERNLLYIVVVDGKGNIVEQYSLNEIINNFNGIRIKTDYHSLLDKKEKERFEARQNWTSIENIKELKAGYISQVVHKICELVEKYDAVIALEDLNSGFKNSRVKVEKQVYQKFEKMLIDKLNYMVDKKSNPCATGGALKGYQITNKFESFKSMSTQNGFIFYIPAWLTSKIDPSTGFVNLLKTKYTSIADSKKFISSFDRIMYVPEEDLFEFALDYKNFSRTDADYIKKWKLYSYGNRIRIFRNPKKNNVFDWEEVCLTSAYKELFNKYGINYQQGDIRALLCEQSDKAFYSSFMALMSLMLQMRNSITGRTDVDFLISPVKNSDGIFYDSRNYEAQENAILPKNADANGAYNIARKVLWAIGQFKKAEDEKLDKVKIAISNKEWLEYAQTSVKH

SEQ ID NO: 174 - protein, 1379 aa, synthetic construct
MGSKLEKFTNCYSLSKTLRFKAIPVGKTQENIDNKRLLVEDEKRAEDYKGVKKLLDRYYLSFINDVLHSIKLKNLNNYISLFRKKTRTEKENKELENLEINLRKEIAKAFKGNEGYKSLFKKDIIETILPEFLDDKDEIALVNSFNGFTTAFTGFFDNRENMFSEEAKSTSIAFRCINENLTRYISNMDIFEKVDAIFDKHEVQEIKEKILNSDYDVEDFFEGEFFNFVLTQEGIDVYNAIIGGFVTESGEKIKGLNEYINLYNQKTKQKLPKFKPLYKQVLSDRESLSFYGEGSSGENQTTQKGQKNSRERMKRIEEGIKELGSQILKEHPVENTQLQNEKLYLYYLQNGRDMYVDQELDINRLSDYDVDHIVPQSFLKDDSIDNKVLTRSDKNRGKSDNVPSEEVVKKMKNYWRQLLNAKLITQRKFDNLTKAERGGLSGSGYTSDEEVLEVFRNTLNKNSEIFSSIKKLEKLFKNFDEYSSAGIFVKNGPAISTISKDIFGEWNVIRDKWNAEYDDIHLKKKAVVTEKYEDDRRKSFKKIGSFSLEQLQEYADADLSVVEKLKEIIIQKVDEIYKVYGSSEKLFDADFVLEKSLKKNDAVVAIMKDLLDSVKSFENYIKAFFGEGKETNRDESFYGDFVLAYDILLKVDHIYDAIRNYVTQKPYSKDKFKLYFQNPQFMGGWDKDKETDYRATILRYGSKYYLAIMDKKYAKCLQKIDKDDVNGNYEKINYKLLPGPNKMLPKVFFSKKWMAYYNPSEDIQKIYKNGTFKKGDMFNLNDCHKLIDFFKDSISRYPKWSNAYDFNFSETEKYKDIAGFYREVEEQGYKVSFESASKKEVDKLVEEGKLYMFQIYNKDFSDKSHGTPNLHTMYFKLLFDENNHGQIRLSGGAELFMRRASLKKEELVVHPANSPIANKNPDNPKKTTTLSYDVYKDKRFSEDQYELHIPIAINKCPKNIFKINTEVRVLLKHDDNPYVIGIDRGERNLLYIVVVDGKGNIVEQYSLNEIINNFNGIRIKTDYHSLLDKKEKERFEARQNWTSIENIKELKAGYISQVVHKICELVEKYDAVIALEDLNSGFKNSRVKVEKQVYQKFEKMLIDKLNYMVDKKSNPCATGGALKGYQITNKFESFKSMSTQNGFIFYIPAWLTSKIDPSTGFVNLLKTKYTSIADSKKFISSFDRIMYVPEEDLFEFALDYKNFSRTDADYIKKWKLYSYGNRIRIFRNPKKNNVFDWEEVCLTSAYKELFNKYGINYQQGDIRALLCEQSDKAFYSSFMALMSLMLQMRNSITGRTDVDFLISPVKNSDGIFYDSRNYEAQENAILPKNADANGAYNIARKVLWAIGQFKKAEDEKLDKVKIAISNKEWLEYAQTSVKH

SEQ ID NO: 175 - protein, 1787 aa, synthetic construct
MKRTADGSEFESPKKKRKVSKLEKFTNCYSLSKTLRFKAIPVGKTQENIDNKRLLVEDEKRAEDYKGVKKLLDRYYLSFINDVLHSIKLKNLNNYISLFRKKTRTEKENKELENLEINLRKEIAKAFKGNEGYKSLFKKDIIETILPEFLDDKDEIALVNSFNGFTTAFTGFFDNRENMFSEEAKSTSIAFRCINENLTRYISNMDIFEKVDAIFDKHEVQEIKEKILNSDYDVEDFFEGEFFNFVLTQEGIDVYNAIIGGFVTESGEKIKGLNEYINLYNQKTKQKLPKFKPLYKQVLSDRESLSFYGEGSSGENQTTQKGQKNSRERMKRIEEGIKELGSQILKEHPVENTQLQNEKLYLYYLQNGRDMYVDQELDINRLSDYDVDHIVPQSFLKDDSIDNKVLTRSDKNRGKSDNVPSEEVVKKMKNYWRQLLNAKLITQRKFDNLTKAERGGLSGYTSDEEVLEVFRNTLNKNSEIFSSIKKLEKLFKNFDEYSSAGIFVKNGPAISTISKDIFGEWNVIRDKWNAEYDDIHLKKKAVVTEKYEDDRRKSFKKIGSFSLEQLQEYADADLSVVEKLKEIIIQKVDEIYKVYGSSEKLFDADFVLEKSLKKNDAVVAIMKDLLDSVKSFENYIKAFFGEGKETNRDESFYGDFVLAYDILLKVDHIYDAIRNYVTQKPYSKDKFKLYFQNPQFMGGWDKDKETDYRATILRYGSKYYLAIMDKKYAKCLQKIDKDDVNGNYEKINYKLLPGPNKMLPKVFFSKKWMAYYNPSEDIQKIYKNGTFKKGDMFNLNDCHKLIDFFKDSISRYPKWSNAYDFNFSETEKYKDIAGFYREVEEQGYKVSFESASKKEVDKLVEEGKLYMFQIYNKDFSDKSHGTPNLHTMYFKLLFDENNHGQIRLSGGAELFMRRASLKKEELVVHPANSPIANKNPDNPKKTTTLSYDVYKDKRFSEDQYELHIPIAINKCPKNIFKINTEVRVLLKHDDNPYVIGIARGERNLLYIVVVDGKGNIVEQYSLNEIINNFNGIRIKTDYHSLLDKKEKERFEARQNWTSIENIKELKAGYISQVVHKICELVEKYDAVIALEDLNSGFKNSRVKVEKQVYQKFEKMLIDKLNYMVDKKSNPCATGGALKGYQITNKFESFKSMSTQNGFIFYIPAWLTSKIDPSTGFVNLLKTKYTSIADSKKFISSFDRIMYVPEEDLFEFALDYKNFSRTDADYIKKWKLYSYGNRIRIFRNPKKNNVFDWEEVCLTSAYKELFNKYGINYQQGDIRALLCEQSDKAFYSSFMALMSLMLQMRNSITGRTDVDFLISPVKNSDGIFYDSRNYEAQENAILPKNADANGAYNIARKVLWAIGQFKKAEDEKLDKVKIAISNKEWLEYAQTSVKHGGGGSGGGGSGGGGSGPKKKRKVAAAGSEELLSKNYHLENEVARLKKGSGSGGSGSGGSGSGSGGSGSGGSGSGEELLSKNYHLENEVARLKKGSGSGGSGSGGSGSGSGGSGSGGSGSGEELLSKNYHLENEVARLKKGSGSGGSGSGGSGSGSGGSGSGGSGSGEELLSKNYHLENEVARLKKGSGSGGSGSGGSGSGSGGSGSGGSGSGEELLSKNYHLENEVARLKKGSGSGGSGSGGSGSGSGGSGSGGSGSGEELLSKNYHLENEVARLKKGSGSGGSGSGGSGSGSGGSGSGGSGSGEELLSKNYHLENEVARLKKGSGSGGSGSGGSGSGSGGSGSGGSGSGEELLSKNYHLENEVARLKKSGGSKRTADGSEFEPKKKRKVGSG

SEQ ID NO: 176 - protein, 1787 aa, synthetic construct
MKRTADGSEFESPKKKRKVSKLEKFTNCYSLSKTLRFKAIPVGKTQENIDNKRLLVEDEKRAEDYKGVKKLLDRYYLSFINDVLHSIKLKNLNNYISLFRKKTRTEKENKELENLEINLRKEIAKAFKGNEGYKSLFKKDIIETILPEFLDDKDEIALVNSFNGFTTAFTGFFDNRENMFSEEAKSTSIAFRCINENLTRYISNMDIFEKVDAIFDKHEVQEIKEKILNSDYDVEDFFEGEFFNFVLTQEGIDVYNAIIGGFVTESGEKIKGLNEYINLYNQKTKQKLPKFKPLYKQVLSDRESLSFYGGSSGENQTTQKGQKNSRERMKRIEEGIKELGSQILKEHPVENTQLQNEKLYLYYLQNGRDMYVDQELDINRLSDYDVDHIVPQSFLKDDSIDNKVLTRSDKNRGKSDNVPSEEVVKKMKNYWRQLLNAKLITQRKFDNLTKAERGGLSEGYTSDEEVLEVFRNTLNKNSEIFSSIKKLEKLFKNFDEYSSAGIFVKNGPAISTISKDIFGEWNVIRDKWNAEYDDIHLKKKAVVTEKYEDDRRKSFKKIGSFSLEQLQEYADADLSVVEKLKEIIIQKVDEIYKVYGSSEKLFDADFVLEKSLKKNDAVVAIMKDLLDSVKSFENYIKAFFGEGKETNRDESFYGDFVLAYDILLKVDHIYDAIRNYVTQKPYSKDKFKLYFQNPQFMGGWDKDKETDYRATILRYGSKYYLAIMDKKYAKCLQKIDKDDVNGNYEKINYKLLPGPNKMLPKVFFSKKWMAYYNPSEDIQKIYKNGTFKKGDMFNLNDCHKLIDFFKDSISRYPKWSNAYDFNFSETEKYKDIAGFYREVEEQGYKVSFESASKKEVDKLVEEGKLYMFQIYNKDFSDKSHGTPNLHTMYFKLLFDENNHGQIRLSGGAELFMRRASLKKEELVVHPANSPIANKNPDNPKKTTTLSYDVYKDKRFSEDQYELHIPIAINKCPKNIFKINTEVRVLLKHDDNPYVIGIARGERNLLYIVVVDGKGNIVEQYSLNEIINNFNGIRIKTDYHSLLDKKEKERFEARQNWTSIENIKELKAGYISQVVHKICELVEKYDAVIALEDLNSGFKNSRVKVEKQVYQKFEKMLIDKLNYMVDKKSNPCATGGALKGYQITNKFESFKSMSTQNGFIFYIPAWLTSKIDPSTGFVNLLKTKYTSIADSKKFISSFDRIMYVPEEDLFEFALDYKNFSRTDADYIKKWKLYSYGNRIRIFRNPKKNNVFDWEEVCLTSAYKELFNKYGINYQQGDIRALLCEQSDKAFYSSFMALMSLMLQMRNSITGRTDVDFLISPVKNSDGIFYDSRNYEAQENAILPKNADANGAYNIARKVLWAIGQFKKAEDEKLDKVKIAISNKEWLEYAQTSVKHGGGGSGGGGSGGGGSGPKKKRKVAAAGSEELLSKNYHLENEVARLKKGSGSGGSGSGGSGSGSGGSGSGGSGSGEELLSKNYHLENEVARLKKGSGSGGSGSGGSGSGSGGSGSGGSGSGEELLSKNYHLENEVARLKKGSGSGGSGSGGSGSGSGGSGSGGSGSGEELLSKNYHLENEVARLKKGSGSGGSGSGGSGSGSGGSGSGGSGSGEELLSKNYHLENEVARLKKGSGSGGSGSGGSGSGSGGSGSGGSGSGEELLSKNYHLENEVARLKKGSGSGGSGSGGSGSGSGGSGSGGSGSGEELLSKNYHLENEVARLKKGSGSGGSGSGGSGSGSGGSGSGGSGSGEELLSKNYHLENEVARLKKSGGSKRTADGSEFEPKKKRKVGSG

SEQ ID NO: 177 - protein, 1789 aa, synthetic construct
MKRTADGSEFESPKKKRKVSKLEKFTNCYSLSKTLRFKAIPVGKTQENIDNKRLLVEDEKRAEDYKGVKKLLDRYYLSFINDVLHSIKLKNLNNYISLFRKKTRTEKENKELENLEINLRKEIAKAFKGNEGYKSLFKKDIIETILPEFLDDKDEIALVNSFNGFTTAFTGFFDNRENMFSEEAKSTSIAFRCINENLTRYISNMDIFEKVDAIFDKHEVQEIKEKILNSDYDVEDFFEGEFFNFVLTQEGIDVYNAIIGGFVTESGEKIKGLNEYINLYNQKTKQKLPKFKPLYKQVLSDRESLSFYGGSSGENQTTQKGQKNSRERMKRIEEGIKELGSQILKEHPVENTQLQNEKLYLYYLQNGRDMYVDQELDINRLSDYDVDHIVPQSFLKDDSIDNKVLTRSDKNRGKSDNVPSEEVVKKMKNYWRQLLNAKLITQRKFDNLTKAERGGLSGSEGYTSDEEVLEVFRNTLNKNSEIFSSIKKLEKLFKNFDEYSSAGIFVKNGPAISTISKDIFGEWNVIRDKWNAEYDDIHLKKKAVVTEKYEDDRRKSFKKIGSFSLEQLQEYADADLSVVEKLKEIIIQKVDEIYKVYGSSEKLFDADFVLEKSLKKNDAVVAIMKDLLDSVKSFENYIKAFFGEGKETNRDESFYGDFVLAYDILLKVDHIYDAIRNYVTQKPYSKDKFKLYFQNPQFMGGWDKDKETDYRATILRYGSKYYLAIMDKKYAKCLQKIDKDDVNGNYEKINYKLLPGPNKMLPKVFFSKKWMAYYNPSEDIQKIYKNGTFKKGDMFNLNDCHKLIDFFKDSISRYPKWSNAYDFNFSETEKYKDIAGFYREVEEQGYKVSFESASKKEVDKLVEEGKLYMFQIYNKDFSDKSHGTPNLHTMYFKLLFDENNHGQIRLSGGAELFMRRASLKKEELVVHPANSPIANKNPDNPKKTTTLSYDVYKDKRFSEDQYELHIPIAINKCPKNIFKINTEVRVLLKHDDNPYVIGIARGERNLLYIVVVDGKGNIVEQYSLNEIINNFNGIRIKTDYHSLLDKKEKERFEARQNWTSIENIKELKAGYISQVVHKICELVEKYDAVIALEDLNSGFKNSRVKVEKQVYQKFEKMLIDKLNYMVDKKSNPCATGGALKGYQITNKFESFKSMSTQNGFIFYIPAWLTSKIDPSTGFVNLLKTKYTSIADSKKFISSFDRIMYVPEEDLFEFALDYKNFSRTDADYIKKWKLYSYGNRIRIFRNPKKNNVFDWEEVCLTSAYKELFNKYGINYQQGDIRALLCEQSDKAFYSSFMALMSLMLQMRNSITGRTDVDFLISPVKNSDGIFYDSRNYEAQENAILPKNADANGAYNIARKVLWAIGQFKKAEDEKLDKVKIAISNKEWLEYAQTSVKHGGGGSGGGGSGGGGSGPKKKRKVAAAGSEELLSKNYHLENEVARLKKGSGSGGSGSGGSGSGSGGSGSGGSGSGEELLSKNYHLENEVARLKKGSGSGGSGSGGSGSGSGGSGSGGSGSGEELLSKNYHLENEVARLKKGSGSGGSGSGGSGSGSGGSGSGGSGSGEELLSKNYHLENEVARLKKGSGSGGSGSGGSGSGSGGSGSGGSGSGEELLSKNYHLENEVARLKKGSGSGGSGSGGSGSGSGGSGSGGSGSGEELLSKNYHLENEVARLKKGSGSGGSGSGGSGSGSGGSGSGGSGSGEELLSKNYHLENEVARLKKGSGSGGSGSGGSGSGSGGSGSGGSGSGEELLSKNYHLENEVARLKKSGGSKRTADGSEFEPKKKRKVGSG

SEQ ID NO: 178 - protein, 1739 aa, synthetic construct
MKRTADGSEFESPKKKRKVEASPASGPRHLMDPHIFTSNFNNGIGRHKTYLCYEVERLDNGTSVKMDQHRGFLHNQAKNLLCGFYGRHAELRFLDLVPSLQLDPAQIYRVTWFISWSPCFSWGCAGEVRAFLQENTHVRLRIFAARIYDYDPLYKEALQMLRDAGAQVSIMTYDEFKHCWDTFVDHQGCPFQPWDGLDEHSQALSGRLRAILQNQGNSTSQSDGSSVPADIDQSSDSDQSSSQGQPGSKLEKFTNCYSLSKTLRFKAIPVGKTQENIDNKRLLVEDEKRAEDYKGVKKLLDRYYLSFINDVLHSIKLKNLNNYISLFRKKTRTEKENKELENLEINLRKEIAKAFKGNEGYKSLFKKDIIETILPEFLDDKDEIALVNSFNGFTTAFTGFFDNRENMFSEEAKSTSIAFRCINENLTRYISNMDIFEKVDAIFDKHEVQEIKEKILNSDYDVEDFFEGEFFNFVLTQEGIDVYNAIIGGFVTESGEKIKGLNEYINLYNQKTKQKLPKFKPLYKQVLSDRESLSFYGEGSSGENQTTQKGQKNSRERMKRIEEGIKELGSQILKEHPVENTQLQNEKLYLYYLQNGRDMYVDQELDINRLSDYDVDHIVPQSFLKDDSIDNKVLTRSDKNRGKSDNVPSEEVVKKMKNYWRQLLNAKLITQRKFDNLTKAERGGLSGYTSDEEVLEVFRNTLNKNSEIFSSIKKLEKLFKNFDEYSSAGIFVKNGPAISTISKDIFGEWNVIRDKWNAEYDDIHLKKKAVVTEKYEDDRRKSFKKIGSFSLEQLQEYADADLSVVEKLKEIIIQKVDEIYKVYGSSEKLFDADFVLEKSLKKNDAVVAIMKDLLDSVKSFENYIKAFFGEGKETNRDESFYGDFVLAYDILLKVDHIYDAIRNYVTQKPYSKDKFKLYFQNPQFMGGWDKDKETDYRATILRYGSKYYLAIMDKKYAKCLQKIDKDDVNGNYEKINYKLLPGPNKMLPKVFFSKKWMAYYNPSEDIQKIYKNGTFKKGDMFNLNDCHKLIDFFKDSISRYPKWSNAYDFNFSETEKYKDIAGFYREVEEQGYKVSFESASKKEVDKLVEEGKLYMFQIYNKDFSDKSHGTPNLHTMYFKLLFDENNHGQIRLSGGAELFMRRASLKKEELVVHPANSPIANKNPDNPKKTTTLSYDVYKDKRFSEDQYELHIPIAINKCPKNIFKINTEVRVLLKHDDNPYVIGIARGERNLLYIVVVDGKGNIVEQYSLNEIINNFNGIRIKTDYHSLLDKKEKERFEARQNWTSIENIKELKAGYISQVVHKICELVEKYDAVIALEDLNSGFKNSRVKVEKQVYQKFEKMLIDKLNYMVDKKSNPCATGGALKGYQITNKFESFKSMSTQNGFIFYIPAWLTSKIDPSTGFVNLLKTKYTSIADSKKFISSFDRIMYVPEEDLFEFALDYKNFSRTDADYIKKWKLYSYGNRIRIFRNPKKNNVFDWEEVCLTSAYKELFNKYGINYQQGDIRALLCEQSDKAFYSSFMALMSLMLQMRNSITGRTDVDFLISPVKNSDGIFYDSRNYEAQENAILPKNADANGAYNIARKVLWAIGQFKKAEDEKLDKVKIAISNKEWLEYAQTSVKHSGGSGGSGGSTNLSDIIEKETGKQLVIQESILMLPEEVEEVIGNKPESDILVHTAYDESTDENVMLLTSDAPEYKPWALVIQDSNGENKIKMLSGGSKRTADGSEFEPKKKRKVGSG

SEQ ID NO: 179 - protein, 1739 aa, synthetic construct
MKRTADGSEFESPKKKRKVEASPASGPRHLMDPHIFTSNFNNGIGRHKTYLCYEVERLDNGTSVKMDQHRGFLHNQAKNLLCGFYGRHAELRFLDLVPSLQLDPAQIYRVTWFISWSPCFSWGCAGEVRAFLQENTHVRLRIFAARIYDYDPLYKEALQMLRDAGAQVSIMTYDEFKHCWDTFVDHQGCPFQPWDGLDEHSQALSGRLRAILQNQGNSTSQSDGSSVPADIDQSSDSDQSSSQGQPGSKLEKFTNCYSLSKTLRFKAIPVGKTQENIDNKRLLVEDEKRAEDYKGVKKLLDRYYLSFINDVLHSIKLKNLNNYISLFRKKTRTEKENKELENLEINLRKEIAKAFKGNEGYKSLFKKDIIETILPEFLDDKDEIALVNSFNGFTTAFTGFFDNRENMFSEEAKSTSIAFRCINENLTRYISNMDIFEKVDAIFDKHEVQEIKEKILNSDYDVEDFFEGEFFNFVLTQEGIDVYNAIIGGFVTESGEKIKGLNEYINLYNQKTKQKLPKFKPLYKQVLSDRESLSFYGGSSGENQTTQKGQKNSRERMKRIEEGIKELGSQILKEHPVENTQLQNEKLYLYYLQNGRDMYVDQELDINRLSDYDVDHIVPQSFLKDDSIDNKVLTRSDKNRGKSDNVPSEEVVKKMKNYWRQLLNAKLITQRKFDNLTKAERGGLSEGYTSDEEVLEVFRNTLNKNSEIFSSIKKLEKLFKNFDEYSSAGIFVKNGPAISTISKDIFGEWNVIRDKWNAEYDDIHLKKKAVVTEKYEDDRRKSFKKIGSFSLEQLQEYADADLSVVEKLKEIIIQKVDEIYKVYGSSEKLFDADFVLEKSLKKNDAVVAIMKDLLDSVKSFENYIKAFFGEGKETNRDESFYGDFVLAYDILLKVDHIYDAIRNYVTQKPYSKDKFKLYFQNPQFMGGWDKDKETDYRATILRYGSKYYLAIMDKKYAKCLQKIDKDDVNGNYEKINYKLLPGPNKMLPKVFFSKKWMAYYNPSEDIQKIYKNGTFKKGDMFNLNDCHKLIDFFKDSISRYPKWSNAYDFNFSETEKYKDIAGFYREVEEQGYKVSFESASKKEVDKLVEEGKLYMFQIYNKDFSDKSHGTPNLHTMYFKLLFDENNHGQIRLSGGAELFMRRASLKKEELVVHPANSPIANKNPDNPKKTTTLSYDVYKDKRFSEDQYELHIPIAINKCPKNIFKINTEVRVLLKHDDNPYVIGIARGERNLLYIVVVDGKGNIVEQYSLNEIINNFNGIRIKTDYHSLLDKKEKERFEARQNWTSIENIKELKAGYISQVVHKICELVEKYDAVIALEDLNSGFKNSRVKVEKQVYQKFEKMLIDKLNYMVDKKSNPCATGGALKGYQITNKFESFKSMSTQNGFIFYIPAWLTSKIDPSTGFVNLLKTKYTSIADSKKFISSFDRIMYVPEEDLFEFALDYKNFSRTDADYIKKWKLYSYGNRIRIFRNPKKNNVFDWEEVCLTSAYKELFNKYGINYQQGDIRALLCEQSDKAFYSSFMALMSLMLQMRNSITGRTDVDFLISPVKNSDGIFYDSRNYEAQENAILPKNADANGAYNIARKVLWAIGQFKKAEDEKLDKVKIAISNKEWLEYAQTSVKHSGGSGGSGGSTNLSDIIEKETGKQLVIQESILMLPEEVEEVIGNKPESDILVHTAYDESTDENVMLLTSDAPEYKPWALVIQDSNGENKIKMLSGGSKRTADGSEFEPKKKRKVGSG

SEQ ID NO: 180 - protein, 1741 aa, synthetic construct
MKRTADGSEFESPKKKRKVEASPASGPRHLMDPHIFTSNFNNGIGRHKTYLCYEVERLDNGTSVKMDQHRGFLHNQAKNLLCGFYGRHAELRFLDLVPSLQLDPAQIYRVTWFISWSPCFSWGCAGEVRAFLQENTHVRLRIFAARIYDYDPLYKEALQMLRDAGAQVSIMTYDEFKHCWDTFVDHQGCPFQPWDGLDEHSQALSGRLRAILQNQGNSTSQSDGSSVPADIDQSSDSDQSSSQGQPGSKLEKFTNCYSLSKTLRFKAIPVGKTQENIDNKRLLVEDEKRAEDYKGVKKLLDRYYLSFINDVLHSIKLKNLNNYISLFRKKTRTEKENKELENLEINLRKEIAKAFKGNEGYKSLFKKDIIETILPEFLDDKDEIALVNSFNGFTTAFTGFFDNRENMFSEEAKSTSIAFRCINENLTRYISNMDIFEKVDAIFDKHEVQEIKEKILNSDYDVEDFFEGEFFNFVLTQEGIDVYNAIIGGFVTESGEKIKGLNEYINLYNQKTKQKLPKFKPLYKQVLSDRESLSFYGGSSGENQTTQKGQKNSRERMKRIEEGIKELGSQILKEHPVENTQLQNEKLYLYYLQNGRDMYVDQELDINRLSDYDVDHIVPQSFLKDDSIDNKVLTRSDKNRGKSDNVPSEEVVKKMKNYWRQLLNAKLITQRKFDNLTKAERGGLSGSEGYTSDEEVLEVFRNTLNKNSEIFSSIKKLEKLFKNFDEYSSAGIFVKNGPAISTISKDIFGEWNVIRDKWNAEYDDIHLKKKAVVTEKYEDDRRKSFKKIGSFSLEQLQEYADADLSVVEKLKEIIIQKVDEIYKVYGSSEKLFDADFVLEKSLKKNDAVVAIMKDLLDSVKSFENYIKAFFGEGKETNRDESFYGDFVLAYDILLKVDHIYDAIRNYVTQKPYSKDKFKLYFQNPQFMGGWDKDKETDYRATILRYGSKYYLAIMDKKYAKCLQKIDKDDVNGNYEKINYKLLPGPNKMLPKVFFSKKWMAYYNPSEDIQKIYKNGTFKKGDMFNLNDCHKLIDFFKDSISRYPKWSNAYDFNFSETEKYKDIAGFYREVEEQGYKVSFESASKKEVDKLVEEGKLYMFQIYNKDFSDKSHGTPNLHTMYFKLLFDENNHGQIRLSGGAELFMRRASLKKEELVVHPANSPIANKNPDNPKKTTTLSYDVYKDKRFSEDQYELHIPIAINKCPKNIFKINTEVRVLLKHDDNPYVIGIARGERNLLYIVVVDGKGNIVEQYSLNEIINNFNGIRIKTDYHSLLDKKEKERFEARQNWTSIENIKELKAGYISQVVHKICELVEKYDAVIALEDLNSGFKNSRVKVEKQVYQKFEKMLIDKLNYMVDKKSNPCATGGALKGYQITNKFESFKSMSTQNGFIFYIPAWLTSKIDPSTGFVNLLKTKYTSIADSKKFISSFDRIMYVPEEDLFEFALDYKNFSRTDADYIKKWKLYSYGNRIRIFRNPKKNNVFDWEEVCLTSAYKELFNKYGINYQQGDIRALLCEQSDKAFYSSFMALMSLMLQMRNSITGRTDVDFLISPVKNSDGIFYDSRNYEAQENAILPKNADANGAYNIARKVLWAIGQFKKAEDEKLDKVKIAISNKEWLEYAQTSVKHSGGSGGSGGSTNLSDIIEKETGKQLVIQESILMLPEEVEEVIGNKPESDILVHTAYDESTDENVMLLTSDAPEYKPWALVIQDSNGENKIKMLSGGSKRTADGSEFEPKKKRKVGSG

SEQ ID NO: 181 - protein, 1734 aa, synthetic construct
MKRTADGSEFESPKKKRKVMEASPASGPRHLMDPHIFTSNFNNGIGRHKTYLCYEVERLDNGTSVKMDQHRGFLHNQAKNLLCGFYGRHAELRFLDLVPSLQLDPAQIYRVTWFISWSPCFSWGCAGEVRAFLQENTHVRLRIFAARIYDYDPLYKEALQMLRDAGAQVSIMTYDEFKHCWDTFVDHQGCPFQPWDGLDEHSQALSGRLRAILQNQGNSGSETPGTSESATPESMSKLEKFTNCYSLSKTLRFKAIPVGKTQENIDNKRLLVEDEKRAEDYKGVKKLLDRYYLSFINDVLHSIKLKNLNNYISLFRKKTRTEKENKELENLEINLRKEIAKAFKGNEGYKSLFKKDIIETILPEFLDDKDEIALVNSFNGFTTAFTGFFDNRENMFSEEAKSTSIAFRCINENLTRYISNMDIFEKVDAIFDKHEVQEIKEKILNSDYDVEDFFEGEFFNFVLTQEGIDVYNAIIGGFVTESGEKIKGLNEYINLYNQKTKQKLPKFKPLYKQVLSDRESLSFYGEGSSGENQTTQKGQKNSRERMKRIEEGIKELGSQILKEHPVENTQLQNEKLYLYYLQNGRDMYVDQELDINRLSDYDVDHIVPQSFLKDDSIDNKVLTRSDKNRGKSDNVPSEEVVKKMKNYWRQLLNAKLITQRKFDNLTKAERGGLSGYTSDEEVLEVFRNTLNKNSEIFSSIKKLEKLFKNFDEYSSAGIFVKNGPAISTISKDIFGEWNVIRDKWNAEYDDIHLKKKAVVTEKYEDDRRKSFKKIGSFSLEQLQEYADADLSVVEKLKEIIIQKVDEIYKVYGSSEKLFDADFVLEKSLKKNDAVVAIMKDLLDSVKSFENYIKAFFGEGKETNRDESFYGDFVLAYDILLKVDHIYDAIRNYVTQKPYSKDKFKLYFQNPQFMGGWDKDKETDYRATILRYGSKYYLAIMDKKYAKCLQKIDKDDVNGNYEKINYKLLPGPNKMLPKVFFSKKWMAYYNPSEDIQKIYKNGTFKKGDMFNLNDCHKLIDFFKDSISRYPKWSNAYDFNFSETEKYKDIAGFYREVEEQGYKVSFESASKKEVDKLVEEGKLYMFQIYNKDFSDKSHGTPNLHTMYFKLLFDENNHGQIRLSGGAELFMRRASLKKEELVVHPANSPIANKNPDNPKKTTTLSYDVYKDKRFSEDQYELHIPIAINKCPKNIFKINTEVRVLLKHDDNPYVIGIARGERNLLYIVVVDGKGNIVEQYSLNEIINNFNGIRIKTDYHSLLDKKEKERFEARQNWTSIENIKELKAGYISQVVHKICELVEKYDAVIALEDLNSGFKNSRVKVEKQVYQKFEKMLIDKLNYMVDKKSNPCATGGALKGYQITNKFESFKSMSTQNGFIFYIPAWLTSKIDPSTGFVNLLKTKYTSIADSKKFISSFDRIMYVPEEDLFEFALDYKNFSRTDADYIKKWKLYSYGNRIRIFRNPKKNNVFDWEEVCLTSAYKELFNKYGINYQQGDIRALLCEQSDKAFYSSFMALMSLMLQMRNSITGRTDVDFLISPVKNSDGIFYDSRNYEAQENAILPKNADANGAYNIARKVLWAIGQFKKAEDEKLDKVKIAISNKEWLEYAQTSVKHGSPKKKRKVSGGSTNLSDIIEKETGKQLVIQESILMLPEEVEEVIGNKPESDILVHTAYDESTDENVMLLTSDAPEYKPWALVIQDSNGENKIKMLTKYDSGGSKRTADGSEFEPKKKRKVGSG

SEQ ID NO: 182 - protein, 1734 aa, synthetic construct
MKRTADGSEFESPKKKRKVMEASPASGPRHLMDPHIFTSNFNNGIGRHKTYLCYEVERLDNGTSVKMDQHRGFLHNQAKNLLCGFYGRHAELRFLDLVPSLQLDPAQIYRVTWFISWSPCFSWGCAGEVRAFLQENTHVRLRIFAARIYDYDPLYKEALQMLRDAGAQVSIMTYDEFKHCWDTFVDHQGCPFQPWDGLDEHSQALSGRLRAILQNQGNSGSETPGTSESATPESMSKLEKFTNCYSLSKTLRFKAIPVGKTQENIDNKRLLVEDEKRAEDYKGVKKLLDRYYLSFINDVLHSIKLKNLNNYISLFRKKTRTEKENKELENLEINLRKEIAKAFKGNEGYKSLFKKDIIETILPEFLDDKDEIALVNSFNGFTTAFTGFFDNRENMFSEEAKSTSIAFRCINENLTRYISNMDIFEKVDAIFDKHEVQEIKEKILNSDYDVEDFFEGEFFNFVLTQEGIDVYNAIIGGFVTESGEKIKGLNEYINLYNQKTKQKLPKFKPLYKQVLSDRESLSFYGGSSGENQTTQKGQKNSRERMKRIEEGIKELGSQILKEHPVENTQLQNEKLYLYYLQNGRDMYVDQELDINRLSDYDVDHIVPQSFLKDDSIDNKVLTRSDKNRGKSDNVPSEEVVKKMKNYWRQLLNAKLITQRKFDNLTKAERGGLSEGYTSDEEVLEVFRNTLNKNSEIFSSIKKLEKLFKNFDEYSSAGIFVKNGPAISTISKDIFGEWNVIRDKWNAEYDDIHLKKKAVVTEKYEDDRRKSFKKIGSFSLEQLQEYADADLSVVEKLKEIIIQKVDEIYKVYGSSEKLFDADFVLEKSLKKNDAVVAIMKDLLDSVKSFENYIKAFFGEGKETNRDESFYGDFVLAYDILLKVDHIYDAIRNYVTQKPYSKDKFKLYFQNPQFMGGWDKDKETDYRATILRYGSKYYLAIMDKKYAKCLQKIDKDDVNGNYEKINYKLLPGPNKMLPKVFFSKKWMAYYNPSEDIQKIYKNGTFKKGDMFNLNDCHKLIDFFKDSISRYPKWSNAYDFNFSETEKYKDIAGFYREVEEQGYKVSFESASKKEVDKLVEEGKLYMFQIYNKDFSDKSHGTPNLHTMYFKLLFDENNHGQIRLSGGAELFMRRASLKKEELVVHPANSPIANKNPDNPKKTTTLSYDVYKDKRFSEDQYELHIPIAINKCPKNIFKINTEVRVLLKHDDNPYVIGIARGERNLLYIVVVDGKGNIVEQYSLNEIINNFNGIRIKTDYHSLLDKKEKERFEARQNWTSIENIKELKAGYISQVVHKICELVEKYDAVIALEDLNSGFKNSRVKVEKQVYQKFEKMLIDKLNYMVDKKSNPCATGGALKGYQITNKFESFKSMSTQNGFIFYIPAWLTSKIDPSTGFVNLLKTKYTSIADSKKFISSFDRIMYVPEEDLFEFALDYKNFSRTDADYIKKWKLYSYGNRIRIFRNPKKNNVFDWEEVCLTSAYKELFNKYGINYQQGDIRALLCEQSDKAFYSSFMALMSLMLQMRNSITGRTDVDFLISPVKNSDGIFYDSRNYEAQENAILPKNADANGAYNIARKVLWAIGQFKKAEDEKLDKVKIAISNKEWLEYAQTSVKHGSPKKKRKVSGGSTNLSDIIEKETGKQLVIQESILMLPEEVEEVIGNKPESDILVHTAYDESTDENVMLLTSDAPEYKPWALVIQDSNGENKIKMLTKYDSGGSKRTADGSEFEPKKKRKVGSG

SEQ ID NO: 183 - protein, 228 aa, Rattus norvegicus
SSETGPVAVDPTLRRRIEPHEFEVFFDPRELRKETCLLYEINWGGRHSIWRHTSQNTNKHVEVNFIEKFTTERYFCPNTRCSITWFLSWSPCGECSRAITEFLSRYPHVTLFIYIARLYHHADPRNRQGLRDLISSGVTIQIMTEQESGYCWRNFVNYSPSNEAHWPRYPHLWVRLYVLELYCIILGLPPCLNILRRKQPQLTFFTIALQSCHYQRLPPHILWATGLK

SEQ ID NO: 184 - protein, 199 aa, Homo sapiens
MEASPASGPRHLMDPHIFTSNFNNGIGRHKTYLCYEVERLDNGTSVKMDQHRGFLHNQAKNLLCGFYGRHAELRFLDLVPSLQLDPAQIYRVTWFISWSPCFSWGCAGEVRAFLQENTHVRLRIFAARIYDYDPLYKEALQMLRDAGAQVSIMTYDEFKHCWDTFVDHQGCPFQPWDGLDEHSQALSGRLRAILQNQGN

SEQ ID NO: 185 - DNA, 621 bp, Petromyzon marinus
  source 1..621: mol_type = other DNA
acagatgcagagtatgtgagaattcacgaaaagctggacatctataccttcaagaagcagttctttaacaataagaagtctgtgagccataggtgctacgtgctgttcgagctgaagagaaggggtgaaagaagggcatgtttttgggggtatgctgtgaacaagccccagtctggaactgagagaggcattcacgccgaaattttcagcatcagaaaggtggaggaatacctgagggataaccctggacagtttacaattaattggtattctagctggtctccatgcgctgactgtgccgagaagatcctggaatggtacaaccaggagctgagaggaaatggccataccctgaagatttgggcctgcaagctgtactatgaaaagaacgcaagaaatcagatcggactgtggaacctgagggataatggtgtggggctgaacgtgatggtgtccgagcactatcagtgctgtagaaagattttcattcagtcctcacataatcagctgaacgagaatagatggctggaaaagactctgaagagggctgagaagagaaggtccgaactgtcaattatgatccaggtgaagatcctgcacaccactaagtcacctgccgtg

SEQ ID NO: 186 - protein, 229 aa, Rattus norvegicus [sequence omitted]

SEQ ID NO: 187 - protein, 198 aa, Homo sapiens [sequence omitted]

SEQ ID NO: 188 - protein, 166 aa, Escherichia coli
SEVEFSHEYWMRHALTLAKRAWDEREVPVGAVLVHNNRVIGEGWNRPIGRHDPTAHAEIMALRQGGLVMQNYRLIDATLYVTLEPCVMCAGAMIHSRIGRVVFGARDAKTGAAGSLMDVLHHPGMNHRVEITEGILADECAALLSDFFRMRRQEIKAQKKAQSSTD

SEQ ID NO: 189 - protein, 197 aa, synthetic construct
  REGION 1..197: note = Synthetic polypeptide
MDSLLMNRREFLYQFKNVRWAKGRRETYLCYVVKRRDSATSFSLDFGYLRNKNGCHVELLFLRYISDWDLDPGRCYRVTWFISWSPCYDCARHVADFLRGNPNLSLRIFTARLYFCEDRKAEPEGLRRLHRAGVQIAIMTFKDYFYCWNTFVENHGRTFKAWEGLHENSVRLSRQLRRILLPLYEVDDLRDAFRTCT

SEQ ID NO: 190 - protein, 160 aa, synthetic construct
  REGION 1..160: note = Synthetic polypeptide
FERNYDPRELRKETYLLYEIKWGKSGKLWRHWCQNNRTQHAEVYFLENIFNARRFNPSTHCSITWYLSWSPCAECSQKIVDFLKEHPNVLEIYVARLYYHEDERNRQGLRDLVNSGVTIRIMDLPDYNYCWKTFVSDQGGDEDYWPGHFAPWIKQYSLKL

SEQ ID NO: 191 - protein, 207 aa, synthetic construct
  REGION 1..207: note = Synthetic polypeptide
TDAEYVRIHEKLDIYTFKKQFSNNKKSVSHRCYVLFELKRRGERRACFWGYAVNKPQSGTERGIHAEIFSIRKVEEYLRDNPGQFTINWYSSWSPCADCAEKILEWYNQELRGNGHTLKIWVCKLYYEKNARNQIGLWNLRDNGVGLNVMVSEHYQCCRKIFIQSSHNQLNENRWLEKTLKRAEKRRSELSIMFQVKILHTTKSPAV

SEQ ID NO: 192 - protein, 228 aa, synthetic construct
  REGION 1..228: note = Synthetic polypeptide
SSKTGPVAVDPTLRRRIEPHEFEVFFDPRELRKETCLLYEINWGGRHSIWRHTSQNTNKHVEVNFIEKFTTERYFCPNTRCSITWFLSWSPCGECSRAITEFLSRYPNVTLFIYIARLYHLANPRNRQGLRDLISSGVTIQIMTEQESGYCWHNFVNYSPSNESHWPRYPHLWVRLYVLELYCIILGLPPCLNILRRKQSQLTSFTIALQSCHYQRLPPHILWATGLK

SEQ ID NO: 193 - protein, 162 aa, synthetic construct
  REGION 1..162: note = Synthetic polypeptide
SFERNYDPRELRKETYLLYEIKWGKSGKLWRHWCQNNRTQHAEVYFLENIFNARRFNPSTHCSITWYLSWSPCAECSQKIVDFLKEHPNVNLEIYVARLYYPENERNRQGLRDLVNSGVTIRIMDLPDYNYCWKTFVSDQGGDEDYWPGHFAPWIKQYSLKL

SEQ ID NO: 194 - protein, 166 aa, synthetic construct
  REGION 1..166: note = Synthetic polypeptide
SEVEFSHEYWMRHALTLAKRARDEREVPVGAVLVLNNRVIGEGWNRAIGLHDPTAHAEIMALRQGGLVMQNYRLIDATLYVTFEPCVMCAGAMIHSRIGRVVFGVRNAKTGAAGSLMDVLHYPGMNHRVEITEGILADECAALLCYFFRMPRQVFNAQKKAQSSTD

SEQ ID NO: 195 - protein, 166 aa, synthetic construct
  REGION 1..166: note = Synthetic polypeptide
SEVEFSHEYWMRHALTLAKRAWDEREVPVGAVLVLNNRVIGEGWNRSIGLHDPTAHAEIMALRQGGLVMQNYRLIDATLYVTFEPCVMCAGAMIHSRIGRVVFGVRNAKTGAAGSLMDVLHYPGMNHRVEITEGILADECAALLCYFFRMRRQVFNAQKKAQSSTD

SEQ ID NO: 196 - protein, 166 aa, synthetic construct
  REGION 1..166: note = Synthetic polypeptide
SEVEFSHEYWMRHALTLAKRALDEREVPVGAVLVLNNRVIGEGWNRAIGLHDPTAHAEIMALRQGGLVMQNYRLIDATLYVTFEPCVMCAGAMIHSRIGRVVFGVRNAKTGAAGSLMDVLHYPGMNHRVEITEGILADECNALLCYFFRMRRQVFNAQKKAQSSTD

SEQ ID NO: 197 - protein, 166 aa, synthetic construct
  REGION 1..166: note = Synthetic polypeptide
SEVEFSHEYWMRHALTLAKRALDEREVPVGAVLVLNNRVIGEGWNRAIGLHDPTAHAEIMALRQGGLVMQNYRLIDATLYVTFEPCVMCAGAMIHSRIGRVVFGVRNAKTGAAGSLMDVLHYPGMNHRVEITEGILADECNALLCYFFRMPRQVFNAQKKAQSSTD

SEQ ID NO: 198 - protein, 1763 aa, synthetic construct
  REGION 1..1763: note = Synthetic polypeptide
SEVEFSHEYWMRHALTLAKRAWDEREVPVGAVLVHNNRVIGEGWNRPIGRHDPTAHAEIMALRQGGLVMQNYRLIDATLYVTLEPCVMCAGAMIHSRIGRVVFGARDAKTGAAGSLMDVLHHPGMNHRVEITEGILADECAALLSDFFRMRRQEIKAQKKAQSSTDSGGSSGGSSGSETPGTSESATPESSGGSSGGSSEVEFSHEYWMRHALTLAKRARDEREVPVGAVLVLNNRVIGEGWNRAIGLHDPTAHAEIMALRQGGLVMQNYRLIDATLYVTFEPCVMCAGAMIHSRIGRVVFGVRNAKTGAAGSLMDVLHYPGMNHRVEITEGILADECAALLCYFFRMPRQVFNAQKKAQSSTDSGGSSGGSSGSETPGTSESATPESSGGSSGGSDKKYSIGLAIGTNSVGWAVITDEYKVPSKKFKVLGNTDRHSIKKNLIGALLFDSGETAEATRLKRTARRRYTRRKNRICYLQEIFSNEMAKVDDSFFHRLEESFLVEEDKKHERHPIFGNIVDEVAYHEKYPTIYHLRKKLVDSTDKADLRLIYLALAHMIKFRGHFLIEGDLNPDNSDVDKLFIQLVQTYNQLFEENPINASGVDAKAILSARLSKSRRLENLIAQLPGEKKNGLFGNLIALSLGLTPNFKSNFDLAEDAKLQLSKDTYDDDLDNLLAQIGDQYADLFLAAKNLSDAILLSDILRVNTEITKAPLSASMIKRYDEHHQDLTLLKALVRQQLPEKYKEIFFDQSKNGYAGYIDGGASQEEFYKFIKPILEKMDGTEELLVKLNREDLLRKQRTFDNGSIPHQIHLGELHAILRRQEDFYPFLKDNREKIEKILTFRIPYYVGPLARGNSRFAWMTRKSEETITPWNFEEVVDKGASAQSFIERMTNFDKNLPNEKVLPKHSLLYEYFTVYNELTKVKYVTEGMRKPAFLSGEQKKAIVDLLFKTNRKVTVKQLKEDYFKKIECFDSVEISGVEDRFNASLGTYHDLLKIIKDKDFLDNEENEDILEDIVLTLTLFEDREMIEERLKTYAHLFDDKVMKQLKRRRYTGWGRLSRKLINGIRDKQSGKTILDFLKSDGFANRNFMQLIHDDSLTFKEDIQKAQVSGQGDSLHEHIANLAGSPAIKKGILQTVKVVDELVKVMGRHKPENIVIEMARENQTTQKGQKNSRERMKRIEEGIKELGSQILKEHPVENTQLQNEKLYLYYLQNGRDMYVDQELDINRLSDYDVDHIVPQSFLKDDSIDNKVLTRSDKNRGKSDNVPSEEVVKKMKNYWRQLLNAKLITQRKFDNLTKAERGGLSELDKAGFIKRQLVETRQITKHVAQILDSRMNTKYDENDKLIREVKVITLKSKLVSDFRKDFQFYKVREINNYHHAHDAYLNAVVGTALIKKYPKLESEFVYGDYKVYDVRKMIAKSEQEIGKATAKYFFYSNIMNFFKTEITLANGEIRKRPLIETNGETGEIVWDKGRDFATVRKVLSMPQVNIVKKTEVQTGGFSKESILPKRNSDKLIARKKDWDPKKYGGFDSPTVAYSVLVVAKVEKGKSKKLKSVKELLGITIMERSSFEKNPIDFLEAKGYKEVKKDLIIKLPKYSLFELENGRKRMLASAGELQKGNELALPSKYVNFLYLASHYEKLKGSPEDNEQKQLFVEQHKHYLDEIIEQISEFSKRVILADANLDKVLSAYNKHRDKPIREQAENIIHLFTLTNLGAPAAFKYFDTTIDRKRYTSTKEVLDATLIHQSITGLYETRIDLSQLGGD

SEQ ID NO: 199 - protein, 1565 aa, synthetic construct
  REGION 1..1565: note = Synthetic polypeptide
SEVEFSHEYWMRHALTLAKRARDEREVPVGAVLVLNNRVIGEGWNRAIGLHDPTAHAEIMALRQGGLVMQNYRLIDATLYVTFEPCVMCAGAMIHSRIGRVVFGVRNSKRGAAGSLMNVLNYPGMNHRVEITEGILADECAALLCDFYRMPRQVFNAQKKAQSSINSGGSSGGSSGSETPGTSESATPESSGGSSGGSDKKYSIGLAIGTNSVGWAVITDEYKVPSKKFKVLGNTDRHSIKKNLIGALLFDSGETAEATRLKRTARRRYTRRKNRICYLQEIFSNEMAKVDDSFFHRLEESFLVEEDKKHERHPIFGNIVDEVAYHEKYPTIYHLRKKLVDSTDKADLRLIYLALAHMIKFRGHFLIEGDLNPDNSDVDKLFIQLVQTYNQLFEENPINASGVDAKAILSARLSKSRRLENLIAQLPGEKKNGLFGNLIALSLGLTPNFKSNFDLAEDAKLQLSKDTYDDDLDNLLAQIGDQYADLFLAAKNLSDAILLSDILRVNTEITKAPLSASMIKRYDEHHQDLTLLKALVRQQLPEKYKEIFFDQSKNGYAGYIDGGASQEEFYKFIKPILEKMDGTEELLVKLNREDLLRKQRTFDNGSIPHQIHLGELHAILRRQEDFYPFLKDNREKIEKILTFRIPYYVGPLARGNSRFAWMTRKSEETITPWNFEEVVDKGASAQSFIERMTNFDKNLPNEKVLPKHSLLYEYFTVYNELTKVKYVTEGMRKPAFLSGEQKKAIVDLLFKTNRKVTVKQLKEDYFKKIECFDSVEISGVEDRFNASLGTYHDLLKIIKDKDFLDNEENEDILEDIVLTLTLFEDREMIEERLKTYAHLFDDKVMKQLKRRRYTGWGRLSRKLINGIRDKQSGKTILDFLKSDGFANRNFMQLIHDDSLTFKEDIQKAQVSGQGDSLHEHIANLAGSPAIKKGILQTVKVVDELVKVMGRHKPENIVIEMARENQTTQKGQKNSRERMKRIEEGIKELGSQILKEHPVENTQLQNEKLYLYYLQNGRDMYVDQELDINRLSDYDVDHIVPQSFLKDDSIDNKVLTRSDKNRGKSDNVPSEEVVKKMKNYWRQLLNAKLITQRKFDNLTKAERGGLSELDKAGFIKRQLVETRQITKHVAQILDSRMNTKYDENDKLIREVKVITLKSKLVSDFRKDFQFYKVREINNYHHAHDAYLNAVVGTALIKKYPKLESEFVYGDYKVYDVRKMIAKSEQEIGKATAKYFFYSNIMNFFKTEITLANGEIRKRPLIETNGETGEIVWDKGRDFATVRKVLSMPQVNIVKKTEVQTGGFSKESILPKRNSDKLIARKKDWDPKKYGGFDSPTVAYSVLVVAKVEKGKSKKLKSVKELLGITIMERSSFEKNPIDFLEAKGYKEVKKDLIIKLPKYSLFELENGRKRMLASAGELQKGNELALPSKYVNFLYLASHYEKLKGSPEDNEQKQLFVEQHKHYLDEIIEQISEFSKRVILADANLDKVLSAYNKHRDKPIREQAENIIHLFTLTNLGAPAAFKYFDTTIDRKRYTSTKEVLDATLIHQSITGLYETRIDLSQLGGD

SEQ ID NO: 200 - protein, 1565 aa, synthetic construct
  REGION 1..1565: note = Synthetic polypeptide
SEVEFSHEYWMRHALTLAKRARDEREVPVGAVLVLNNRVIGEGWNRAIGLHDPTAHAEIMALRQGGLVMQNYRLYDATLYSTFEPCVMCAGAMIHSRIGRVVFGVRNAKTGAAGSLMDVLHHPGMNHRVEITEGILADECAALLCRFFRMPRRVFNAQKKAQSSTDSGGSSGGSSGSETPGTSESATPESSGGSSGGSDKKYSIGLAIGTNSVGWAVITDEYKVPSKKFKVLGNTDRHSIKKNLIGALLFDSGETAEATRLKRTARRRYTRRKNRICYLQEIFSNEMAKVDDSFFHRLEESFLVEEDKKHERHPIFGNIVDEVAYHEKYPTIYHLRKKLVDSTDKADLRLIYLALAHMIKFRGHFLIEGDLNPDNSDVDKLFIQLVQTYNQLFEENPINASGVDAKAILSARLSKSRRLENLIAQLPGEKKNGLFGNLIALSLGLTPNFKSNFDLAEDAKLQLSKDTYDDDLDNLLAQIGDQYADLFLAAKNLSDAILLSDILRVNTEITKAPLSASMIKRYDEHHQDLTLLKALVRQQLPEKYKEIFFDQSKNGYAGYIDGGASQEEFYKFIKPILEKMDGTEELLVKLNREDLLRKQRTFDNGSIPHQIHLGELHAILRRQEDFYPFLKDNREKIEKILTFRIPYYVGPLARGNSRFAWMTRKSEETITPWNFEEVVDKGASAQSFIERMTNFDKNLPNEKVLPKHSLLYEYFTVYNELTKVKYVTEGMRKPAFLSGEQKKAIVDLLFKTNRKVTVKQLKEDYFKKIECFDSVEISGVEDRFNASLGTYHDLLKIIKDKDFLDNEENEDILEDIVLTLTLFEDREMIEERLKTYAHLFDDKVMKQLKRRRYTGWGRLSRKLINGIRDKQSGKTILDFLKSDGFANRNFMQLIHDDSLTFKEDIQKAQVSGQGDSLHEHIANLAGSPAIKKGILQTVKVVDELVKVMGRHKPENIVIEMARENQTTQKGQKNSRERMKRIEEGIKELGSQILKEHPVENTQLQNEKLYLYYLQNGRDMYVDQELDINRLSDYDVDHIVPQSFLKDDSIDNKVLTRSDKNRGKSDNVPSEEVVKKMKNYWRQLLNAKLITQRKFDNLTKAERGGLSELDKAGFIKRQLVETRQITKHVAQILDSRMNTKYDENDKLIREVKVITLKSKLVSDFRKDFQFYKVREINNYHHAHDAYLNAVVGTALIKKYPKLESEFVYGDYKVYDVRKMIAKSEQEIGKATAKYFFYSNIMNFFKTEITLANGEIRKRPLIETNGETGEIVWDKGRDFATVRKVLSMPQVNIVKKTEVQTGGFSKESILPKRNSDKLIARKKDWDPKKYGGFDSPTVAYSVLVVAKVEKGKSKKLKSVKELLGITIMERSSFEKNPIDFLEAKGYKEVKKDLIIKLPKYSLFELENGRKRMLASAGELQKGNELALPSKYVNFLYLASHYEKLKGSPEDNEQKQLFVEQHKHYLDEIIEQISEFSKRVILADANLDKVLSAYNKHRDKPIREQAENIIHLFTLTNLGAPAAFKYFDTTIDRKRYTSTKEVLDATLIHQSITGLYETRIDLSQLGGD

SEQ ID NO: 201 - protein, 364 aa, synthetic construct
  REGION 1..364: note = Synthetic polypeptide
SEVEFSHEYWMRHALTLAKRAWDEREVPVGAVLVHNNRVIGEGWNRPIGRHDPTAHAEIMALRQGGLVMQNYRLIDATLYVTLEPCVMCAGAMIHSRIGRVVFGARDAKTGAAGSLMDVLHHPGMNHRVEITEGILADECAALLSDFFRMRRQEIKAQKKAQSSTDSGGSSGGSSGSETPGTSESATPESSGGSSGGSSEVEFSHEYWMRHALTLAKRARDEREVPVGAVLVLNNRVIGEGWNRAIGLHDPTAHAEIMALRQGGLVMQNYRLIDATLYVTFEPCVMCAGAMIHSRIGRVVFGVRNAKTGAAGSLMDVLHYPGMNHRVEITEGILADECAALLCYFFRMPRQVFNAQKKAQSSTD

SEQ ID NO: 202 - protein, 167 aa, synthetic construct
  REGION 1..167: note = Synthetic polypeptide
MSEVEFSHEYWMRHALTLAKRARDEREVPVGAVLVLNNRVIGEGWNRAIGLHDPTAHAEIMALRQGGLVMQNYRLYDATLYSTFEPCVMCAGAMIHSRIGRVVFGVRNAKTGAAGSLMDVLHHPGMNHRVEITEGILADECAALLCRFFRMPRRVFNAQKKAQSSTD

SEQ ID NO: 203 - protein, 167 aa, synthetic construct
  REGION 1..167: note = Synthetic polypeptide
MSEVEFSHEYWMRHALTLAKRARDEREVPVGAVLVLNNRVIGEGWNRAIGLHDPTAHAEIMALRQGGLVMQNYRLIDATLYVTFEPCVMCAGAMIHSRIGRVVFGVRNSKRGAAGSLMNVLNYPGMNHRVEITEGILADECAALLCDFYRMPRQVFNAQKKAQSSIN

SEQ ID NO: 204 - protein, 83 aa, unidentified
  source 1..83: note = Bacillus phage AR9
TNLSDIIEKETGKQLVIQESILMLPEEVEEVIGNKPESDILVHTAYDESTDENVMLLTSDAPEYKPWALVIQDSNGENKIKML

SEQ ID NO: 205 - DNA, 2073 bp, Soybean chlorotic mottle virus
  source 1..2073: mol_type = other DNA
aatactgaaattgtccaaaaacaccgagttttaaccaaaggtaaccctaatgttactttcataaaagttagtataggcaaaagaaatttcttggcttatattgatactggagcaactctgtgctttggaaaaagaaaaatttcaaataattgggaaattttaaaacaaccaaaagaaattatcattgcagataaatcaaaacactatattagagaagctatttctaatgtgtttttaaaaatcgaaaataaagaattcttaatccctatcatatatttacatgattcaggattagatttaattataggaaacaatttcctaaaattataccaaccttttattcagagattggaaacaattgaattaagatggaaaaatcttaataacccaaaagaatctcaaatgatttcaaccaagattcttacaaaaaatgaagtattaaaactttcatttgaaaaaattcatatttgtttagaaaaatatttatttttcaaaacaattgaagaacaactcgaagaagtatgttcagaacatccactggatgaaacaaaaaataaaaatggtcttttaatagaaataagacttaaagacccattacaagaaataaatgtcacaaatagaattccatatacaataagagatgtacaagaattcaaggaggaatgtgaagacctcttaaaaaagggcttaattcgagaatctcaaagtccacacagtgcaccggcattctatgtcgaaaatcacaatgaaatcaagcgtggaaaaagacgcatggtaattaattacaaaaaaatgaatgaagccacaattggcgattcatataagttaccaagaaaagattttattctggaaaaaataaaaggatctttatggttttcaagcttggatgctaaatctggatactaccagctaaggctccatgaaaatacaaagcctctaacagctttttcatgtccacctcagaaacattacgaatggaatgttttaagttttggacttaaacaagcaccatctatatatcaaagatttatggatcaatccctcaagggacttgaacatatatgtttggcatatattgatgacatcctgatctttacaaaaggatctaaagaacaacatgtaaatgatgttcggattgttttgcaaagaatcaaagaaaaaggaattattatttctaagaaaaaatcaaaactgattcaacaggaaatcgaatatctcggtttaaaaatacaagggaatggagaaattgatttatcacctcatacccaagaaaaaattcttcaatttcctgatgaattagaagatagaaaacaaatacagcgttttcttggctgtattaattacattgcaaatgaaggatttttcaaaaatcttgctctagaaagaaagcaccttcaaaagaaaatttctgttaaaaacccctggaaatgggatacaatagatacaaaaatggttcagtccataaaaggcaaaattcaaagcctaccaaaattatataatgcatcgattcaagactttttaatagtcgagacagatgcatcgcaacactcctggagtggatgtttgcgagctttacccaagggaaagcaaaaaatcggactcgatgaattcgggataccgacagctgacctctgcacaggtagcagttcagcttcaagcgataattcgccagctgagattgacaaatgtcattcagccagtaaacaggacactcatgtggccagtaaaataaagaaactcgaaaacgagcttctactttgcaaatatgtttcaggtaccttcacagatacggaaacaagataccctatagcagaactggaggttcttgctggagtaaaagtcctagaaaaatggagaatcgacctcctacaaacgaggttcctcctccgcactgacagcaagtactttgcaggtttttgtaggtacaacatcaagacagactaccggaacggacgtctaatcaggtggcaactacggttacaagcctatcaaccgtacgtggaattaatcaaatcagaaaataacccattcgcagatacgcttacgcgagaatggagcaagccatcaagcagt

SEQ ID NO: 206 - DNA, 2034 bp, Cauliflower mosaic virus
  source 1..2034: mol_type = other DNA
gatcatctacttctgaagactcagactcagactgagcaggtgatgaacgtcaccaatcccaattcgatctacatcaagggaagactctacttcaagggatacaagaagatagaacttcactgtttcgtagacacgggagcaagcctatgcatagcatccaagttcgtcataccagaagaacattgggtcaatgcagaaagaccaattatggtcaaaatagcagatggaagctcaatcaccatcagcaaagtctgcaaagacatagacttgatcatagccggcgagatattcagaattcccaccgtctatcagcaagaaagtggcatcgatttcattatcggcaacaacttctgtcagctgtatgaaccattcatacagtttacggatagagttatcttcacaaagaacaagtcttatcctgttcatattgcgaagctaaccagagcagtgcgagtaggcaccgaaggatttcttgaatcaatgaagaaacgttcaaaaactcaacaaccagagccagtgaacatttctacaaacaagatagaaaatccactagaagaaattgctattctttcagaggggaggaggttatcagaagaaaaactctttatcactcaacaaagaatgcaaaaaatcgaagaactacttgagaaagtatgttcagaaaatccattagatcctaacaagactaagcaatggatgaaagcttctatcaagctcagcgacccaagcaaagctatcaaggttaaacccatgaagtatagcccaatggatcgcgaagaatttgacaagcaaatcaaagaattactggacctaaaagtcatcaagcccagtaaaagccctcacatggcaccagccttcttggtcaacaatgaagccgagaagcgaagaggaaagaaacgtatggtagtcaactacaaagctatgaacaaagctactgtaggagatgcctacaatcttcccaacaaagacgagttacttacactcattcgaggaaagaagatcttctcttccttcgactgtaagtcaggattctggcaagttctgctagatcaagaatcaagacctctaacggcattcacatgtccacaaggtcactacgaatggaatgtggtccctttcggcttaaagcaagctccatccatattccaaagacacatggacgaagcatttcgtgtgttcagaaagttctgttgcgtttatgtcgacgacattctcgtattcagtaacaacgaagaagatcatctacttcacgtagcaatgatcttacaaaagtgtaatcaacatggaattatcctttccaagaagaaagcacaactcttcaagaagaagataaacttccttggtctagaaatagatgaaggaacacataagcctcaaggacatatcttggaacacatcaacaagttccccgatacccttgaagacaagaagcaacttcagagattcttaggcatactaacatatgcctcggattacatcccgaagctagctcaaatcagaaagcctctgcaagccaagcttaaagaaaacgttccatggagatggacaaaagaggataccctctacatgcaaaaggtgaagaaaaatctgcaaggatttcctccactacatcatcccttaccagaggagaagctgatcatcgagaccgatgcatcagacgactactggggaggtatgttaaaagctatcaaaattaacgaaggtactaatactgagttaatttgcagatacgcatctggaagctttaaagctgcagaaaagaattaccacagcaatgacaaagagacattggcggtaataaatactataaagaaatttagtatttatctaactcctgttcattttctgattaggacagataatactcatttcaagagtttcgttaatctcaattacaaaggagattcgaaacttggaagaaacatcagatggcaagcatggcttagccactattcatttgatgttgaacacattaaaggaaccgacaaccactttgcggacttcctttcaagagaattcaataaggttaattcc

SEQ ID NO: 207 - protein, 683 aa, Moloney Murine Leukemia Virus
TLNIEDEHRLHETSKEPDVSLGSTWLSDFPQAWAETGGMGLAVRQAPLIIPLKATSTPVSIKQYPMSQEARLGIKPHIQRLLDQGILVPCQSPWNTPLLPVKKPGTNDYRPVQDLREVNKRVEDIHPTVPNPYNLLSGLPPSHQWYTVLDLKDAFFCLRLHPTSQPLFAFEWRDPEMGISGQLTWTRLPQGFKNSPTLFDEALHRDLADFRIQHPDLILLQYVDDLLLAATSELDCQQGTRALLQTLGNLGYRASAKKAQICQKQVKYLGYLLKEGQRWLTEARKETVMGQPTPKTPRQLREFLGTAGFCRLWIPGFAEMAAPLYPLTKTGTLFNWGPDQQKAYQEIKQALLTAPALGLPDLTKPFELFVDEKQGYAKGVLTQKLGPWRRPVAYLSKKLDPVAAGWPPCLRMVAAIAVLTKDAGKLTMGQPLVILAPHAVEALVKQPPDRWLSNARMTHYQALLLDTDRVQFGPVVALNPATLLPLPEEGLQHNCLDILAEAHGTRPDLTDQPLPDADHTWYTDGSSLLQEGQRKAGAAVTTETEVIWAKALPAGTSAQRAELIALTQALKMAEGKKLNVYTDSRYAFATAHIHGEIYRRRGLLTSEGKEIKNKDEILALLKALFLPKRLSIIHCPGHQKGHSAEARGNRMADQAARKAAITETPDTSTLLIENSSPNSRLIN

SEQ ID NO: 208 - protein, 717 aa, Moloney Murine Leukemia Virus
MKRTADGSEFESPKKKRKVTLNIEDEHRLHETSKEPDVSLGSTWLSDFPQAWAETGGMGLAVRQAPLIIPLKATSTPVSIKQYPMSQEARLGIKPHIQRLLDQGILVPCQSPWNTPLLPVKKPGTNDYRPVQDLREVNKRVEDIHPTVPNPYNLLSGLPPSHQWYTVLDLKDAFFCLRLHPTSQPLFAFEWRDPEMGISGQLTWTRLPQGFKNSPTLFNEALHRDLADFRIQHPDLILLQYVDDLLLAATSELDCQQGTRALLQTLGNLGYRASAKKAQICQKQVKYLGYLLKEGQRWLTEARKETVMGQPTPKTPRQLREFLGKAGFCRLFIPGFAEMAAPLYPLTKPGTLFNWGPDQQKAYQEIKQALLTAPALGLPDLTKPFELFVDEKQGYAKGVLTQKLGPWRRPVAYLSKKLDPVAAGWPPCLRMVAAIAVLTKDAGKLTMGQPLVILAPHAVEALVKQPPDRWLSNARMTHYQALLLDTDRVQFGPVVALNPATLLPLPEEGLQHNCLDILAEAHGTRPDLTDQPLPDADHTWYTDGSSLLQEGQRKAGAAVTTETEVIWAKALPAGTSAQRAELIALTQALKMAEGKKLNVYTDSRYAFATAHIHGEIYRRRGWLTSEGKEIKNKDEILALLKALFLPKRLSIIHCPGHQKGHSAEARGNRMADQAARKAAITETPDTSTLLIENSSPSGGSKRTADGSEFEPKKKRKV

SEQ ID NO: 209 - protein, 683 aa, synthetic construct
TLNIEDEHRLHETSKEPDVSLGSTWLSDFPQAWAETGGMGLAVRQAPLIIPLKATSTPVSIKQYPMSQEARLGIKPHIQRLLDQGILVPCQSPWNTPLLPVKKPGTNDYRPVQDLREVNKRVEDIHPTVPNPYNLLSGLPPSHQWYTVLDLKDAFFCLRLHPTSQPLFAFEWRDPEMGISGQLTWTRLPQGFKNSPTLFNEALHRDLADFRIQHPDLILLQYVDDLLLAATSELDCQQGTRALLQTLGNLGYRASAKKAQICQKQVKYLGYLLKEGQRWLTEARKETVMGQPTPKTPRQLREFLGKAGFCRLFIPGFAEMAAPLYPLTKPGTLFNWGPDQQKAYQEIKQALLTAPALGLPDLTKPFELFVDEKQGYAKGVLTQKLGPWRRPVAYLSKKLDPVAAGWPPCLRMVAAIAVLTKDAGKLTMGQPLVILAPHAVEALVKQPPDRWLSNARMTHYQALLLDTDRVQFGPVVALNPATLLPLPEEGLQHNCLDILAEAHGTRPDLTDQPLPDADHTWYTDGSSLLQEGQRKAGAAVTTETEVIWAKALPAGTSAQRAELIALTQALKMAEGKKLNVYTDSRYAFATAHIHGEIYRRRGWLTSEGKEIKNKDEILALLKALFLPKRLSIIHCPGHQKGHSAEARGNRMADQAARKAAITETPDTSTLLIENSSPNSRLIN

SEQ ID NO: 210 - DNA, 2031 bp, synthetic construct
  misc_feature 1..2031: note = MMLV_MO1
  source 1..2031: mol_type = other DNA
accctgaacatcgaggacgagtatcggcttcatgagaccagcaaagagccggacgtctccctgggaagcacctggctgagcgacttcccgcaagcctgggcggagaccggtggtatggggctcgcagtgcggcaagcgccgttgataatcccgctaaaggccacgagcacgcccgtgtctatcaagcagtacccgatgagtcaagaggcacgcctcggtatcaagccgcatatccagcgcctcctggaccagggcatcctcgtgccctgccagtctccctggaatacgcctctgctacccgtcaagaagcctggcaccaacgattacaggccggtgcaagacctgcgtgaggtcaacaagcgcgtggaggacatccacccaacggtgcccaacccgtacaatctcctatctggccttccgccctcgcaccagtggtacacggtcttggacctaaaggacgcattcttctgtctgaggctgcaccctacgtcccagccgctgttcgccttcgagtggcgcgacccggagatgggcatctctggccagctaacttggacgcgattgccccaggggtttaagaactcgcccacactcttcaacgaggcactccaccgtgacctggccgactttcgcatacagcaccccgaccttatcctgttgcagtacgtcgatgacctgctcctggcggccacgtccgagctggactgccagcaaggcacccgcgccctacttcaaaccctgggcaacctgggttaccgtgcgtccgccaagaaggcccaaatctgccaaaagcaagtcaagtacctcggctacctcttgaaggagggacagcgctggctgacggaggcgaggaaggagacggtgatgggtcagcccacacccaagaccccgaggcagctaagggagttcctggggaaggcgggcttctgccgtctattcatccctggcttcgcggagatggcggccccgctgtacccgctaacgaagccgggcacgctgttcaactggggccctgaccagcagaaggcgtaccaggagatcaagcaagcgttgcttactgccccagcactcggcctccccgacctcacaaagccgttcgagctattcgttgacgagaaacagggctacgcgaagggtgtgctgactcaaaagctagggccgtggcgacgcccagtagcctacctgagcaagaagctcgaccccgtggcggcgggctggccaccatgcctccggatggtcgcggctatcgcggtgctcacaaaggatgcggggaagctcacgatggggcagcccctggtgatcctggccccacacgcggtggaggcgttagtgaagcaacctcccgaccgatggctgagcaacgcccgcatgacccactaccaggcgctcctcctcgacaccgaccgcgtgcaattcggccctgtcgtggcactgaacccggccacgctgctcccactgcccgaggaggggctacagcacaactgcctcgatatactggcggaagcccacggcacccgccccgacttgacggaccagccgcttcccgacgcggaccatacgtggtacaccgacgggagttccttactccaagagggccagcgaaaggcgggcgctgcggtgaccactgagacggaagtaatctgggcaaaggcgctgcctgcgggcacgtctgcccagcgggcggagctgatcgccctgacccaggccctcaagatggccgagggcaagaagctgaacgtttacaccgacagtcggtatgccttcgcaactgcccacatccacggcgaaatctaccgtcggcgcggctggctgacgagcgagggcaaggagatcaagaacaaggacgagatcctcgccctgctaaaggcactcttcctgcccaagcgactgtccatcattcactgtccggggcaccagaagggccattccgccgaggcgcggggcaaccgcatggcggatcaggccgctcggaaggcggcgatcaccgagacgcccgatacgagcacgctcctgattgaaaactcgtcgccg

SEQ ID NO: 211 - DNA, 2031 bp, synthetic construct
  misc_feature 1..2031: note = MMLV_MO2
  source 1..2031: mol_type = other DNA
accctgaacattgaggacgagtatcgcctgcacgagaccagcaaggagcccgacgtgagcctcggctcaacgtggctcagtgacttcccacaagcctgggccgagactggtggaatggggctggccgtgcgccaagctcccctcatcattcctctcaaggccacttcgacgcctgtctccatcaagcagtaccccatgtcccaggaggctaggctgggcatcaagccgcacatccaacgcctgttagatcaaggaatactggtcccctgccagtcgccgtggaatactccgctactgcctgtcaagaagccgggcacgaacgactaccggcctgtccaagacctgcgcgaggtgaacaagcgggtcgaggacattcaccccaccgttcccaacccttacaacctattgtctggcctcccaccgagccatcagtggtacaccgtcctggacctcaaggatgcgttcttctgtctgcggctacaccctacgtcgcaaccactcttcgccttcgagtggcgggatccggagatggggatctcggggcagctcacgtggactcggctgcctcaggggttcaagaactccccaacactctttaacgaggcactgcatcgggatctggccgacttccgtatccagcacccagacctcatcctcctacagtacgtggacgacttgctgctggccgcgaccagcgagctggactgccagcaagggacacgcgcgctgctccagacgctcgggaacctgggataccgcgccagcgctaagaaggctcaaatctgtcagaaacaagtgaagtacctgggttacctgctcaaggagggtcagcgttggcttaccgaggcccgcaaggagaccgtgatggggcaacccacgccaaagacgccccgacagctacgcgagttcctgggcaaggctgggttctgtcggttgttcatccccggtttcgctgagatggccgcccctctctacccgctgacgaaacctgggactctgttcaactggggccctgaccagcagaaggcgtaccaggagatcaagcaagcgctgcttaccgccccggcgctcggattgccggaccttaccaagcccttcgagctgttcgtggacgagaagcaaggttacgcgaagggcgtcctgacacaaaagttggggccctggcgtaggccggtcgcctacctcagcaagaagttggaccccgtggcggcgggctggccgccgtgcctccgtatggtggcagccatcgccgttctcaccaaagacgctggcaagctcacgatggggcagcctctggtgatcctggcaccccatgccgtcgaggcgctcgtgaagcagccgcctgaccgctggctgagtaacgcacggatgacccattaccaagccctattgctagacacggatcgcgtccaatttgggcccgtggtggctctgaaccctgccactctccttcccctccctgaggagggcttgcagcataactgcctggacatactggctgaggcccacgggacaaggccggacctaacggaccagcctctaccggacgcggatcacacatggtacaccgacggctcctctctcctacaagaggggcagcggaaggcgggtgccgccgtcaccacggagacggaggtgatctgggctaaggcactgcccgccgggacttcggcacagcgagccgagctaatagccctcacacaagcgctgaaaatggccgagggcaagaagctaaacgtctatacggactcccgatacgctttcgccaccgcccacattcatggcgaaatctaccgccgccgtggctggctgacgtccgagggcaaggagatcaagaacaaggacgagatcctcgccctcctgaaagccctgttcctgccgaaaaggctttcgataatccactgccccggccaccagaaggggcactccgccgaggcacgcggcaaccgtatggccgaccaggccgcccggaaggcggcgatcacggaaaccccggacacatccacgctcctcatcgagaacagcagcccc

SEQ ID NO: 212 - DNA, 2031 bp, synthetic construct
  misc_feature 1..2031: note = MMLV_MO3
  source 1..2031: mol_type = other DNA
accctcaacatcgaggacgagtaccgtctgcacgagacgtcgaaggagccggatgtctcactcggctccacgtggctcagcgacttcccacaggcgtgggcggagaccggtggcatgggactggcggtgcgacaagcgccccttatcattcccctaaaggcgacgtcaactcctgtttccattaagcagtaccctatgtcccaggaggcccggctcggcatcaagccacacatccaacggctattggaccagggtatcttggtgccgtgccaatccccgtggaacactccccttctacccgtcaagaagccaggcaccaacgactaccgccccgtgcaagacctgcgcgaggtcaacaagcgagtggaggacatccatcctaccgtcccgaacccgtacaacctgctttccggcctcccgccctcgcaccagtggtacaccgttctcgacttgaaggacgcattcttctgtctgcgcctccacccaacgagccagcccctcttcgctttcgagtggcgcgacccggagatgggaatttcgggccagcttacatggacccgcctcccacaggggttcaagaacagcccgacgctgttcaacgaggccctgcaccgcgacttggcagacttccgaatccagcatcccgacctaatcctcctgcaatacgttgacgacttattgctggccgcgaccagcgagcttgactgccagcaagggactcgcgcgcttctacagacgctcgggaacctgggctaccgtgcctcagctaagaaggcccagatttgccagaagcaagttaagtatctcggctacctcctcaaggagggacagcggtggctgacggaggcccgcaaggagacggtcatgggccagccaacaccgaaaacgcccagacaactccgcgagttcctcggcaaagcgggcttctgtcggctgtttatccccggcttcgccgagatggccgcgcccctctacccactgacgaaacccggcaccctgttcaactggggcccggatcagcagaaggcgtatcaggagatcaagcaagcactcctgacagccccggccctgggattgcccgaccttacgaagcccttcgagttattcgtggacgagaagcaaggctatgcgaagggtgtcctcacgcagaagctggggccctggaggcggcccgtcgcgtacctaagcaagaagctcgacccagtggcggcgggttggccgccctgcctccgcatggtggccgcgattgcggttctcacaaaggacgccgggaagctcacgatggggcagccacttgtcatcctcgctccgcacgccgtggaggcactggtgaagcagccgccggatcgctggctgtctaatgctcgcatgacccactatcaggcgctgctcctagacactgacagggttcagttcggccccgttgtcgcgcttaaccccgctacactactcccgctgccggaggagggtttgcagcataactgcctcgacatcctcgccgaggcccacggcacgcgacccgacctaacggaccagccgctgccggacgctgaccacacttggtacaccgacggcagctccctcctgcaagagggacagcggaaggccggtgccgccgtgacgacggagacggaggtgatatgggctaaggccctgcccgctggtacgtccgcccagcgagccgagctgatcgccctgacgcaagccctcaagatggccgagggcaagaagctaaacgtctatacggacagccgctacgcattcgccacagcccacattcacggagagatataccggaggcgcggctggcttacgtccgaaggcaaggagattaagaacaaagatgagattctggcgctgttgaaggccctcttcctccccaagcggctttccatcatacactgtccaggccaccagaagggccactcggcggaggcgcggggcaaccggatggccgaccaggcggcgcgcaaagccgcgatcacggagaccccagacacttccacgctcctgatcgagaacagtagcccc

SEQ ID NO: 213 - DNA, 2031 bp, synthetic construct
  misc_feature 1..2031: note = MMLV_DO1
  source 1..2031: mol_type = other DNA
actttgaatatcgaagatgagtaccggctacatgagacgtctaaggagcctgatgtttcactcgggagcacttggctaagcgatttcccacaagcgtgggctgaaacgggcgggatgggcctcgctgtaagacaagcgccacttatcatcccgcttaaagctacttctactcccgtctctattaagcaatacccaatgtcccaggaagctcgtttgggcattaagcctcatatacaaaggctactcgatcagggcatacttgttccctgccaatcaccgtggaatacgcccctattaccagttaagaagcctgggactaacgactatcgccccgtacaggatctacgtgaggtgaacaagcgtgtagaggacatccatccgaccgttccgaatccatacaatttgctttctggattacctccaagtcatcaatggtacaccgtgctggatctcaaggacgcattcttctgtctaagattacatcctactagccagccacttttcgcattcgagtggcgagatcccgagatgggaatttcgggccagcttacatggacgaggcttcctcaaggcttcaagaactctcctaccttgttcaatgaggctctacaccgcgacctcgcagacttccggatacaacatccggacctcatactcctacaatatgtggacgatctattgctggccgcgacgagcgaattggattgtcagcaaggaacccgcgccttgttacaaacgttggggaacttggggtatcgagcatcagccaagaaggcacaaatctgccagaaacaagtgaagtatttggggtacttactgaaagaggggcaacgatggttgaccgaagctcgcaaggaaactgttatgggccagccgacacctaagactccaagacagctccgagagttcctcggcaaggctgggttctgtcgcctattcattcctgggtttgccgaaatggctgctcctctgtacccgttgaccaaaccgggaaccttgttcaattggggaccagatcaacagaaggcgtatcaggagatcaagcaagcgctgttgactgcgcctgcgttgggcttgccggatttgacaaaaccctttgaacttttcgttgacgagaaacaaggttacgcgaagggagttcttacacaaaagctgggcccctggagacgacctgttgcttatcttagcaagaagttagatcccgttgctgcggggtggccgccctgcttgaggatggttgccgccattgcggttctgactaaagatgcgggcaaattgacgatgggccagccgctcgtaattctcgccccgcacgcagtcgaagccctagtgaagcagcctcctgaccgttggctctccaacgctcggatgacccactatcaagcgctgctgttggataccgatagagttcaattcgggccggtcgtagcgctcaatcccgcaacgctattacccctgcctgaggagggactacaacataactgcttggatattctagcggaggctcatgggacaagacctgacttgacagatcagcccttgccagatgccgaccacacatggtacactgacggctcatcacttctacaagagggccaaaggaaggccggagctgcggtgacgactgaaaccgaggtgatctgggcaaaggctttacccgctggaacttctgctcagcgcgcagagcttatcgccctaactcaagccctgaaaatggctgagggcaagaagttgaatgtctataccgattcacggtatgctttcgctaccgcccacattcatggagaaatctatcggcgacgaggttggctcacgtctgaggggaaggagattaagaacaaggacgaaatcttagctctgctgaaagctctattcttacccaaacgcttgtcgattatccactgcccaggacaccaaaagggccattccgccgaagccaggggaaaccgtatggccgatcaagctgcccggaaggctgcaataaccgaaacccctgacacttccacgctactcatcgaaaactctagccca

SEQ ID NO: 214 - DNA, 2031 bp, synthetic construct
  misc_feature 1..2031: note = MMLV_DO2
  source 1..2031: mol_type = other DNA
accttgaatatcgaagatgagtacagactccatgagaccagcaaggagcctgatgtgagcctgggaagtacatggctatctgactttcctcaggcttgggcggagaccggtggcatgggcctggctgtccggcaagcacccctaatcatcccgttgaaagcaacgtccacacccgtatctatcaagcagtacccgatgagccaagaggcacggctagggattaagccgcacatccaaagattgttagaccaggggatactcgttccctgtcaatctccgtggaacacaccgttactgcctgttaagaagcccggcacaaatgattatcggcctgtacaagacctgcgcgaagtgaacaaacgagtggaagatattcaccccaccgtgccgaatccttacaacttgctaagcggtttaccacccagtcaccagtggtacaccgtcttggacctcaaagacgcattcttctgcttgcggttgcatcctacgagtcagccgctctttgcctttgaatggagagatcccgagatgggcataagtggtcagcttacatggacgaggctacctcagggattcaagaactcgcctaccttattcaatgaggctctacacagggatcttgctgactttcggatacaacaccctgacttaattctgctacaatatgttgacgatctgctgcttgcggcgaccagtgaactcgactgccaacaagggacaagagccttgttacagacacttggcaatctcggctaccgcgcgtctgctaagaaggcacagatttgccaaaagcaagtgaagtatctcggttacctgctgaaagagggacaaagatggttgaccgaagccaggaaggaaactgtcatggggcaacccacccctaaaaccccaagacagcttagagagttcctcgggaaagctgggttctgccgcctgttcattcccggtttcgctgaaatggctgcacctctatacccactgaccaaaccgggcacgctattcaattggggaccggatcaacaaaaggcttaccaggagatcaagcaagctctattgacagctccggctctgggtttacccgacttgactaaacccttcgagttgttcgttgacgagaaacagggctacgcgaaaggcgtactgacgcagaaactgggcccgtggcggcgacccgttgcttacctttccaagaagctggaccctgttgccgctggctggccgccctgccttcgcatggttgcggccattgctgtccttacgaaagatgctgggaaactaactatgggtcagccgctcgtaattctcgcgccacacgctgtcgaggctctagtcaaacaacctcctgaccgctggctgtcgaatgcacggatgacacattaccaggcgttgctattggacactgaccgagtacaatttggaccagtagtggctttaaatcccgcgacactccttccccttcctgaggagggtttgcaacacaactgtcttgatatacttgctgaggcccacggaacaagacccgatctcacagatcaacccctccccgacgcagatcacacctggtacaccgacggttcaagcctgttacaggaaggccagcgaaaggccggagcagccgtgacaaccgaaaccgaagttatctgggcaaaggccctaccagccgggacaagcgcgcagagggccgagctgatcgcgctcacacaagcactcaaaatggccgaaggcaagaagctcaatgtttacactgattcccgctacgcattcgctaccgctcatattcacggagaaatctacaggaggcgagggtggcttactagcgaaggaaaggagattaagaacaaagacgagatcctggcactattgaaagccttgttcctgccaaagcgcttatctatcattcactgtccgggccaccagaagggccacagtgctgaggctcggggcaatcggatggcagatcaggccgcacgaaaagccgcaattactgagacacctgacacatctaccttgctgattgagaactcgtctccg

SEQ ID NO: 215 - DNA, 2073 bp, synthetic construct
  misc_feature 1..2073: note = SbCMV_DO1
  source 1..2073: mol_type = other DNA
aacactgagattgttcaaaaacatagagtgcttaccaaaggaaatccaaatgttacatttataaaagtgtccatagggaagagaaattttttagcttatattgacactggagccacactctgttttggaaaaaggaaaatatcaaataactgggaaatccttaagcaacccaaagaaatcattatcgctgataagtcaaaacactacatcagagaagctataagtaacgtattcctgaaaattgaaaacaaggagttcttgatacccattatatatcttcatgattcagggttggatttgattattgggaataacttcctgaagctttatcaaccatttattcaaagacttgaaactatcgaactcaggtggaaaaacttgaacaatcccaaagagtctcaaatgattagcactaaaattcttacgaaaaatgaagttcttaagctgagttttgagaagattcatatttgtctcgaaaaataccttttctttaaaaccatcgaggaacaacttgaggaggtttgttctgaacatccacttgatgagacaaagaacaagaatggtcttttgattgagatacgtctgaaagatcctctgcaggagattaacgtcacaaataggattccatataccattagagatgtacaggaattcaaggaagaatgtgaagatttacttaagaagggtctcattcgtgaatcacaatctccccacagtgcacccgcattttacgttgaaaatcataatgaaattaagagaggcaagcgtagaatggttatcaactacaagaagatgaatgaagcaaccataggagatagctacaaactcccgcgaaaggattttatcttagagaagataaagggcagtttgtggttttcaagtttagatgcaaaatcaggttattatcagcttcgcttacatgagaacacaaagcctctcactgctttctcttgccctcctcaaaaacattatgaatggaatgtgttgagtttcggtctaaaacaggcaccttcgatttaccagcgcttcatggaccagtccttaaagggattagagcacatttgcttggcatatatagatgatatcttaatctttactaaaggctcaaaggaacagcatgtcaatgatgttcggattgtcctgcaaagaataaaagagaaaggaatcataatatctaaaaaaaaatcaaaattgattcagcaagagattgaatatctaggattgaaaattcaaggtaatggtgaaattgacctctcaccacatactcaagaaaagatcctacagttccctgatgaactggaggatagaaaacaaatacagaggtttctaggttgcattaattacattgcgaacgaaggatttttcaaaaatcttgccctagagagaaagcacttgcagaagaagatttccgtgaagaatccatggaagtgggatacaatagacacaaaaatggtgcaatcaatcaagggcaaaattcaatccctgccgaagctctacaatgcaagtattcaggatttcctaattgtagagactgacgcctcgcaacattcttggtctgggtgtttgcgggctcttccaaagggcaagcagaaaatcggtctggacgaatttgggattccaacggcagatttatgtactggtagctccagtgcttcctctgataattctcctgctgagatcgacaagtgccactcagcctcgaagcaggatacacacgtcgcctctaaaataaagaaacttgagaatgagttacttttgtgcaagtatgtttcagggactttcacggacaccgagactaggtatcctatagctgaactcgaggtgttggcgggtgttaaagttttggaaaaatggaggatagacttgttgcaaacacgatttctacttaggacagattccaaatattttgctggattttgtagatacaacattaagactgattatcggaacgggaggctcataagatggcaattgcgccttcaagcttaccagccttatgtggaactgatcaagagtgaaaataatccttttgcagacaccctaacacgagagtggagcaaaccatcttctagc

SEQ ID NO: 216 - DNA, 2034 bp, synthetic construct
  misc_feature 1..2034: note = CaMV_DO1
  source 1..2034: mol_type = other DNA
gatcaccttctgcttaagacacagacacaaactgaacaagttatgaatgtgaccaacccgaattccatttacattaagggacgactctactttaaggggtataagaaaatagaattacattgtttcgtcgacactggagcatctctctgcatagcgtccaagtttgttattcctgaggaacattgggtaaatgcagaaaggccgattatggttaaaattgcagatggtagcagcatcacaatctcaaaagtttgcaaggacattgacttgatcattgctggtgagattttcagaattcctacagtgtatcaacaagaatccggcattgattttataattggtaataacttttgtcaactttatgagcccttcatacaatttacagatcgagtcatttttactaaaaacaagagttaccctgttcacattgcaaaactcactcgtgccgtgagagttggaacggaaggatttctagaatctatgaagaagagatcgaaaactcagcaaccagaacccgttaatatttctacaaataagattgaaaatccattagaggaaatagccatcttgtccgaaggccggcggttgagtgaagaaaagttgtttatcacgcagcagagaatgcaaaaaatagaggagcttctcgaaaaggtttgttctgagaatcctttggatccaaataaaacaaaacaatggatgaaagctagtataaagctttcagacccatcaaaggcaattaaggtgaagccaatgaaatatagccccatggatagggaggagtttgacaagcaaattaaggagctactcgatctgaaagtaataaaaccttctaaatcgcctcacatggctccagcattcctggttaacaacgaggctgaaaagcgcagaggaaaaaaaagaatggtggtgaactacaaagcaatgaataaggctactgttggagatgcttataatcttcctaataaagatgagctcttgaccttaattagagggaagaaaattttctcctcatttgattgtaaatcaggattttggcaagtgttgctggatcaagagtctcgtccactgaccgcctttacgtgccctcaaggacattatgaatggaatgtcgtaccatttggtctcaagcaagcaccttctattttccagaggcatatggatgaagcatttagagtgtttaggaaattctgctgtgtttatgtggatgatatattggtattctcaaataatgaggaagaccatttgctgcatgttgccatgattcttcagaagtgcaatcaacatggaatcatcttatccaagaagaaggctcagttgttcaagaagaagataaattttttgggtctcgagattgatgaggggacacataagcctcagggtcatatactagaacatatcaacaagtttccagacactttggaagacaaaaagcagttgcaaaggttccttgggattctgacttatgcttcagattatataccaaagcttgctcaaataagaaaaccccttcaggcgaagctcaaagaaaacgttccttggaggtggactaaggaggataccttatacatgcagaaagtcaagaaaaacctccagggtttcccaccgctccaccatcctttacctgaagaaaaactaattatcgagacagatgcttctgatgactactggggcggcatgttgaaggccatcaaaatcaatgaagggaccaatactgagctcatttgtcgatatgcaagcggaagttttaaagcagctgagaaaaattatcatagtaatgataaagagactctagccgttattaacaccataaagaaattctctatatatcttacccccgtccactttttaatcaggacagacaacactcacttcaaatcatttgtgaacctgaattacaagggtgatagtaaacttggccgtaacatacgctggcaggcttggttgagccactactcttttgatgtagaacacattaaaggaacagataatcattttgctgatttcctttctcgcgagttcaacaaagtaaattca

SEQ ID NO: 217 - protein, 19 aa, synthetic construct
MKRTADGSEFESPKKKRKV

SEQ ID NO: 218 - protein, 21 aa, synthetic construct
SGGSKRTADGSEFEPKKKRKV

SEQ ID NO: 219 - protein, 7 aa, synthetic construct
PKKKRKV

SEQ ID NO: 220 - DNA, 66 bp, Saccharomyces bayanus
  source 1..66: mol_type = other DNA
ttcttgtcgtacttatagatcgctacgttatttcaattttgaaaatctgagtcctgggagtgcgga

SEQ ID NO: 221 - protein, 605 aa, Homo sapiens
MSGWESYYKTEGDEEAEEEQEENLEASGDYKYSGRDSLIFLVDASKAMFESQSEDELTPFDMSIQCIQSVYISKIISSDRDLLAWFYGTEKDKNSVNFKIYVLQELDNPGAKRILELDQFKGQQGQKRFQDMMGHGSDYSLSEVLWVCANLFSDVQFKMSHKRIMLFTNEDNPHGNDSAKASRARTKAGDLRDTGIFLDLHLKKPGGFDISLFYRDIISIAEDEDLRVHFEESSKLEDLLRKVRAKETRKRALSRLKLKLNKDIVISVGIYNLVQKALKPPPIKLYRETNEPVKTKTRTFNTSTGGLLLPSDTKRSQIYGSRQIILEKEETEELKRFDDPGLMLMGFKPLVLLKKHHYLRPSLFVYPEESLVIGSSTLFSALLIKCLEKEVAALCRYTPRRNIPPYFVALVPQEEELDDQKIQVTPPGFQLVFLPFADDKRKMPFTEKIMATPEQVGKMKAIVEKLRFTYRSDSFENPVLQQHFRNLEALALDLMEPEQAVDLTLPKVEAMNKRLGSLVDEFKELVYPPDYNPEGKVTKRKHDNEGSGSKRPKVEYSEEELKTHISKGTLGKFTVPLKEACRAYGLKSGLKKQELLEALTKHFQD

SEQ ID NO: 222 - protein, 482 aa, synthetic construct
  REGION 1..482: note = Synthetic polypeptide
MVRSGNKAAWLCMDVGFTMSNSIPGIESPFEQAKKVITMFVQRQVFAENKDEIALVLFGTDGTDNPLSGGDQYQNITVHRHLMLPDFDLLEDIESKIQPGSQQADFLDALIVSMDVIQHETIGKKFEKRHIEIFTDLSSRFSKSQLDIIIHSLKKCDISERHSIHWPCRLTIGSNLSIRIAAYKSILQERVKKTTWDAKTLKKEDIQKETVYCLNDDDETEVLKEDIIQGFRYGSDIVPFSKVDEEQMKYKSEGKCFSVLGFCKSSQVQRRFFMGNQVLKVFAARDDEAAAVALSSLIHALDDLDIWAIVRYAYDKRANPQVGVAFPHIKHNYECLVYVQLPFMEDLRQYMFSSLKNSKKYAPTEAQLNAVDALIDSMSLAKKDEKTDTLEDLFPTTKIPNPRFQRLFQCLLHRALHPREPLPPIQQHIWNMLNPPAEVTTKSQIPLSKIKTLFPLIEAKKKDQVTAQEIFQDNHEDGPTAK

SEQ ID NO: 223 - DNA, 10 bp, Methanobacterium thermoautotrophicum
  source 1..10: mol_type = other DNA
aatttttgga

SEQ ID NO: 224 - protein, 83 aa, Methanobacterium thermoautotrophicum
GSVIDVSSQRVNVQRPLDALGNSLNSPVIIKLKGDREFRGVLKSFDLHMNLVLNDAEELEDGEVTRRLGTVLIRGDNIVYISP

SEQ ID NO: 225 - DNA, 25 bp, Emesvirus zinderi
  source 1..25: mol_type = other DNA
gcgcacatgaggatcacccatgtgc

SEQ ID NO: 226 - protein, 116 aa, Emesvirus zinderi
MASNFTQFVLVDNGGTGDVTVAPSNFANGIAEISSNSRSQAYKVTCSVRQSSAQNRKYTIKVEVPKGAWRSYLNMELTIPIFATNSDCELIVKAMQGLLKDGNPIPSAIAANSGIY

SEQ ID NO: 227 - DNA, 26 bp, Pepevirus rubrum
  source 1..26: mol_type = other DNA
ataaggagtttatatggaaaccctta

SEQ ID NO: 228 - protein, 127 aa, Pepevirus rubrum
MSKTIVLSVGEATRTLTEIQSTADRQIFEEKVGPLVGRLRLTASLRQNGAKTAYRVNLKLDQADWDCSTSVCGELPKVRYTQVWSHDVTIVANSTEASRKSLYDLTKSLVATSQVEDLVVNLVPLGR

SEQ ID NO: 229 - DNA, 19 bp, Shigella flexneri
  source 1..19: mol_type = other DNA
ctgaatgcctgcgagcatc

SEQ ID NO: 230 - protein, 62 aa, Shigella flexneri
MKSIRCKNCNKLLFKADSFDHIEIRCPRCKRHIIMLNACEHPTEKHCGKREKITHSDETVRY

SEQ ID NO: 231 - protein, 24 aa, synthetic construct
EELLSKNYHLENEVARLKKGSGSG

SEQ ID NO: 232 - protein, 241 aa, synthetic construct
EEELLSKNYHLENEVARLKKGSGSGEELLSKNYHLENEVARLKKGSGSGEELLSKNYHLENEVARLKKGSGSGEELLSKNYHLENEVARLKKGSGSGEELLSKNYHLENEVARLKKGSGSGEELLSKNYHLENEVARLKKGSGSGEELLSKNYHLENEVARLKKGSGSGEELLSKNYHLENEVARLKKGSGSGEELLSKNYHLENEVARLKKGSGSGEELLSKNYHLENEVARLKKGSGSG

SEQ ID NO: 233 - protein, 277 aa, synthetic construct
MGPDIVMTQSPSSLSASVGDRVTITCRSSTGAVTTSNYASWVQEKPGKLFKGLIGGTNNRAPGVPSRFSGSLIGDKATLTISSLQPEDFATYFCALWYSNHWVFGQGTKVELKRGGGGSGGGGSGGGGSSGGGSEVKLLESGGGLVQPGGSLKLSCAVSGFSLTDYGVNWVRQAPGRGLEWIGVIWGDGITDYNSALKDRFIISKDNGKNTVYLQMSKVRSDDTALYYCVTGLFDYWGQGTLVTVSSYPYDVPDYAGGGGGSGGGGSGGGGSGGGGS

SEQ ID NO: 234 - protein, 1237 aa, synthetic construct
RTEKENKELENLEINLRKEIAKAFKGNEGYKSLFKKDIIETILPEFLDDKDEIALVNSFNGFTTAFTGFFDNRENMFSEEAKSTSIAFRCINENLTRYISNMDIFEKVDAIFDKHEVQEIKEKILNSDYDVEDFFEGEFFNFVLTQEGIDVYNAIIGGFVTESGEKIKGLNEYINLYNQKTKQKLPKFKPLYKQVLSDRESLSFYGEGYTSDEEVLEVFRNTLNKNSEIFSSIKKLEKLFKNFDEYSSAGIFVKNGPAISTISKDIFGEWNVIRDKWNAEYDDIHLKKKAVVTEKYEDDRRKSFKKIGSFSLEQLQEYADADLSVVEKLKEIIIQKVDEIYKVYGSSEKLFDADFVLEKSLKKNDAVVAIMKDLLDSVKSFENYIKAFFGEGKETNRDESFYGDFVLAYDILLKVDHIYDAIRNYVTQKPYSKDKFKLYFQNPQFMGGWDKDKETDYRATILRYGSKYYLAIMDKKYAKCLQKIDKDDVNGNYEKINYKLLPGPNKMLPKVFFSKKWMAYYNPSEDIQKIYKNGTFKKGDMFNLNDCHKLIDFFKDSISRYPKWSNAYDFNFSETEKYKDIAGFYREVEEQGYKVSFESASKKEVDKLVEEGKLYMFQIYNKDFSDKSHGTPNLHTMYFKLLFDENNHGQIRLSGGAELFMRRASLKKEELVVHPANSPIANKNPDNPKKTTTLSYDVYKDKRFSEDQYELHIPIAINKCPKNIFKINTEVRVLLKHDDNPYVIGIDRGERNLLYIVVVDGKGNIVEQYSLNEIINNFNGIRIKTDYHSLLDKKEKERFEARQNWTSIENIKELKAGYISQVVHKICELVEKYDAVIALEDLNSGFKNSRVKVEKQVYQKFEKMLIDKLNYMVDKKSNPCATGGALKGYQITNKFESFKSMSTQNGFIFYIPAWLTSKIDPSTGFVNLLKTKYTSIADSKKFISSFDRIMYVPEEDLFEFALDYKNFSRTDADYIKKWKLYSYGNRIRIFRNPKKNNVFDWEEVCLTSAYKELFNKYGINYQQGDIRALLCEQSDKAFYSSFMALMSLMLQMRNSITGRTDVDFLISPVKNSDGIFYDSRNYEAQENAILPKNADANGAYNIARKVLWAIGQFKKAEDEKLDKVKIAISNKEWLEYAQTSVKHGSSGSSGSSGSKLEKFTNCYSLSKTLRFKAIPVGKTQENIDNKRLLVEDEKRAEDYKGVKKLLDRYYLSFINDVLHSIKLKNLNNYISLFRKKT

SEQ ID NO: 235 - protein, 1243 aa, synthetic construct
RTEKENKELENLEINLRKEIAKAFKGNEGYKSLFKKDIIETILPEFLDDKDEIALVNSFNGFTTAFTGFFDNRENMFSEEAKSTSIAFRCINENLTRYISNMDIFEKVDAIFDKHEVQEIKEKILNSDYDVEDFFEGEFFNFVLTQEGIDVYNAIIGGFVTESGEKIKGLNEYINLYNQKTKQKLPKFKPLYKQVLSDRESLSFYGEGYTSDEEVLEVFRNTLNKNSEIFSSIKKLEKLFKNFDEYSSAGIFVKNGPAISTISKDIFGEWNVIRDKWNAEYDDIHLKKKAVVTEKYEDDRRKSFKKIGSFSLEQLQEYADADLSVVEKLKEIIIQKVDEIYKVYGSSEKLFDADFVLEKSLKKNDAVVAIMKDLLDSVKSFENYIKAFFGEGKETNRDESFYGDFVLAYDILLKVDHIYDAIRNYVTQKPYSKDKFKLYFQNPQFMGGWDKDKETDYRATILRYGSKYYLAIMDKKYAKCLQKIDKDDVNGNYEKINYKLLPGPNKMLPKVFFSKKWMAYYNPSEDIQKIYKNGTFKKGDMFNLNDCHKLIDFFKDSISRYPKWSNAYDFNFSETEKYKDIAGFYREVEEQGYKVSFESASKKEVDKLVEEGKLYMFQIYNKDFSDKSHGTPNLHTMYFKLLFDENNHGQIRLSGGAELFMRRASLKKEELVVHPANSPIANKNPDNPKKTTTLSYDVYKDKRFSEDQYELHIPIAINKCPKNIFKINTEVRVLLKHDDNPYVIGIDRGERNLLYIVVVDGKGNIVEQYSLNEIINNFNGIRIKTDYHSLLDKKEKERFEARQNWTSIENIKELKAGYISQVVHKICELVEKYDAVIALEDLNSGFKNSRVKVEKQVYQKFEKMLIDKLNYMVDKKSNPCATGGALKGYQITNKFESFKSMSTQNGFIFYIPAWLTSKIDPSTGFVNLLKTKYTSIADSKKFISSFDRIMYVPEEDLFEFALDYKNFSRTDADYIKKWKLYSYGNRIRIFRNPKKNNVFDWEEVCLTSAYKELFNKYGINYQQGDIRALLCEQSDKAFYSSFMALMSLMLQMRNSITGRTDVDFLISPVKNSDGIFYDSRNYEAQENAILPKNADANGAYNIARKVLWAIGQFKKAEDEKLDKVKIAISNKEWLEYAQTSVKHGSSGSSGSSGSSGSSGSKLEKFTNCYSLSKTLRFKAIPVGKTQENIDNKRLLVEDEKRAEDYKGVKKLLDRYYLSFINDVLHSIKLKNLNNYISLFRKKT

SEQ ID NO: 236 - protein, 1237 aa, synthetic construct
GYTSDEEVLEVFRNTLNKNSEIFSSIKKLEKLFKNFDEYSSAGIFVKNGPAISTISKDIFGEWNVIRDKWNAEYDDIHLKKKAVVTEKYEDDRRKSFKKIGSFSLEQLQEYADADLSVVEKLKEIIIQKVDEIYKVYGSSEKLFDADFVLEKSLKKNDAVVAIMKDLLDSVKSFENYIKAFFGEGKETNRDESFYGDFVLAYDILLKVDHIYDAIRNYVTQKPYSKDKFKLYFQNPQFMGGWDKDKETDYRATILRYGSKYYLAIMDKKYAKCLQKIDKDDVNGNYEKINYKLLPGPNKMLPKVFFSKKWMAYYNPSEDIQKIYKNGTFKKGDMFNLNDCHKLIDFFKDSISRYPKWSNAYDFNFSETEKYKDIAGFYREVEEQGYKVSFESASKKEVDKLVEEGKLYMFQIYNKDFSDKSHGTPNLHTMYFKLLFDENNHGQIRLSGGAELFMRRASLKKEELVVHPANSPIANKNPDNPKKTTTLSYDVYKDKRFSEDQYELHIPIAINKCPKNIFKINTEVRVLLKHDDNPYVIGIDRGERNLLYIVVVDGKGNIVEQYSLNEIINNFNGIRIKTDYHSLLDKKEKERFEARQNWTSIENIKELKAGYISQVVHKICELVEKYDAVIALEDLNSGFKNSRVKVEKQVYQKFEKMLIDKLNYMVDKKSNPCATGGALKGYQITNKFESFKSMSTQNGFIFYIPAWLTSKIDPSTGFVNLLKTKYTSIADSKKFISSFDRIMYVPEEDLFEFALDYKNFSRTDADYIKKWKLYSYGNRIRIFRNPKKNNVFDWEEVCLTSAYKELFNKYGINYQQGDIRALLCEQSDKAFYSSFMALMSLMLQMRNSITGRTDVDFLISPVKNSDGIFYDSRNYEAQENAILPKNADANGAYNIARKVLWAIGQFKKAEDEKLDKVKIAISNKEWLEYAQTSVKHGSSGSSGSSGSKLEKFTNCYSLSKTLRFKAIPVGKTQENIDNKRLLVEDEKRAEDYKGVKKLLDRYYLSFINDVLHSIKLKNLNNYISLFRKKTRTEKENKELENLEINLRKEIAKAFKGNEGYKSLFKKDIIETILPEFLDDKDEIALVNSFNGFTTAFTGFFDNRENMFSEEAKSTSIAFRCINENLTRYISNMDIFEKVDAIFDKHEVQEIKEKILNSDYDVEDFFEGEFFNFVLTQEGIDVYNAIIGGFVTESGEKIKGLNEYINLYNQKTKQKLPKFKPLYKQVLSDRESLSFYGE

SEQ ID NO: 237 - protein, 1243 aa, synthetic construct
GYTSDEEVLEVFRNTLNKNSEIFSSIKKLEKLFKNFDEYSSAGIFVKNGPAISTISKDIFGEWNVIRDKWNAEYDDIHLKKKAVVTEKYEDDRRKSFKKIGSFSLEQLQEYADADLSVVEKLKEIIIQKVDEIYKVYGSSEKLFDADFVLEKSLKKNDAVVAIMKDLLDSVKSFENYIKAFFGEGKETNRDESFYGDFVLAYDILLKVDHIYDAIRNYVTQKPYSKDKFKLYFQNPQFMGGWDKDKETDYRATILRYGSKYYLAIMDKKYAKCLQKIDKDDVNGNYEKINYKLLPGPNKMLPKVFFSKKWMAYYNPSEDIQKIYKNGTFKKGDMFNLNDCHKLIDFFKDSISRYPKWSNAYDFNFSETEKYKDIAGFYREVEEQGYKVSFESASKKEVDKLVEEGKLYMFQIYNKDFSDKSHGTPNLHTMYFKLLFDENNHGQIRLSGGAELFMRRASLKKEELVVHPANSPIANKNPDNPKKTTTLSYDVYKDKRFSEDQYELHIPIAINKCPKNIFKINTEVRVLLKHDDNPYVIGIDRGERNLLYIVVVDGKGNIVEQYSLNEIINNFNGIRIKTDYHSLLDKKEKERFEARQNWTSIENIKELKAGYISQVVHKICELVEKYDAVIALEDLNSGFKNSRVKVEKQVYQKFEKMLIDKLNYMVDKKSNPCATGGALKGYQITNKFESFKSMSTQNGFIFYIPAWLTSKIDPSTGFVNLLKTKYTSIADSKKFISSFDRIMYVPEEDLFEFALDYKNFSRTDADYIKKWKLYSYGNRIRIFRNPKKNNVFDWEEVCLTSAYKELFNKYGINYQQGDIRALLCEQSDKAFYSSFMALMSLMLQMRNSITGRTDVDFLISPVKNSDGIFYDSRNYEAQENAILPKNADANGAYNIARKVLWAIGQFKKAEDEKLDKVKIAISNKEWLEYAQTSVKHGSSGSSGSSGSSGSSGSKLEKFTNCYSLSKTLRFKAIPVGKTQENIDNKRLLVEDEKRAEDYKGVKKLLDRYYLSFINDVLHSIKLKNLNNYISLFRKKTRTEKENKELENLEINLRKEIAKAFKGNEGYKSLFKKDIIETILPEFLDDKDEIALVNSFNGFTTAFTGFFDNRENMFSEEAKSTSIAFRCINENLTRYISNMDIFEKVDAIFDKHEVQEIKEKILNSDYDVEDFFEGEFFNFVLTQEGIDVYNAIIGGFVTESGEKIKGLNEYINLYNQKTKQKLPKFKPLYKQVLSDRESLSFYGE

SEQ ID NO: 238 - protein, 1237 aa, synthetic construct
SDGIFYDSRNYEAQENAILPKNADANGAYNIARKVLWAIGQFKKAEDEKLDKVKIAISNKEWLEYAQTSVKHGSSGSSGSSGSKLEKFTNCYSLSKTLRFKAIPVGKTQENIDNKRLLVEDEKRAEDYKGVKKLLDRYYLSFINDVLHSIKLKNLNNYISLFRKKTRTEKENKELENLEINLRKEIAKAFKGNEGYKSLFKKDIIETILPEFLDDKDEIALVNSFNGFTTAFTGFFDNRENMFSEEAKSTSIAFRCINENLTRYISNMDIFEKVDAIFDKHEVQEIKEKILNSDYDVEDFFEGEFFNFVLTQEGIDVYNAIIGGFVTESGEKIKGLNEYINLYNQKTKQKLPKFKPLYKQVLSDRESLSFYGEGYTSDEEVLEVFRNTLNKNSEIFSSIKKLEKLFKNFDEYSSAGIFVKNGPAISTISKDIFGEWNVIRDKWNAEYDDIHLKKKAVVTEKYEDDRRKSFKKIGSFSLEQLQEYADADLSVVEKLKEIIIQKVDEIYKVYGSSEKLFDADFVLEKSLKKNDAVVAIMKDLLDSVKSFENYIKAFFGEGKETNRDESFYGDFVLAYDILLKVDHIYDAIRNYVTQKPYSKDKFKLYFQNPQFMGGWDKDKETDYRATILRYGSKYYLAIMDKKYAKCLQKIDKDDVNGNYEKINYKLLPGPNKMLPKVFFSKKWMAYYNPSEDIQKIYKNGTFKKGDMFNLNDCHKLIDFFKDSISRYPKWSNAYDFNFSETEKYKDIAGFYREVEEQGYKVSFESASKKEVDKLVEEGKLYMFQIYNKDFSDKSHGTPNLHTMYFKLLFDENNHGQIRLSGGAELFMRRASLKKEELVVHPANSPIANKNPDNPKKTTTLSYDVYKDKRFSEDQYELHIPIAINKCPKNIFKINTEVRVLLKHDDNPYVIGIDRGERNLLYIVVVDGKGNIVEQYSLNEIINNFNGIRIKTDYHSLLDKKEKERFEARQNWTSIENIKELKAGYISQVVHKICELVEKYDAVIALEDLNSGFKNSRVKVEKQVYQKFEKMLIDKLNYMVDKKSNPCATGGALKGYQITNKFESFKSMSTQNGFIFYIPAWLTSKIDPSTGFVNLLKTKYTSIADSKKFISSFDRIMYVPEEDLFEFALDYKNFSRTDADYIKKWKLYSYGNRIRIFRNPKKNNVFDWEEVCLTSAYKELFNKYGINYQQGDIRALLCEQSDKAFYSSFMALMSLMLQMRNSITGRTDVDFLISPVKN

SEQ ID NO: 239 - protein, 1243 aa, synthetic construct
SDGIFYDSRNYEAQENAILPKNADANGAYNIARKVLWAIGQFKKAEDEKLDKVKIAISNKEWLEYAQTSVKHGSSGSSGSSGSSGSSGSKLEKFTNCYSLSKTLRFKAIPVGKTQENIDNKRLLVEDEKRAEDYKGVKKLLDRYYLSFINDVLHSIKLKNLNNYISLFRKKTRTEKENKELENLEINLRKEIAKAFKGNEGYKSLFKKDIIETILPEFLDDKDEIALVNSFNGFTTAFTGFFDNRENMFSEEAKSTSIAFRCINENLTRYISNMDIFEKVDAIFDKHEVQEIKEKILNSDYDVEDFFEGEFFNFVLTQEGIDVYNAIIGGFVTESGEKIKGLNEYINLYNQKTKQKLPKFKPLYKQVLSDRESLSFYGEGYTSDEEVLEVFRNTLNKNSEIFSSIKKLEKLFKNFDEYSSAGIFVKNGPAISTISKDIFGEWNVIRDKWNAEYDDIHLKKKAVVTEKYEDDRRKSFKKIGSFSLEQLQEYADADLSVVEKLKEIIIQKVDEIYKVYGSSEKLFDADFVLEKSLKKNDAVVAIMKDLLDSVKSFENYIKAFFGEGKETNRDESFYGDFVLAYDILLKVDHIYDAIRNYVTQKPYSKDKFKLYFQNPQFMGGWDKDKETDYRATILRYGSKYYLAIMDKKYAKCLQKIDKDDVNGNYEKINYKLLPGPNKMLPKVFFSKKWMAYYNPSEDIQKIYKNGTFKKGDMFNLNDCHKLIDFFKDSISRYPKWSNAYDFNFSETEKYKDIAGFYREVEEQGYKVSFESASKKEVDKLVEEGKLYMFQIYNKDFSDKSHGTPNLHTMYFKLLFDENNHGQIRLSGGAELFMRRASLKKEELVVHPANSPIANKNPDNPKKTTTLSYDVYKDKRFSEDQYELHIPIAINKCPKNIFKINTEVRVLLKHDDNPYVIGIDRGERNLLYIVVVDGKGNIVEQYSLNEIINNFNGIRIKTDYHSLLDKKEKERFEARQNWTSIENIKELKAGYISQVVHKICELVEKYDAVIALEDLNSGFKNSRVKVEKQVYQKFEKMLIDKLNYMVDKKSNPCATGGALKGYQITNKFESFKSMSTQNGFIFYIPAWLTSKIDPSTGFVNLLKTKYTSIADSKKFISSFDRIMYVPEEDLFEFALDYKNFSRTDADYIKKWKLYSYGNRIRIFRNPKKNNVFDWEEVCLTSAYKELFNKYGINYQQGDIRALLCEQSDKAFYSSFMALMSLMLQMRNSITGRTDVDFLISPVKN

SEQ ID NO: 240 - protein, 1237 aa, synthetic construct
KDKFKLYFQNPQFMGGWDKDKETDYRATILRYGSKYYLAIMDKKYAKCLQKIDKDDVNGNYEKINYKLLPGPNKMLPKVFFSKKWMAYYNPSEDIQKIYKNGTFKKGDMFNLNDCHKLIDFFKDSISRYPKWSNAYDFNFSETEKYKDIAGFYREVEEQGYKVSFESASKKEVDKLVEEGKLYMFQIYNKDFSDKSHGTPNLHTMYFKLLFDENNHGQIRLSGGAELFMRRASLKKEELVVHPANSPIANKNPDNPKKTTTLSYDVYKDKRFSEDQYELHIPIAINKCPKNIFKINTEVRVLLKHDDNPYVIGIDRGERNLLYIVVVDGKGNIVEQYSLNEIINNFNGIRIKTDYHSLLDKKEKERFEARQNWTSIENIKELKAGYISQVVHKICELVEKYDAVIALEDLNSGFKNSRVKVEKQVYQKFEKMLIDKLNYMVDKKSNPCATGGALKGYQITNKFESFKSMSTQNGFIFYIPAWLTSKIDPSTGFVNLLKTKYTSIADSKKFISSFDRIMYVPEEDLFEFALDYKNFSRTDADYIKKWKLYSYGNRIRIFRNPKKNNVFDWEEVCLTSAYKELFNKYGINYQQGDIRALLCEQSDKAFYSSFMALMSLMLQMRNSITGRTDVDFLISPVKNSDGIFYDSRNYEAQENAILPKNADANGAYNIARKVLWAIGQFKKAEDEKLDKVKIAISNKEWLEYAQTSVKHGSSGSSGSSGSKLEKFTNCYSLSKTLRFKAIPVGKTQENIDNKRLLVEDEKRAEDYKGVKKLLDRYYLSFINDVLHSIKLKNLNNYISLFRKKTRTEKENKELENLEINLRKEIAKAFKGNEGYKSLFKKDIIETILPEFLDDKDEIALVNSFNGFTTAFTGFFDNRENMFSEEAKSTSIAFRCINENLTRYISNMDIFEKVDAIFDKHEVQEIKEKILNSDYDVEDFFEGEFFNFVLTQEGIDVYNAIIGGFVTESGEKIKGLNEYINLYNQKTKQKLPKFKPLYKQVLSDRESLSFYGEGYTSDEEVLEVFRNTLNKNSEIFSSIKKLEKLFKNFDEYSSAGIFVKNGPAISTISKDIFGEWNVIRDKWNAEYDDIHLKKKAVVTEKYEDDRRKSFKKIGSFSLEQLQEYADADLSVVEKLKEIIIQKVDEIYKVYGSSEKLFDADFVLEKSLKKNDAVVAIMKDLLDSVKSFENYIKAFFGEGKETNRDESFYGDFVLAYDILLKVDHIYDAIRNYVTQKPYS

SEQ ID NO: 241 - protein, 1243 aa, synthetic construct
KDKFKLYFQNPQFMGGWDKDKETDYRATILRYGSKYYLAIMDKKYAKCLQKIDKDDVNGNYEKINYKLLPGPNKMLPKVFFSKKWMAYYNPSEDIQKIYKNGTFKKGDMFNLNDCHKLIDFFKDSISRYPKWSNAYDFNFSETEKYKDIAGFYREVEEQGYKVSFESASKKEVDKLVEEGKLYMFQIYNKDFSDKSHGTPNLHTMYFKLLFDENNHGQIRLSGGAELFMRRASLKKEELVVHPANSPIANKNPDNPKKTTTLSYDVYKDKRFSEDQYELHIPIAINKCPKNIFKINTEVRVLLKHDDNPYVIGIDRGERNLLYIVVVDGKGNIVEQYSLNEIINNFNGIRIKTDYHSLLDKKEKERFEARQNWTSIENIKELKAGYISQVVHKICELVEKYDAVIALEDLNSGFKNSRVKVEKQVYQKFEKMLIDKLNYMVDKKSNPCATGGALKGYQITNKFESFKSMSTQNGFIFYIPAWLTSKIDPSTGFVNLLKTKYTSIADSKKFISSFDRIMYVPEEDLFEFALDYKNFSRTDADYIKKWKLYSYGNRIRIFRNPKKNNVFDWEEVCLTSAYKELFNKYGINYQQGDIRALLCEQSDKAFYSSFMALMSLMLQMRNSITGRTDVDFLISPVKNSDGIFYDSRNYEAQENAILPKNADANGAYNIARKVLWAIGQFKKAEDEKLDKVKIAISNKEWLEYAQTSVKHGSSGSSGSSGSSGSSGSKLEKFTNCYSLSKTLRFKAIPVGKTQENIDNKRLLVEDEKRAEDYKGVKKLLDRYYLSFINDVLHSIKLKNLNNYISLFRKKTRTEKENKELENLEINLRKEIAKAFKGNEGYKSLFKKDIIETILPEFLDDKDEIALVNSFNGFTTAFTGFFDNRENMFSEEAKSTSIAFRCINENLTRYISNMDIFEKVDAIFDKHEVQEIKEKILNSDYDVEDFFEGEFFNFVLTQEGIDVYNAIIGGFVTESGEKIKGLNEYINLYNQKTKQKLPKFKPLYKQVLSDRESLSFYGEGYTSDEEVLEVFRNTLNKNSEIFSSIKKLEKLFKNFDEYSSAGIFVKNGPAISTISKDIFGEWNVIRDKWNAEYDDIHLKKKAVVTEKYEDDRRKSFKKIGSFSLEQLQEYADADLSVVEKLKEIIIQKVDEIYKVYGSSEKLFDADFVLEKSLKKNDAVVAIMKDLLDSVKSFENYIKAFFGEGKETNRDESFYGDFVLAYDILLKVDHIYDAIRNYVTQKPYS

SEQ ID NO: 242 - protein, 1237 aa, synthetic construct
KSLKKNDAVVAIMKDLLDSVKSFENYIKAFFGEGKETNRDESFYGDFVLAYDILLKVDHIYDAIRNYVTQKPYSKDKFKLYFQNPQFMGGWDKDKETDYRATILRYGSKYYLAIMDKKYAKCLQKIDKDDVNGNYEKINYKLLPGPNKMLPKVFFSKKWMAYYNPSEDIQKIYKNGTFKKGDMFNLNDCHKLIDFFKDSISRYPKWSNAYDFNFSETEKYKDIAGFYREVEEQGYKVSFESASKKEVDKLVEEGKLYMFQIYNKDFSDKSHGTPNLHTMYFKLLFDENNHGQIRLSGGAELFMRRASLKKEELVVHPANSPIANKNPDNPKKTTTLSYDVYKDKRFSEDQYELHIPIAINKCPKNIFKINTEVRVLLKHDDNPYVIGIDRGERNLLYIVVVDGKGNIVEQYSLNEIINNFNGIRIKTDYHSLLDKKEKERFEARQNWTSIENIKELKAGYISQVVHKICELVEKYDAVIALEDLNSGFKNSRVKVEKQVYQKFEKMLIDKLNYMVDKKSNPCATGGALKGYQITNKFESFKSMSTQNGFIFYIPAWLTSKIDPSTGFVNLLKTKYTSIADSKKFISSFDRIMYVPEEDLFEFALDYKNFSRTDADYIKKWKLYSYGNRIRIFRNPKKNNVFDWEEVCLTSAYKELFNKYGINYQQGDIRALLCEQSDKAFYSSFMALMSLMLQMRNSITGRTDVDFLISPVKNSDGIFYDSRNYEAQENAILPKNADANGAYNIARKVLWAIGQFKKAEDEKLDKVKIAISNKEWLEYAQTSVKHGSSGSSGSSGSKLEKFTNCYSLSKTLRFKAIPVGKTQENIDNKRLLVEDEKRAEDYKGVKKLLDRYYLSFINDVLHSIKLKNLNNYISLFRKKTRTEKENKELENLEINLRKEIAKAFKGNEGYKSLFKKDIIETILPEFLDDKDEIALVNSFNGFTTAFTGFFDNRENMFSEEAKSTSIAFRCINENLTRYISNMDIFEKVDAIFDKHEVQEIKEKILNSDYDVEDFFEGEFFNFVLTQEGIDVYNAIIGGFVTESGEKIKGLNEYINLYNQKTKQKLPKFKPLYKQVLSDRESLSFYGEGYTSDEEVLEVFRNTLNKNSEIFSSIKKLEKLFKNFDEYSSAGIFVKNGPAISTISKDIFGEWNVIRDKWNAEYDDIHLKKKAVVTEKYEDDRRKSFKKIGSFSLEQLQEYADADLSVVEKLKEIIIQKVDEIYKVYGSSEKLFDADFVLE

SEQ ID NO: 243 - protein, 1243 aa, synthetic construct
KSLKKNDAVVAIMKDLLDSVKSFENYIKAFFGEGKETNRDESFYGDFVLAYDILLKVDHIYDAIRNYVTQKPYSKDKFKLYFQNPQFMGGWDKDKETDYRATILRYGSKYYLAIMDKKYAKCLQKIDKDDVNGNYEKINYKLLPGPNKMLPKVFFSKKWMAYYNPSEDIQKIYKNGTFKKGDMFNLNDCHKLIDFFKDSISRYPKWSNAYDFNFSETEKYKDIAGFYREVEEQGYKVSFESASKKEVDKLVEEGKLYMFQIYNKDFSDKSHGTPNLHTMYFKLLFDENNHGQIRLSGGAELFMRRASLKKEELVVHPANSPIANKNPDNPKKTTTLSYDVYKDKRFSEDQYELHIPIAINKCPKNIFKINTEVRVLLKHDDNPYVIGIDRGERNLLYIVVVDGKGNIVEQYSLNEIINNFNGIRIKTDYHSLLDKKEKERFEARQNWTSIENIKELKAGYISQVVHKICELVEKYDAVIALEDLNSGFKNSRVKVEKQVYQKFEKMLIDKLNYMVDKKSNPCATGGALKGYQITNKFESFKSMSTQNGFIFYIPAWLTSKIDPSTGFVNLLKTKYTSIADSKKFISSFDRIMYVPEEDLFEFALDYKNFSRTDADYIKKWKLYSYGNRIRIFRNPKKNNVFDWEEVCLTSAYKELFNKYGINYQQGDIRALLCEQSDKAFYSSFMALMSLMLQMRNSITGRTDVDFLISPVKNSDGIFYDSRNYEAQENAILPKNADANGAYNIARKVLWAIGQFKKAEDEKLDKVKIAISNKEWLEYAQTSVKHGSSGSSGSSGSSGSSGSKLEKFTNCYSLSKTLRFKAIPVGKTQENIDNKRLLVEDEKRAEDYKGVKKLLDRYYLSFINDVLHSIKLKNLNNYISLFRKKTRTEKENKELENLEINLRKEIAKAFKGNEGYKSLFKKDIIETILPEFLDDKDEIALVNSFNGFTTAFTGFFDNRENMFSEEAKSTSIAFRCINENLTRYISNMDIFEKVDAIFDKHEVQEIKEKILNSDYDVEDFFEGEFFNFVLTQEGIDVYNAIIGGFVTESGEKIKGLNEYINLYNQKTKQKLPKFKPLYKQVLSDRESLSFYGEGYTSDEEVLEVFRNTLNKNSEIFSSIKKLEKLFKNFDEYSSAGIFVKNGPAISTISKDIFGEWNVIRDKWNAEYDDIHLKKKAVVTEKYEDDRRKSFKKIGSFSLEQLQEYADADLSVVEKLKEIIIQKVDEIYKVYGSSEKLFDADFVLE

SEQ ID NO: 244 - protein, 1237 aa, synthetic construct
SDKAFYSSFMALMSLMLQMRNSITGRTDVDFLISPVKNSDGIFYDSRNYEAQENAILPKNADANGAYNIARKVLWAIGQFKKAEDEKLDKVKIAISNKEWLEYAQTSVKHGSSGSSGSSGSKLEKFTNCYSLSKTLRFKAIPVGKTQENIDNKRLLVEDEKRAEDYKGVKKLLDRYYLSFINDVLHSIKLKNLNNYISLFRKKTRTEKENKELENLEINLRKEIAKAFKGNEGYKSLFKKDIIETILPEFLDDKDEIALVNSFNGFTTAFTGFFDNRENMFSEEAKSTSIAFRCINENLTRYISNMDIFEKVDAIFDKHEVQEIKEKILNSDYDVEDFFEGEFFNFVLTQEGIDVYNAIIGGFVTESGEKIKGLNEYINLYNQKTKQKLPKFKPLYKQVLSDRESLSFYGEGYTSDEEVLEVFRNTLNKNSEIFSSIKKLEKLFKNFDEYSSAGIFVKNGPAISTISKDIFGEWNVIRDKWNAEYDDIHLKKKAVVTEKYEDDRRKSFKKIGSFSLEQLQEYADADLSVVEKLKEIIIQKVDEIYKVYGSSEKLFDADFVLEKSLKKNDAVVAIMKDLLDSVKSFENYIKAFFGEGKETNRDESFYGDFVLAYDILLKVDHIYDAIRNYVTQKPYSKDKFKLYFQNPQFMGGWDKDKETDYRATILRYGSKYYLAIMDKKYAKCLQKIDKDDVNGNYEKINYKLLPGPNKMLPKVFFSKKWMAYYNPSEDIQKIYKNGTFKKGDMFNLNDCHKLIDFFKDSISRYPKWSNAYDFNFSETEKYKDIAGFYREVEEQGYKVSFESASKKEVDKLVEEGKLYMFQIYNKDFSDKSHGTPNLHTMYFKLLFDENNHGQIRLSGGAELFMRRASLKKEELVVHPANSPIANKNPDNPKKTTTLSYDVYKDKRFSEDQYELHIPIAINKCPKNIFKINTEVRVLLKHDDNPYVIGIDRGERNLLYIVVVDGKGNIVEQYSLNEIINNFNGIRIKTDYHSLLDKKEKERFEARQNWTSIENIKELKAGYISQVVHKICELVEKYDAVIALEDLNSGFKNSRVKVEKQVYQKFEKMLIDKLNYMVDKKSNPCATGGALKGYQITNKFESFKSMSTQNGFIFYIPAWLTSKIDPSTGFVNLLKTKYTSIADSKKFISSFDRIMYVPEEDLFEFALDYKNFSRTDADYIKKWKLYSYGNRIRIFRNPKKNNVFDWEEVCLTSAYKELFNKYGINYQQGDIRALLCEQ

SEQ ID NO: 245 - protein, 1243 aa, synthetic construct
SDKAFYSSFMALMSLMLQMRNSITGRTDVDFLISPVKNSDGIFYDSRNYEAQENAILPKNADANGAYNIARKVLWAIGQFKKAEDEKLDKVKIAISNKEWLEYAQTSVKHGSSGSSGSSGSSGSSGSKLEKFTNCYSLSKTLRFKAIPVGKTQENIDNKRLLVEDEKRAEDYKGVKKLLDRYYLSFINDVLHSIKLKNLNNYISLFRKKTRTEKENKELENLEINLRKEIAKAFKGNEGYKSLFKKDIIETILPEFLDDKDEIALVNSFNGFTTAFTGFFDNRENMFSEEAKSTSIAFRCINENLTRYISNMDIFEKVDAIFDKHEVQEIKEKILNSDYDVEDFFEGEFFNFVLTQEGIDVYNAIIGGFVTESGEKIKGLNEYINLYNQKTKQKLPKFKPLYKQVLSDRESLSFYGEGYTSDEEVLEVFRNTLNKNSEIFSSIKKLEKLFKNFDEYSSAGIFVKNGPAISTISKDIFGEWNVIRDKWNAEYDDIHLKKKAVVTEKYEDDRRKSFKKIGSFSLEQLQEYADADLSVVEKLKEIIIQKVDEIYKVYGSSEKLFDADFVLEKSLKKNDAVVAIMKDLLDSVKSFENYIKAFFGEGKETNRDESFYGDFVLAYDILLKVDHIYDAIRNYVTQKPYSKDKFKLYFQNPQFMGGWDKDKETDYRATILRYGSKYYLAIMDKKYAKCLQKIDKDDVNGNYEKINYKLLPGPNKMLPKVFFSKKWMAYYNPSEDIQKIYKNGTFKKGDMFNLNDCHKLIDFFKDSISRYPKWSNAYDFNFSETEKYKDIAGFYREVEEQGYKVSFESASKKEVDKLVEEGKLYMFQIYNKDFSDKSHGTPNLHTMYFKLLFDENNHGQIRLSGGAELFMRRASLKKEELVVHPANSPIANKNPDNPKKTTTLSYDVYKDKRFSEDQYELHIPIAINKCPKNIFKINTEVRVLLKHDDNPYVIGIDRGERNLLYIVVVDGKGNIVEQYSLNEIINNFNGIRIKTDYHSLLDKKEKERFEARQNWTSIENIKELKAGYISQVVHKICELVEKYDAVIALEDLNSGFKNSRVKVEKQVYQKFEKMLIDKLNYMVDKKSNPCATGGALKGYQITNKFESFKSMSTQNGFIFYIPAWLTSKIDPSTGFVNLLKTKYTSIADSKKFISSFDRIMYVPEEDLFEFALDYKNFSRTDADYIKKWKLYSYGNRIRIFRNPKKNNVFDWEEVCLTSAYKELFNKYGINYQQGDIRALLCEQ

SEQ ID NO: 246 - DNA, 3681 bp, unidentified
  source 1..3681: mol_type = genomic DNA; note = Lachnospiraceae bacterium
tccaagctggagaagtttacaaactgttacagcctctccaaaaccctcaggtttaaagcgatcccggtgggcaagacccaggagaacatcgacaacaagaggctcctggtggaagacgagaagcgcgccgaagactacaagggcgtgaagaagctgctcgataggtactacctcagctttattaacgacgtgctgcacagcatcaaactcaagaatctcaacaactacatctccctcttccgcaaaaagacccgcaccgagaaggagaacaaggagctggagaacctggagatcaacctccgcaaggaaatcgccaaagcgttcaagggcaatgaagggtacaagagcctcttcaagaaagacatcatcgaaactatcctcccagagtttctcgatgacaaggacgagatcgcgctggtgaactcctttaacgggttcacaaccgcgtttaccggcttctttgataacagggaaaatatgttctccgaggaggccaagtccaccagcatcgccttcaggtgtatcaacgagaacctcacccgctacatttccaatatggacattttcgagaaggtggatgcgatcttcgataagcacgaggtgcaggagatcaaagagaagattctcaattccgattatgacgtcgaggatttcttcgaaggggagttctttaattttgtgctcacacaagagggcattgacgtgtacaacgcgattatcgggggcttcgtcacagagtccggggagaagattaaggggctgaatgagtacatcaatctgtacaatcagaagaccaagcagaaactgccgaaattcaagccgctctacaagcaagtcctgtccgatagggaaagcctctccttctacggcgagggctataccagcgacgaggaggtgctggaagtcttccgcaacacactgaataagaatagcgagattttctcctccatcaagaagctcgagaagctctttaagaactttgacgagtacagctccgccgggattttcgtgaagaacgggccggcgatcagcaccatctccaaggacatctttggcgagtggaacgtcatcagggacaagtggaacgccgagtacgacgacatccacctgaagaagaaggcggtggtgaccgagaagtatgaggacgatcgcaggaagtccttcaaaaaaatcggctccttcagcctcgaacagctccaggagtatgccgatgcggatctgtccgtcgtcgagaagctgaaggaaatcatcattcagaaggtcgacgagatctataaagtgtacgggtccagcgagaagctgttcgacgccgactttgtgctcgagaagtccctcaaaaagaatgacgccgtggtggccattatgaaagacctgctcgactccgtgaagtccttcgaaaattacattaaagcgttctttggggaggggaaggaaactaacagggatgagtccttctatggcgactttgtcctcgcgtacgacatcctgctgaaggtcgaccacatttacgacgcgatccgcaactacgtgacacagaagccgtactccaaagacaagttcaagctgtacttccagaacccgcaatttatggggggctgggacaaggataaagagacagactaccgcgcgacaattctccgctatggctccaaatactatctggccatcatggacaagaagtacgcgaagtgcctgcagaagatcgacaaagacgacgtcaatggcaactatgaaaagatcaactacaagctgctgccgggcccgaacaagatgctcccgaaggtgttcttcagcaagaagtggatggcctactacaatccaagcgaggatattcagaaaatctataaaaacgggaccttcaagaagggggacatgtttaacctcaacgactgccacaagctcattgatttcttcaaggatagcatttcccgctacccgaaatggtccaatgcgtacgattttaacttctccgagacagaaaagtacaaagacatcgcgggcttttacagggaggtggaggagcaagggtataaagtttcttttgaatccgcgagcaagaaggaagtcgacaagctcgtcgaggagggcaagctctacatgttccaaatttataacaaggacttttccgacaagagccatgggaccccaaacctccacaccatgtacttcaaactgctctttgacgagaacaaccacgggcaaatcaggctgagcggcggcgccgaattattcatgcgcagggcctccctcaagaaggaagagctggtcgtccatccagccaattccccgatcgcgaacaagaacccggacaatccgaaaaagaccaccaccctgtcctacgacgtctacaaggacaaacgcttcagcgaagaccagtacgaattacacatcccaattgcgattaataagtgcccaaagaatatcttcaaaattaatacagaggtcagggtgctgctcaaacacgacgacaatccgtatgtcatcggcattgacaggggcgagcgcaatctgctctatatcgtggtcgtggatgggaagggcaatattgtggagcagtactccctgaacgagattatcaacaacttcaatgggattaggattaagaccgactatcacagcctgctcgacaagaaagaaaaagagaggtttgaggcccgccaaaactggacctccattgagaatatcaaagaattaaaggccggctatatttcccaagtcgtccacaagatctgcgagctggtggagaaatatgacgccgtgattgcgctcgaagacttaaattctgggttcaagaactcccgcgtgaaggtggaaaaacaggtgtatcagaaattcgagaaaatgctgatcgacaaactcaattatatggtggataagaagtccaacccgtgtgccacagggggcgcgctgaagggctatcagatcaccaacaagttcgagagcttcaagagcatgagcacccagaacgggtttattttctacatcccggcgtggctcacctccaagattgacccgagcaccggcttcgtgaacctcctgaagacaaagtatacctccattgccgacagcaagaagtttatctcctccttcgaccgcattatgtatgtgccggaggaggacctcttcgagttcgccctcgactacaaaaacttcagccgcacagatgcggattacatcaagaagtggaagctgtactcctacgggaacaggatccgcatcttcaggaatccaaaaaaaaataacgtctttgactgggaggaagtgtgcctgacatccgcctacaaggaactgttcaataaatacggcatcaattaccagcagggcgacattcgcgccctcctctgtgagcagtccgacaaagcgttttactccagcttcatggccctcatgtccctgatgctccaaatgaggaatagcatcacagggcgcaccgacgtcgacttcctcatcagcccggtgaagaactccgacgggatcttttacgactcccgcaactatgaggcgcaagagaatgcgatcctcccgaagaacgccgatgcgaacggggcctataatatcgccaggaaagtgctctgggccatcgggcagttcaaaaaggcggaggatgagaagctcgacaaggtgaaaattgccatttccaacaaggagtggctggagtacgcgcagacctccgtgaagcac

SEQ ID NO: 247 - DNA, 3711 bp, synthetic construct
  source 1..3711: mol_type = other DNA
cgcaccgagaaggagaacaaggagctggagaacctggagatcaacctccgcaaggaaatcgccaaagcgttcaagggcaatgaagggtacaagagcctcttcaagaaagacatcatcgaaactatcctcccagagtttctcgatgacaaggacgagatcgcgctggtgaactcctttaacgggttcacaaccgcgtttaccggcttctttgataacagggaaaatatgttctccgaggaggccaagtccaccagcatcgccttcaggtgtatcaacgagaacctcacccgctacatttccaatatggacattttcgagaaggtggatgcgatcttcgataagcacgaggtgcaggagatcaaagagaagattctcaattccgattatgacgtcgaggatttcttcgaaggggagttctttaattttgtgctcacacaagagggcattgacgtgtacaacgcgattatcgggggcttcgtcacagagtccggggagaagattaaggggctgaatgagtacatcaatctgtacaatcagaagaccaagcagaaactgccgaaattcaagccgctctacaagcaagtcctgtccgatagggaaagcctctccttctacggcgagggctataccagcgacgaggaggtgctggaagtcttccgcaacacactgaataagaatagcgagattttctcctccatcaagaagctcgagaagctctttaagaactttgacgagtacagctccgccgggattttcgtgaagaacgggccggcgatcagcaccatctccaaggacatctttggcgagtggaacgtcatcagggacaagtggaacgccgagtacgacgacatccacctgaagaagaaggcggtggtgaccgagaagtatgaggacgatcgcaggaagtccttcaaaaaaatcggctccttcagcctcgaacagctccaggagtatgccgatgcggatctgtccgtcgtcgagaagctgaaggaaatcatcattcagaaggtcgacgagatctataaagtgtacgggtccagcgagaagctgttcgacgccgactttgtgctcgagaagtccctcaaaaagaatgacgccgtggtggccattatgaaagacctgctcgactccgtgaagtccttcgaaaattacattaaagcgttctttggggaggggaaggaaactaacagggatgagtccttctatggcgactttgtcctcgcgtacgacatcctgctgaaggtcgaccacatttacgacgcgatccgcaactacgtgacacagaagccgtactccaaagacaagttcaagctgtacttccagaacccgcaatttatggggggctgggacaaggataaagagacagactaccgcgcgacaattctccgctatggctccaaatactatctggccatcatggacaagaagtacgcgaagtgcctgcagaagatcgacaaagacgacgtcaatggcaactatgaaaagatcaactacaagctgctgccgggcccgaacaagatgctcccgaaggtgttcttcagcaagaagtggatggcctactacaatccaagcgaggatattcagaaaatctataaaaacgggaccttcaagaagggggacatgtttaacctcaacgactgccacaagctcattgatttcttcaaggatagcatttcccgctacccgaaatggtccaatgcgtacgattttaacttctccgagacagaaaagtacaaagacatcgcgggcttttacagggaggtggaggagcaagggtataaagtttcttttgaatccgcgagcaagaaggaagtcgacaagctcgtcgaggagggcaagctctacatgttccaaatttataacaaggacttttccgacaagagccatgggaccccaaacctccacaccatgtacttcaaactgctctttgacgagaacaaccacgggcaaatcaggctgagcggcggcgccgaattattcatgcgcagggcctccctcaagaaggaagagctggtcgtccatccagccaattccccgatcgcgaacaagaacccggacaatccgaaaaagaccaccaccctgtcctacgacgtctacaaggacaaacgcttcagcgaagaccagtacgaattacacatcccaattgcgattaataagtgcccaaagaatatcttcaaaattaatacagaggtcagggtgctgctcaaacacgacgacaatccgtatgtcatcggcattgacaggggcgagcgcaatctgctctatatcgtggtcgtggatgggaagggcaatattgtggagcagtactccctgaacgagattatcaacaacttcaatgggattaggattaagaccgactatcacagcctgctcgacaagaaagaaaaagagaggtttgaggcccgccaaaactggacctccattgagaatatcaaagaattaaaggccggctatatttcccaagtcgtccacaagatctgcgagctggtggagaaatatgacgccgtgattgcgctcgaagacttaaattctgggttcaagaactcccgcgtgaaggtggaaaaacaggtgtatcagaaattcgagaaaatgctgatcgacaaactcaattatatggtggataagaagtccaacccgtgtgccacagggggcgcgctgaagggctatcagatcaccaacaagttcgagagcttcaagagcatgagcacccagaacgggtttattttctacatcccggcgtggctcacctccaagattgacccgagcaccggcttcgtgaacctcctgaagacaaagtatacctccattgccgacagcaagaagtttatctcctccttcgaccgcattatgtatgtgccggaggaggacctcttcgagttcgccctcgactacaaaaacttcagccgcacagatgcggattacatcaagaagtggaagctgtactcctacgggaacaggatccgcatcttcaggaatccaaaaaaaaataacgtctttgactgggaggaagtgtgcctgacatccgcctacaaggaactgttcaataaatacggcatcaattaccagcagggcgacattcgcgccctcctctgtgagcagtccgacaaagcgttttactccagcttcatggccctcatgtccctgatgctccaaatgaggaatagcatcacagggcgcaccgacgtcgacttcctcatcagcccggtgaagaactccgacgggatcttttacgactcccgcaactatgaggcgcaagagaatgcgatcctcccgaagaacgccgatgcgaacggggcctataatatcgccaggaaagtgctctgggccatcgggcagttcaaaaaggcggaggatgagaagctcgacaaggtgaaaattgccatttccaacaaggagtggctggagtacgcgcagacctccgtgaagcacggctcctctggcagctccggctctagcggctccaagctggagaagtttacaaactgttacagcctctccaaaaccctcaggtttaaagcgatcccggtgggcaagacccaggagaacatcgacaacaagaggctcctggtggaagacgagaagcgcgccgaagactacaagggcgtgaagaagctgctcgataggtactacctcagctttattaacgacgtgctgcacagcatcaaactcaagaatctcaacaactacatctccctcttccgcaaaaagacc

SEQ ID NO: 248 - DNA, 3729 bp, synthetic construct
  source 1..3729: mol_type = other DNA
cgcaccgagaaggagaacaaggagctggagaacctggagatcaacctccgcaaggaaatcgccaaagcgttcaagggcaatgaagggtacaagagcctcttcaagaaagacatcatcgaaactatcctcccagagtttctcgatgacaaggacgagatcgcgctggtgaactcctttaacgggttcacaaccgcgtttaccggcttctttgataacagggaaaatatgttctccgaggaggccaagtccaccagcatcgccttcaggtgtatcaacgagaacctcacccgctacatttccaatatggacattttcgagaaggtggatgcgatcttcgataagcacgaggtgcaggagatcaaagagaagattctcaattccgattatgacgtcgaggatttcttcgaaggggagttctttaattttgtgctcacacaagagggcattgacgtgtacaacgcgattatcgggggcttcgtcacagagtccggggagaagattaaggggctgaatgagtacatcaatctgtacaatcagaagaccaagcagaaactgccgaaattcaagccgctctacaagcaagtcctgtccgatagggaaagcctctccttctacggcgagggctataccagcgacgaggaggtgctggaagtcttccgcaacacactgaataagaatagcgagattttctcctccatcaagaagctcgagaagctctttaagaactttgacgagtacagctccgccgggattttcgtgaagaacgggccggcgatcagcaccatctccaaggacatctttggcgagtggaacgtcatcagggacaagtggaacgccgagtacgacgacatccacctgaagaagaaggcggtggtgaccgagaagtatgaggacgatcgcaggaagtccttcaaaaaaatcggctccttcagcctcgaacagctccaggagtatgccgatgcggatctgtccgtcgtcgagaagctgaaggaaatcatcattcagaaggtcgacgagatctataaagtgtacgggtccagcgagaagctgttcgacgccgactttgtgctcgagaagtccctcaaaaagaatgacgccgtggtggccattatgaaagacctgctcgactccgtgaagtccttcgaaaattacattaaagcgttctttggggaggggaaggaaactaacagggatgagtccttctatggcgactttgtcctcgcgtacgacatcctgctgaaggtcgaccacatttacgacgcgatccgcaactacgtgacacagaagccgtactccaaagacaagttcaagctgtacttccagaacccgcaatttatggggggctgggacaaggataaagagacagactaccgcgcgacaattctccgctatggctccaaatactatctggccatcatggacaagaagtacgcgaagtgcctgcagaagatcgacaaagacgacgtcaatggcaactatgaaaagatcaactacaagctgctgccgggcccgaacaagatgctcccgaaggtgttcttcagcaagaagtggatggcctactacaatccaagcgaggatattcagaaaatctataaaaacgggaccttcaagaagggggacatgtttaacctcaacgactgccacaagctcattgatttcttcaaggatagcatttcccgctacccgaaatggtccaatgcgtacgattttaacttctccgagacagaaaagtacaaagacatcgcgggcttttacagggaggtggaggagcaagggtataaagtttcttttgaatccgcgagcaagaaggaagtcgacaagctcgtcgaggagggcaagctctacatgttccaaatttataacaaggacttttccgacaagagccatgggaccccaaacctccacaccatgtacttcaaactgctctttgacgagaacaaccacgggcaaatcaggctgagcggcggcgccgaattattcatgcgcagggcctccctcaagaaggaagagctggtcgtccatccagccaattccccgatcgcgaacaagaacccggacaatccgaaaaagaccaccaccctgtcctacgacgtctacaaggacaaacgcttcagcgaagaccagtacgaattacacatcccaattgcgattaataagtgcccaaagaatatcttcaaaattaatacagaggtcagggtgctgctcaaacacgacgacaatccgtatgtcatcggcattgacaggggcgagcgcaatctgctctatatcgtggtcgtggatgggaagggcaatattgtggagcagtactccctgaacgagattatcaacaacttcaatgggattaggattaagaccgactatcacagcctgctcgacaagaaagaaaaagagaggtttgaggcccgccaaaactggacctccattgagaatatcaaagaattaaaggccggctatatttcccaagtcgtccacaagatctgcgagctggtggagaaatatgacgccgtgattgcgctcgaagacttaaattctgggttcaagaactcccgcgtgaaggtggaaaaacaggtgtatcagaaattcgagaaaatgctgatcgacaaactcaattatatggtggataagaagtccaacccgtgtgccacagggggcgcgctgaagggctatcagatcaccaacaagttcgagagcttcaagagcatgagcacccagaacgggtttattttctacatcccggcgtggctcacctccaagattgacccgagcaccggcttcgtgaacctcctgaagacaaagtatacctccattgccgacagcaagaagtttatctcctccttcgaccgcattatgtatgtgccggaggaggacctcttcgagttcgccctcgactacaaaaacttcagccgcacagatgcggattacatcaagaagtggaagctgtactcctacgggaacaggatccgcatcttcaggaatccaaaaaaaaataacgtctttgactgggaggaagtgtgcctgacatccgcctacaaggaactgttcaataaatacggcatcaattaccagcagggcgacattcgcgccctcctctgtgagcagtccgacaaagcgttttactccagcttcatggccctcatgtccctgatgctccaaatgaggaatagcatcacagggcgcaccgacgtcgacttcctcatcagcccggtgaagaactccgacgggatcttttacgactcccgcaactatgaggcgcaagagaatgcgatcctcccgaagaacgccgatgcgaacggggcctataatatcgccaggaaagtgctctgggccatcgggcagttcaaaaaggcggaggatgagaagctcgacaaggtgaaaattgccatttccaacaaggagtggctggagtacgcgcagacctccgtgaagcacggctcctctggcagctccggctctagcggctcctctggcagctccggctccaagctggagaagtttacaaactgttacagcctctccaaaaccctcaggtttaaagcgatcccggtgggcaagacccaggagaacatcgacaacaagaggctcctggtggaagacgagaagcgcgccgaagactacaagggcgtgaagaagctgctcgataggtactacctcagctttattaacgacgtgctgcacagcatcaaactcaagaatctcaacaactacatctccctcttccgcaaaaagacc

SEQ ID NO: 249 - DNA, 3711 bp, synthetic construct
  source 1..3711: mol_type = other DNA
ggctataccagcgacgaggaggtgctggaagtcttccgcaacacactgaataagaatagcgagattttctcctccatcaagaagctcgagaagctctttaagaactttgacgagtacagctccgccgggattttcgtgaagaacgggccggcgatcagcaccatctccaaggacatctttggcgagtggaacgtcatcagggacaagtggaacgccgagtacgacgacatccacctgaagaagaaggcggtggtgaccgagaagtatgaggacgatcgcaggaagtccttcaaaaaaatcggctccttcagcctcgaacagctccaggagtatgccgatgcggatctgtccgtcgtcgagaagctgaaggaaatcatcattcagaaggtcgacgagatctataaagtgtacgggtccagcgagaagctgttcgacgccgactttgtgctcgagaagtccctcaaaaagaatgacgccgtggtggccattatgaaagacctgctcgactccgtgaagtccttcgaaaattacattaaagcgttctttggggaggggaaggaaactaacagggatgagtccttctatggcgactttgtcctcgcgtacgacatcctgctgaaggtcgaccacatttacgacgcgatccgcaactacgtgacacagaagccgtactccaaagacaagttcaagctgtacttccagaacccgcaatttatggggggctgggacaaggataaagagacagactaccgcgcgacaattctccgctatggctccaaatactatctggccatcatggacaagaagtacgcgaagtgcctgcagaagatcgacaaagacgacgtcaatggcaactatgaaaagatcaactacaagctgctgccgggcccgaacaagatgctcccgaaggtgttcttcagcaagaagtggatggcctactacaatccaagcgaggatattcagaaaatctataaaaacgggaccttcaagaagggggacatgtttaacctcaacgactgccacaagctcattgatttcttcaaggatagcatttcccgctacccgaaatggtccaatgcgtacgattttaacttctccgagacagaaaagtacaaagacatcgcgggcttttacagggaggtggaggagcaagggtataaagtttcttttgaatccgcgagcaagaaggaagtcgacaagctcgtcgaggagggcaagctctacatgttccaaatttataacaaggacttttccgacaagagccatgggaccccaaacctccacaccatgtacttcaaactgctctttgacgagaacaaccacgggcaaatcaggctgagcggcggcgccgaattattcatgcgcagggcctccctcaagaaggaagagctggtcgtccatccagccaattccccgatcgcgaacaagaacccggacaatccgaaaaagaccaccaccctgtcctacgacgtctacaaggacaaacgcttcagcgaagaccagtacgaattacacatcccaattgcgattaataagtgcccaaagaatatcttcaaaattaatacagaggtcagggtgctgctcaaacacgacgacaatccgtatgtcatcggcattgacaggggcgagcgcaatctgctctatatcgtggtcgtggatgggaagggcaatattgtggagcagtactccctgaacgagattatcaacaacttcaatgggattaggattaagaccgactatcacagcctgctcgacaagaaagaaaaagagaggtttgaggcccgccaaaactggacctccattgagaatatcaaagaattaaaggccggctatatttcccaagtcgtccacaagatctgcgagctggtggagaaatatgacgccgtgattgcgctcgaagacttaaattctgggttcaagaactcccgcgtgaaggtggaaaaacaggtgtatcagaaattcgagaaaatgctgatcgacaaactcaattatatggtggataagaagtccaacccgtgtgccacagggggcgcgctgaagggctatcagatcaccaacaagttcgagagcttcaagagcatgagcacccagaacgggtttattttctacatcccggcgtggctcacctccaagattgacccgagcaccggcttcgtgaacctcctgaagacaaagtatacctccattgccgacagcaagaagtttatctcctccttcgaccgcattatgtatgtgccggaggaggacctcttcgagttcgccctcgactacaaaaacttcagccgcacagatgcggattacatcaagaagtggaagctgtactcctacgggaacaggatccgcatcttcaggaatccaaaaaaaaataacgtctttgactgggaggaagtgtgcctgacatccgcctacaaggaactgttcaataaatacggcatcaattaccagcagggcgacattcgcgccctcctctgtgagcagtccgacaaagcgttttactccagcttcatggccctcatgtccctgatgctccaaatgaggaatagcatcacagggcgcaccgacgtcgacttcctcatcagcccggtgaagaactccgacgggatcttttacgactcccgcaactatgaggcgcaagagaatgcgatcctcccgaagaacgccgatgcgaacggggcctataatatcgccaggaaagtgctctgggccatcgggcagttcaaaaaggcggaggatgagaagctcgacaaggtgaaaattgccatttccaacaaggagtggctggagtacgcgcagacctccgtgaagcacggctcctctggcagctccggctctagcggctccaagctggagaagtttacaaactgttacagcctctccaaaaccctcaggtttaaagcgatcccggtgggcaagacccaggagaacatcgacaacaagaggctcctggtggaagacgagaagcgcgccgaagactacaagggcgtgaagaagctgctcgataggtactacctcagctttattaacgacgtgctgcacagcatcaaactcaagaatctcaacaactacatctccctcttccgcaaaaagacccgcaccgagaaggagaacaaggagctggagaacctggagatcaacctccgcaaggaaatcgccaaagcgttcaagggcaatgaagggtacaagagcctcttcaagaaagacatcatcgaaactatcctcccagagtttctcgatgacaaggacgagatcgcgctggtgaactcctttaacgggttcacaaccgcgtttaccggcttctttgataacagggaaaatatgttctccgaggaggccaagtccaccagcatcgccttcaggtgtatcaacgagaacctcacccgctacatttccaatatggacattttcgagaaggtggatgcgatcttcgataagcacgaggtgcaggagatcaaagagaagattctcaattccgattatgacgtcgaggatttcttcgaaggggagttctttaattttgtgctcacacaagagggcattgacgtgtacaacgcgattatcgggggcttcgtcacagagtccggggagaagattaaggggctgaatgagtacatcaatctgtacaatcagaagaccaagcagaaactgccgaaattcaagccgctctacaagcaagtcctgtccgatagggaaagcctctccttctacggcgag

SEQ ID NO: 250 - DNA, 3729 bp, synthetic construct
  source 1..3729: mol_type = other DNA
ggctataccagcgacgaggaggtgctggaagtcttccgcaacacactgaataagaatagcgagattttctcctccatcaagaagctcgagaagctctttaagaactttgacgagtacagctccgccgggattttcgtgaagaacgggccggcgatcagcaccatctccaaggacatctttggcgagtggaacgtcatcagggacaagtggaacgccgagtacgacgacatccacctgaagaagaaggcggtggtgaccgagaagtatgaggacgatcgcaggaagtccttcaaaaaaatcggctccttcagcctcgaacagctccaggagtatgccgatgcggatctgtccgtcgtcgagaagctgaaggaaatcatcattcagaaggtcgacgagatctataaagtgtacgggtccagcgagaagctgttcgacgccgactttgtgctcgagaagtccctcaaaaagaatgacgccgtggtggccattatgaaagacctgctcgactccgtgaagtccttcgaaaattacattaaagcgttctttggggaggggaaggaaactaacagggatgagtccttctatggcgactttgtcctcgcgtacgacatcctgctgaaggtcgaccacatttacgacgcgatccgcaactacgtgacacagaagccgtactccaaagacaagttcaagctgtacttccagaacccgcaatttatggggggctgggacaaggataaagagacagactaccgcgcgacaattctccgctatggctccaaatactatctggccatcatggacaagaagtacgcgaagtgcctgcagaagatcgacaaagacgacgtcaatggcaactatgaaaagatcaactacaagctgctgccgggcccgaacaagatgctcccgaaggtgttcttcagcaagaagtggatggcctactacaatccaagcgaggatattcagaaaatctataaaaacgggaccttcaagaagggggacatgtttaacctcaacgactgccacaagctcattgatttcttcaaggatagcatttcccgctacccgaaatggtccaatgcgtacgattttaacttctccgagacagaaaagtacaaagacatcgcgggcttttacagggaggtggaggagcaagggtataaagtttcttttgaatccgcgagcaagaaggaagtcgacaagctcgtcgaggagggcaagctctacatgttccaaatttataacaaggacttttccgacaagagccatgggaccccaaacctccacaccatgtacttcaaactgctctttgacgagaacaaccacgggcaaatcaggctgagcggcggcgccgaattattcatgcgcagggcctccctcaagaaggaagagctggtcgtccatccagccaattccccgatcgcgaacaagaacccggacaatccgaaaaagaccaccaccctgtcctacgacgtctacaaggacaaacgcttcagcgaagaccagtacgaattacacatcccaattgcgattaataagtgcccaaagaatatcttcaaaattaatacagaggtcagggtgctgctcaaacacgacgacaatccgtatgtcatcggcattgacaggggcgagcgcaatctgctctatatcgtggtcgtggatgggaagggcaatattgtggagcagtactccctgaacgagattatcaacaacttcaatgggattaggattaagaccgactatcacagcctgctcgacaagaaagaaaaagagaggtttgaggcccgccaaaactggacctccattgagaatatcaaagaattaaaggccggctatatttcccaagtcgtccacaagatctgcgagctggtggagaaatatgacgccgtgattgcgctcgaagacttaaattctgggttcaagaactcccgcgtgaaggtggaaaaacaggtgtatcagaaattcgagaaaatgctgatcgacaaactcaattatatggtggataagaagtccaacccgtgtgccacagggggcgcgctgaagggctatcagatcaccaacaagttcgagagcttcaagagcatgagcacccagaacgggtttattttctacatcccggcgtggctcacctccaagattgacccgagcaccggcttcgtgaacctcctgaagacaaagtatacctccattgccgacagcaagaagtttatctcctccttcgaccgcattatgtatgtgccggaggaggacctcttcgagttcgccctcgactacaaaaacttcagccgcacagatgcggattacatcaagaagtggaagctgtactcctacgggaacaggatccgcatcttcaggaatccaaaaaaaaataacgtctttgactgggaggaagtgtgcctgacatccgcctacaaggaactgttcaataaatacggcatcaattaccagcagggcgacattcgcgccctcctctgtgagcagtccgacaaagcgttttactccagcttcatggccctcatgtccctgatgctccaaatgaggaatagcatcacagggcgcaccgacgtcgacttcctcatcagcccggtgaagaactccgacgggatcttttacgactcccgcaactatgaggcgcaagagaatgcgatcctcccgaagaacgccgatgcgaacggggcctataatatcgccaggaaagtgctctgggccatcgggcagttcaaaaaggcggaggatgagaagctcgacaaggtgaaaattgccatttccaacaaggagtggctggagtacgcgcagacctccgtgaagcacggctcctctggcagctccggctctagcggctcctctggcagctccggctccaagctggagaagtttacaaactgttacagcctctccaaaaccctcaggtttaaagcgatcccggtgggcaagacccaggagaacatcgacaacaagaggctcctggtggaagacgagaagcgcgccgaagactacaagggcgtgaagaagctgctcgataggtactacctcagctttattaacgacgtgctgcacagcatcaaactcaagaatctcaacaactacatctccctcttccgcaaaaagacccgcaccgagaaggagaacaaggagctggagaacctggagatcaacctccgcaaggaaatcgccaaagcgttcaagggcaatgaagggtacaagagcctcttcaagaaagacatcatcgaaactatcctcccagagtttctcgatgacaaggacgagatcgcgctggtgaactcctttaacgggttcacaaccgcgtttaccggcttctttgataacagggaaaatatgttctccgaggaggccaagtccaccagcatcgccttcaggtgtatcaacgagaacctcacccgctacatttccaatatggacattttcgagaaggtggatgcgatcttcgataagcacgaggtgcaggagatcaaagagaagattctcaattccgattatgacgtcgaggatttcttcgaaggggagttctttaattttgtgctcacacaagagggcattgacgtgtacaacgcgattatcgggggcttcgtcacagagtccggggagaagattaaggggctgaatgagtacatcaatctgtacaatcagaagaccaagcagaaactgccgaaattcaagccgctctacaagcaagtcctgtccgatagggaaagcctctccttctacggcgag

SEQ ID NO: 251 - DNA, 3711 bp, synthetic construct
  source 1..3711: mol_type = other DNA
tccgacgggatcttttacgactcccgcaactatgaggcgcaagagaatgcgatcctcccgaagaacgccgatgcgaacggggcctataatatcgccaggaaagtgctctgggccatcgggcagttcaaaaaggcggaggatgagaagctcgacaaggtgaaaattgccatttccaacaaggagtggctggagtacgcgcagacctccgtgaagcacggctcctctggcagctccggctctagcggctccaagctggagaagtttacaaactgttacagcctctccaaaaccctcaggtttaaagcgatcccggtgggcaagacccaggagaacatcgacaacaagaggctcctggtggaagacgagaagcgcgccgaagactacaagggcgtgaagaagctgctcgataggtactacctcagctttattaacgacgtgctgcacagcatcaaactcaagaatctcaacaactacatctccctcttccgcaaaaagacccgcaccgagaaggagaacaaggagctggagaacctggagatcaacctccgcaaggaaatcgccaaagcgttcaagggcaatgaagggtacaagagcctcttcaagaaagacatcatcgaaactatcctcccagagtttctcgatgacaaggacgagatcgcgctggtgaactcctttaacgggttcacaaccgcgtttaccggcttctttgataacagggaaaatatgttctccgaggaggccaagtccaccagcatcgccttcaggtgtatcaacgagaacctcacccgctacatttccaatatggacattttcgagaaggtggatgcgatcttcgataagcacgaggtgcaggagatcaaagagaagattctcaattccgattatgacgtcgaggatttcttcgaaggggagttctttaattttgtgctcacacaagagggcattgacgtgtacaacgcgattatcgggggcttcgtcacagagtccggggagaagattaaggggctgaatgagtacatcaatctgtacaatcagaagaccaagcagaaactgccgaaattcaagccgctctacaagcaagtcctgtccgatagggaaagcctctccttctacggcgagggctataccagcgacgaggaggtgctggaagtcttccgcaacacactgaataagaatagcgagattttctcctccatcaagaagctcgagaagctctttaagaactttgacgagtacagctccgccgggattttcgtgaagaacgggccggcgatcagcaccatctccaaggacatctttggcgagtggaacgtcatcagggacaagtggaacgccgagtacgacgacatccacctgaagaagaaggcggtggtgaccgagaagtatgaggacgatcgcaggaagtccttcaaaaaaatcggctccttcagcctcgaacagctccaggagtatgccgatgcggatctgtccgtcgtcgagaagctgaaggaaatcatcattcagaaggtcgacgagatctataaagtgtacgggtccagcgagaagctgttcgacgccgactttgtgctcgagaagtccctcaaaaagaatgacgccgtggtggccattatgaaagacctgctcgactccgtgaagtccttcgaaaattacattaaagcgttctttggggaggggaaggaaactaacagggatgagtccttctatggcgactttgtcctcgcgtacgacatcctgctgaaggtcgaccacatttacgacgcgatccgcaactacgtgacacagaagccgtactccaaagacaagttcaagctgtacttccagaacccgcaatttatggggggctgggacaaggataaagagacagactaccgcgcgacaattctccgctatggctccaaatactatctggccatcatggacaagaagtacgcgaagtgcctgcagaagatcgacaaagacgacgtcaatggcaactatgaaaagatcaactacaagctgctgccgggcccgaacaagatgctcccgaaggtgttcttcagcaagaagtggatggcctactacaatccaagcgaggatattcagaaaatctataaaaacgggaccttcaagaagggggacatgtttaacctcaacgactgccacaagctcattgatttcttcaaggatagcatttcccgctacccgaaatggtccaatgcgtacgattttaacttctccgagacagaaaagtacaaagacatcgcgggcttttacagggaggtggaggagcaagggtataaagtttcttttgaatccgcgagcaagaaggaagtcgacaagctcgtcgaggagggcaagctctacatgttccaaatttataacaaggacttttccgacaagagccatgggaccccaaacctccacaccatgtacttcaaactgctctttgacgagaacaaccacgggcaaatcaggctgagcggcggcgccgaattattcatgcgcagggcctccctcaagaaggaagagctggtcgtccatccagccaattccccgatcgcgaacaagaacccggacaatccgaaaaagaccaccaccctgtcctacgacgtctacaaggacaaacgcttcagcgaagaccagtacgaattacacatcccaattgcgattaataagtgcccaaagaatatcttcaaaattaatacagaggtcagggtgctgctcaaacacgacgacaatccgtatgtcatcggcattgacaggggcgagcgcaatctgctctatatcgtggtcgtggatgggaagggcaatattgtggagcagtactccctgaacgagattatcaacaacttcaatgggattaggattaagaccgactatcacagcctgctcgacaagaaagaaaaagagaggtttgaggcccgccaaaactggacctccattgagaatatcaaagaattaaaggccggctatatttcccaagtcgtccacaagatctgcgagctggtggagaaatatgacgccgtgattgcgctcgaagacttaaattctgggttcaagaactcccgcgtgaaggtggaaaaacaggtgtatcagaaattcgagaaaatgctgatcgacaaactcaattatatggtggataagaagtccaacccgtgtgccacagggggcgcgctgaagggctatcagatcaccaacaagttcgagagcttcaagagcatgagcacccagaacgggtttattttctacatcccggcgtggctcacctccaagattgacccgagcaccggcttcgtgaacctcctgaagacaaagtatacctccattgccgacagcaagaagtttatctcctccttcgaccgcattatgtatgtgccggaggaggacctcttcgagttcgccctcgactacaaaaacttcagccgcacagatgcggattacatcaagaagtggaagctgtactcctacgggaacaggatccgcatcttcaggaatccaaaaaaaaataacgtctttgactgggaggaagtgtgcctgacatccgcctacaaggaactgttcaataaatacggcatcaattaccagcagggcgacattcgcgccctcctctgtgagcagtccgacaaagcgttttactccagcttcatggccctcatgtccctgatgctccaaatgaggaatagcatcacagggcgcaccgacgtcgacttcctcatcagcccggtgaagaac

SEQ ID NO: 252 - DNA, 3729 bp, synthetic construct
  source 1..3729: mol_type = other DNA
tccgacgggatcttttacgactcccgcaactatgaggcgcaagagaatgcgatcctcccgaagaacgccgatgcgaacggggcctataatatcgccaggaaagtgctctgggccatcgggcagttcaaaaaggcggaggatgagaagctcgacaaggtgaaaattgccatttccaacaaggagtggctggagtacgcgcagacctccgtgaagcacggctcctctggcagctccggctctagcggctcctctggcagctccggctccaagctggagaagtttacaaactgttacagcctctccaaaaccctcaggtttaaagcgatcccggtgggcaagacccaggagaacatcgacaacaagaggctcctggtggaagacgagaagcgcgccgaagactacaagggcgtgaagaagctgctcgataggtactacctcagctttattaacgacgtgctgcacagcatcaaactcaagaatctcaacaactacatctccctcttccgcaaaaagacccgcaccgagaaggagaacaaggagctggagaacctggagatcaacctccgcaaggaaatcgccaaagcgttcaagggcaatgaagggtacaagagcctcttcaagaaagacatcatcgaaactatcctcccagagtttctcgatgacaaggacgagatcgcgctggtgaactcctttaacgggttcacaaccgcgtttaccggcttctttgataacagggaaaatatgttctccgaggaggccaagtccaccagcatcgccttcaggtgtatcaacgagaacctcacccgctacatttccaatatggacattttcgagaaggtggatgcgatcttcgataagcacgaggtgcaggagatcaaagagaagattctcaattccgattatgacgtcgaggatttcttcgaaggggagttctttaattttgtgctcacacaagagggcattgacgtgtacaacgcgattatcgggggcttcgtcacagagtccggggagaagattaaggggctgaatgagtacatcaatctgtacaatcagaagaccaagcagaaactgccgaaattcaagccgctctacaagcaagtcctgtccgatagggaaagcctctccttctacggcgagggctataccagcgacgaggaggtgctggaagtcttccgcaacacactgaataagaatagcgagattttctcctccatcaagaagctcgagaagctctttaagaactttgacgagtacagctccgccgggattttcgtgaagaacgggccggcgatcagcaccatctccaaggacatctttggcgagtggaacgtcatcagggacaagtggaacgccgagtacgacgacatccacctgaagaagaaggcggtggtgaccgagaagtatgaggacgatcgcaggaagtccttcaaaaaaatcggctccttcagcctcgaacagctccaggagtatgccgatgcggatctgtccgtcgtcgagaagctgaaggaaatcatcattcagaaggtcgacgagatctataaagtgtacgggtccagcgagaagctgttcgacgccgactttgtgctcgagaagtccctcaaaaagaatgacgccgtggtggccattatgaaagacctgctcgactccgtgaagtccttcgaaaattacattaaagcgttctttggggaggggaaggaaactaacagggatgagtccttctatggcgactttgtcctcgcgtacgacatcctgctgaaggtcgaccacatttacgacgcgatccgcaactacgtgacacagaagccgtactccaaagacaagttcaagctgtacttccagaacccgcaatttatggggggctgggacaaggataaagagacagactaccgcgcgacaattctccgctatggctccaaatactatctggccatcatggacaagaagtacgcgaagtgcctgcagaagatcgacaaagacgacgtcaatggcaactatgaaaagatcaactacaagctgctgccgggcccgaacaagatgctcccgaaggtgttcttcagcaagaagtggatggcctactacaatccaagcgaggatattcagaaaatctataaaaacgggaccttcaagaagggggacatgtttaacctcaacgactgccacaagctcattgatttcttcaaggatagcatttcccgctacccgaaatggtccaatgcgtacgattttaacttctccgagacagaaaagtacaaagacatcgcgggcttttacagggaggtggaggagcaagggtataaagtttcttttgaatccgcgagcaagaaggaagtcgacaagctcgtcgaggagggcaagctctacatgttccaaatttataacaaggacttttccgacaagagccatgggaccccaaacctccacaccatgtacttcaaactgctctttgacgagaacaaccacgggcaaatcaggctgagcggcggcgccgaattattcatgcgcagggcctccctcaagaaggaagagctggtcgtccatccagccaattccccgatcgcgaacaagaacccggacaatccgaaaaagaccaccaccctgtcctacgacgtctacaaggacaaacgcttcagcgaagaccagtacgaattacacatcccaattgcgattaataagtgcccaaagaatatcttcaaaattaatacagaggtcagggtgctgctcaaacacgacgacaatccgtatgtcatcggcattgacaggggcgagcgcaatctgctctatatcgtggtcgtggatgggaagggcaatattgtggagcagtactccctgaacgagattatcaacaacttcaatgggattaggattaagaccgactatcacagcctgctcgacaagaaagaaaaagagaggtttgaggcccgccaaaactggacctccattgagaatatcaaagaattaaaggccggctatatttcccaagtcgtccacaagatctgcgagctggtggagaaatatgacgccgtgattgcgctcgaagacttaaattctgggttcaagaactcccgcgtgaaggtggaaaaacaggtgtatcagaaattcgagaaaatgctgatcgacaaactcaattatatggtggataagaagtccaacccgtgtgccacagggggcgcgctgaagggctatcagatcaccaacaagttcgagagcttcaagagcatgagcacccagaacgggtttattttctacatcccggcgtggctcacctccaagattgacccgagcaccggcttcgtgaacctcctgaagacaaagtatacctccattgccgacagcaagaagtttatctcctccttcgaccgcattatgtatgtgccggaggaggacctcttcgagttcgccctcgactacaaaaacttcagccgcacagatgcggattacatcaagaagtggaagctgtactcctacgggaacaggatccgcatcttcaggaatccaaaaaaaaataacgtctttgactgggaggaagtgtgcctgacatccgcctacaaggaactgttcaataaatacggcatcaattaccagcagggcgacattcgcgccctcctctgtgagcagtccgacaaagcgttttactccagcttcatggccctcatgtccctgatgctccaaatgaggaatagcatcacagggcgcaccgacgtcgacttcctcatcagcccggtgaagaac

SEQ ID NO: 253 - DNA, 3711 bp, synthetic construct
  source 1..3711: mol_type = other DNA
aaagacaagttcaagctgtacttccagaacccgcaatttatggggggctgggacaaggataaagagacagactaccgcgcgacaattctccgctatggctccaaatactatctggccatcatggacaagaagtacgcgaagtgcctgcagaagatcgacaaagacgacgtcaatggcaactatgaaaagatcaactacaagctgctgccgggcccgaacaagatgctcccgaaggtgttcttcagcaagaagtggatggcctactacaatccaagcgaggatattcagaaaatctataaaaacgggaccttcaagaagggggacatgtttaacctcaacgactgccacaagctcattgatttcttcaaggatagcatttcccgctacccgaaatggtccaatgcgtacgattttaacttctccgagacagaaaagtacaaagacatcgcgggcttttacagggaggtggaggagcaagggtataaagtttcttttgaatccgcgagcaagaaggaagtcgacaagctcgtcgaggagggcaagctctacatgttccaaatttataacaaggacttttccgacaagagccatgggaccccaaacctccacaccatgtacttcaaactgctctttgacgagaacaaccacgggcaaatcaggctgagcggcggcgccgaattattcatgcgcagggcctccctcaagaaggaagagctggtcgtccatccagccaattccccgatcgcgaacaagaacccggacaatccgaaaaagaccaccaccctgtcctacgacgtctacaaggacaaacgcttcagcgaagaccagtacgaattacacatcccaattgcgattaataagtgcccaaagaatatcttcaaaattaatacagaggtcagggtgctgctcaaacacgacgacaatccgtatgtcatcggcattgacaggggcgagcgcaatctgctctatatcgtggtcgtggatgggaagggcaatattgtggagcagtactccctgaacgagattatcaacaacttcaatgggattaggattaagaccgactatcacagcctgctcgacaagaaagaaaaagagaggtttgaggcccgccaaaactggacctccattgagaatatcaaagaattaaaggccggctatatttcccaagtcgtccacaagatctgcgagctggtggagaaatatgacgccgtgattgcgctcgaagacttaaattctgggttcaagaactcccgcgtgaaggtggaaaaacaggtgtatcagaaattcgagaaaatgctgatcgacaaactcaattatatggtggataagaagtccaacccgtgtgccacagggggcgcgctgaagggctatcagatcaccaacaagttcgagagcttcaagagcatgagcacccagaacgggtttattttctacatcccggcgtggctcacctccaagattgacccgagcaccggcttcgtgaacctcctgaagacaaagtatacctccattgccgacagcaagaagtttatctcctccttcgaccgcattatgtatgtgccggaggaggacctcttcgagttcgccctcgactacaaaaacttcagccgcacagatgcggattacatcaagaagtggaagctgtactcctacgggaacaggatccgcatcttcaggaatccaaaaaaaaataacgtctttgactgggaggaagtgtgcctgacatccgcctacaaggaactgttcaataaatacggcatcaattaccagcagggcgacattcgcgccctcctctgtgagcagtccgacaaagcgttttactccagcttcatggccctcatgtccctgatgctccaaatgaggaatagcatcacagggcgcaccgacgtcgacttcctcatcagcccggtgaagaactccgacgggatcttttacgactcccgcaactatgaggcgcaagagaatgcgatcctcccgaagaacgccgatgcgaacggggcctataatatcgccaggaaagtgctctgggccatcgggcagttcaaaaaggcggaggatgagaagctcgacaaggtgaaaattgccatttccaacaaggagtggctggagtacgcgcagacctccgtgaagcacggctcctctggcagctccggctctagcggctccaagctggagaagtttacaaactgttacagcctctccaaaaccctcaggtttaaagcgatcccggtgggcaagacccaggagaacatcgacaacaagaggctcctggtggaagacgagaagcgcgccgaagactacaagggcgtgaagaagctgctcgataggtactacctcagctttattaacgacgtgctgcacagcatcaaactcaagaatctcaacaactacatctccctcttccgcaaaaagacccgcaccgagaaggagaacaaggagctggagaacctggagatcaacctccgcaaggaaatcgccaaagcgttcaagggcaatgaagggtacaagagcctcttcaagaaagacatcatcgaaactatcctcccagagtttctcgatgacaaggacgagatcgcgctggtgaactcctttaacgggttcacaaccgcgtttaccggcttctttgataacagggaaaatatgttctccgaggaggccaagtccaccagcatcgccttcaggtgtatcaacgagaacctcacccgctacatttccaatatggacattttcgagaaggtggatgcgatcttcgataagcacgaggtgcaggagatcaaagagaagattctcaattccgattatgacgtcgaggatttcttcgaaggggagttctttaattttgtgctcacacaagagggcattgacgtgtacaacgcgattatcgggggcttcgtcacagagtccggggagaagattaaggggctgaatgagtacatcaatctgtacaatcagaagaccaagcagaaactgccgaaattcaagccgctctacaagcaagtcctgtccgatagggaaagcctctccttctacggcgagggctataccagcgacgaggaggtgctggaagtcttccgcaacacactgaataagaatagcgagattttctcctccatcaagaagctcgagaagctctttaagaactttgacgagtacagctccgccgggattttcgtgaagaacgggccggcgatcagcaccatctccaaggacatctttggcgagtggaacgtcatcagggacaagtggaacgccgagtacgacgacatccacctgaagaagaaggcggtggtgaccgagaagtatgaggacgatcgcaggaagtccttcaaaaaaatcggctccttcagcctcgaacagctccaggagtatgccgatgcggatctgtccgtcgtcgagaagctgaaggaaatcatcattcagaaggtcgacgagatctataaagtgtacgggtccagcgagaagctgttcgacgccgactttgtgctcgagaagtccctcaaaaagaatgacgccgtggtggccattatgaaagacctgctcgactccgtgaagtccttcgaaaattacattaaagcgttctttggggaggggaaggaaactaacagggatgagtccttctatggcgactttgtcctcgcgtacgacatcctgctgaaggtcgaccacatttacgacgcgatccgcaactacgtgacacagaagccgtactcc

SEQ ID NO: 254 - DNA, 3729 bp, synthetic construct
  source 1..3729: mol_type = other DNA
aaagacaagttcaagctgtacttccagaacccgcaatttatggggggctgggacaaggataaagagacagactaccgcgcgacaattctccgctatggctccaaatactatctggccatcatggacaagaagtacgcgaagtgcctgcagaagatcgacaaagacgacgtcaatggcaactatgaaaagatcaactacaagctgctgccgggcccgaacaagatgctcccgaaggtgttcttcagcaagaagtggatggcctactacaatccaagcgaggatattcagaaaatctataaaaacgggaccttcaagaagggggacatgtttaacctcaacgactgccacaagctcattgatttcttcaaggatagcatttcccgctacccgaaatggtccaatgcgtacgattttaacttctccgagacagaaaagtacaaagacatcgcgggcttttacagggaggtggaggagcaagggtataaagtttcttttgaatccgcgagcaagaaggaagtcgacaagctcgtcgaggagggcaagctctacatgttccaaatttataacaaggacttttccgacaagagccatgggaccccaaacctccacaccatgtacttcaaactgctctttgacgagaacaaccacgggcaaatcaggctgagcggcggcgccgaattattcatgcgcagggcctccctcaagaaggaagagctggtcgtccatccagccaattccccgatcgcgaacaagaacccggacaatccgaaaaagaccaccaccctgtcctacgacgtctacaaggacaaacgcttcagcgaagaccagtacgaattacacatcccaattgcgattaataagtgcccaaagaatatcttcaaaattaatacagaggtcagggtgctgctcaaacacgacgacaatccgtatgtcatcggcattgacaggggcgagcgcaatctgctctatatcgtggtcgtggatgggaagggcaatattgtggagcagtactccctgaacgagattatcaacaacttcaatgggattaggattaagaccgactatcacagcctgctcgacaagaaagaaaaagagaggtttgaggcccgccaaaactggacctccattgagaatatcaaagaattaaaggccggctatatttcccaagtcgtccacaagatctgcgagctggtggagaaatatgacgccgtgattgcgctcgaagacttaaattctgggttcaagaactcccgcgtgaaggtggaaaaacaggtgtatcagaaattcgagaaaatgctgatcgacaaactcaattatatggtggataagaagtccaacccgtgtgccacagggggcgcgctgaagggctatcagatcaccaacaagttcgagagcttcaagagcatgagcacccagaacgggtttattttctacatcccggcgtggctcacctccaagattgacccgagcaccggcttcgtgaacctcctgaagacaaagtatacctccattgccgacagcaagaagtttatctcctccttcgaccgcattatgtatgtgccggaggaggacctcttcgagttcgccctcgactacaaaaacttcagccgcacagatgcggattacatcaagaagtggaagctgtactcctacgggaacaggatccgcatcttcaggaatccaaaaaaaaataacgtctttgactgggaggaagtgtgcctgacatccgcctacaaggaactgttcaataaatacggcatcaattaccagcagggcgacattcgcgccctcctctgtgagcagtccgacaaagcgttttactccagcttcatggccctcatgtccctgatgctccaaatgaggaatagcatcacagggcgcaccgacgtcgacttcctcatcagcccggtgaagaactccgacgggatcttttacgactcccgcaactatgaggcgcaagagaatgcgatcctcccgaagaacgccgatgcgaacggggcctataatatcgccaggaaagtgctctgggccatcgggcagttcaaaaaggcggaggatgagaagctcgacaaggtgaaaattgccatttccaacaaggagtggctggagtacgcgcagacctccgtgaagcacggctcctctggcagctccggctctagcggctcctctggcagctccggctccaagctggagaagtttacaaactgttacagcctctccaaaaccctcaggtttaaagcgatcccggtgggcaagacccaggagaacatcgacaacaagaggctcctggtggaagacgagaagcgcgccgaagactacaagggcgtgaagaagctgctcgataggtactacctcagctttattaacgacgtgctgcacagcatcaaactcaagaatctcaacaactacatctccctcttccgcaaaaagacccgcaccgagaaggagaacaaggagctggagaacctggagatcaacctccgcaaggaaatcgccaaagcgttcaagggcaatgaagggtacaagagcctcttcaagaaagacatcatcgaaactatcctcccagagtttctcgatgacaaggacgagatcgcgctggtgaactcctttaacgggttcacaaccgcgtttaccggcttctttgataacagggaaaatatgttctccgaggaggccaagtccaccagcatcgccttcaggtgtatcaacgagaacctcacccgctacatttccaatatggacattttcgagaaggtggatgcgatcttcgataagcacgaggtgcaggagatcaaagagaagattctcaattccgattatgacgtcgaggatttcttcgaaggggagttctttaattttgtgctcacacaagagggcattgacgtgtacaacgcgattatcgggggcttcgtcacagagtccggggagaagattaaggggctgaatgagtacatcaatctgtacaatcagaagaccaagcagaaactgccgaaattcaagccgctctacaagcaagtcctgtccgatagggaaagcctctccttctacggcgagggctataccagcgacgaggaggtgctggaagtcttccgcaacacactgaataagaatagcgagattttctcctccatcaagaagctcgagaagctctttaagaactttgacgagtacagctccgccgggattttcgtgaagaacgggccggcgatcagcaccatctccaaggacatctttggcgagtggaacgtcatcagggacaagtggaacgccgagtacgacgacatccacctgaagaagaaggcggtggtgaccgagaagtatgaggacgatcgcaggaagtccttcaaaaaaatcggctccttcagcctcgaacagctccaggagtatgccgatgcggatctgtccgtcgtcgagaagctgaaggaaatcatcattcagaaggtcgacgagatctataaagtgtacgggtccagcgagaagctgttcgacgccgactttgtgctcgagaagtccctcaaaaagaatgacgccgtggtggccattatgaaagacctgctcgactccgtgaagtccttcgaaaattacattaaagcgttctttggggaggggaaggaaactaacagggatgagtccttctatggcgactttgtcctcgcgtacgacatcctgctgaaggtcgaccacatttacgacgcgatccgcaactacgtgacacagaagccgtactcc

SEQ ID NO: 255 - DNA, 3711 bp, synthetic construct
  source 1..3711: mol_type = other DNA
aagtccctcaaaaagaatgacgccgtggtggccattatgaaagacctgctcgactccgtgaagtccttcgaaaattacattaaagcgttctttggggaggggaaggaaactaacagggatgagtccttctatggcgactttgtcctcgcgtacgacatcctgctgaaggtcgaccacatttacgacgcgatccgcaactacgtgacacagaagccgtactccaaagacaagttcaagctgtacttccagaacccgcaatttatggggggctgggacaaggataaagagacagactaccgcgcgacaattctccgctatggctccaaatactatctggccatcatggacaagaagtacgcgaagtgcctgcagaagatcgacaaagacgacgtcaatggcaactatgaaaagatcaactacaagctgctgccgggcccgaacaagatgctcccgaaggtgttcttcagcaagaagtggatggcctactacaatccaagcgaggatattcagaaaatctataaaaacgggaccttcaagaagggggacatgtttaacctcaacgactgccacaagctcattgatttcttcaaggatagcatttcccgctacccgaaatggtccaatgcgtacgattttaacttctccgagacagaaaagtacaaagacatcgcgggcttttacagggaggtggaggagcaagggtataaagtttcttttgaatccgcgagcaagaaggaagtcgacaagctcgtcgaggagggcaagctctacatgttccaaatttataacaaggacttttccgacaagagccatgggaccccaaacctccacaccatgtacttcaaactgctctttgacgagaacaaccacgggcaaatcaggctgagcggcggcgccgaattattcatgcgcagggcctccctcaagaaggaagagctggtcgtccatccagccaattccccgatcgcgaacaagaacccggacaatccgaaaaagaccaccaccctgtcctacgacgtctacaaggacaaacgcttcagcgaagaccagtacgaattacacatcccaattgcgattaataagtgcccaaagaatatcttcaaaattaatacagaggtcagggtgctgctcaaacacgacgacaatccgtatgtcatcggcattgacaggggcgagcgcaatctgctctatatcgtggtcgtggatgggaagggcaatattgtggagcagtactccctgaacgagattatcaacaacttcaatgggattaggattaagaccgactatcacagcctgctcgacaagaaagaaaaagagaggtttgaggcccgccaaaactggacctccattgagaatatcaaagaattaaaggccggctatatttcccaagtcgtccacaagatctgcgagctggtggagaaatatgacgccgtgattgcgctcgaagacttaaattctgggttcaagaactcccgcgtgaaggtggaaaaacaggtgtatcagaaattcgagaaaatgctgatcgacaaactcaattatatggtggataagaagtccaacccgtgtgccacagggggcgcgctgaagggctatcagatcaccaacaagttcgagagcttcaagagcatgagcacccagaacgggtttattttctacatcccggcgtggctcacctccaagattgacccgagcaccggcttcgtgaacctcctgaagacaaagtatacctccattgccgacagcaagaagtttatctcctccttcgaccgcattatgtatgtgccggaggaggacctcttcgagttcgccctcgactacaaaaacttcagccgcacagatgcggattacatcaagaagtggaagctgtactcctacgggaacaggatccgcatcttcaggaatccaaaaaaaaataacgtctttgactgggaggaagtgtgcctgacatccgcctacaaggaactgttcaataaatacggcatcaattaccagcagggcgacattcgcgccctcctctgtgagcagtccgacaaagcgttttactccagcttcatggccctcatgtccctgatgctccaaatgaggaatagcatcacagggcgcaccgacgtcgacttcctcatcagcccggtgaagaactccgacgggatcttttacgactcccgcaactatgaggcgcaagagaatgcgatcctcccgaagaacgccgatgcgaacggggcctataatatcgccaggaaagtgctctgggccatcgggcagttcaaaaaggcggaggatgagaagctcgacaaggtgaaaattgccatttccaacaaggagtggctggagtacgcgcagacctccgtgaagcacggctcctctggcagctccggctctagcggctccaagctggagaagtttacaaactgttacagcctctccaaaaccctcaggtttaaagcgatcccggtgggcaagacccaggagaacatcgacaacaagaggctcctggtggaagacgagaagcgcgccgaagactacaagggcgtgaagaagctgctcgataggtactacctcagctttattaacgacgtgctgcacagcatcaaactcaagaatctcaacaactacatctccctcttccgcaaaaagacccgcaccgagaaggagaacaaggagctggagaacctggagatcaacctccgcaaggaaatcgccaaagcgttcaagggcaatgaagggtacaagagcctcttcaagaaagacatcatcgaaactatcctcccagagtttctcgatgacaaggacgagatcgcgctggtgaactcctttaacgggttcacaaccgcgtttaccggcttctttgataacagggaaaatatgttctccgaggaggccaagtccaccagcatcgccttcaggtgtatcaacgagaacctcacccgctacatttccaatatggacattttcgagaaggtggatgcgatcttcgataagcacgaggtgcaggagatcaaagagaagattctcaattccgattatgacgtcgaggatttcttcgaaggggagttctttaattttgtgctcacacaagagggcattgacgtgtacaacgcgattatcgggggcttcgtcacagagtccggggagaagattaaggggctgaatgagtacatcaatctgtacaatcagaagaccaagcagaaactgccgaaattcaagccgctctacaagcaagtcctgtccgatagggaaagcctctccttctacggcgagggctataccagcgacgaggaggtgctggaagtcttccgcaacacactgaataagaatagcgagattttctcctccatcaagaagctcgagaagctctttaagaactttgacgagtacagctccgccgggattttcgtgaagaacgggccggcgatcagcaccatctccaaggacatctttggcgagtggaacgtcatcagggacaagtggaacgccgagtacgacgacatccacctgaagaagaaggcggtggtgaccgagaagtatgaggacgatcgcaggaagtccttcaaaaaaatcggctccttcagcctcgaacagctccaggagtatgccgatgcggatctgtccgtcgtcgagaagctgaaggaaatcatcattcagaaggtcgacgagatctataaagtgtacgggtccagcgagaagctgttcgacgccgactttgtgctcgag

SEQ ID NO: 256 - DNA, 3729 bp, synthetic construct
  source 1..3729: mol_type = other DNA
aagtccctcaaaaagaatgacgccgtggtggccattatgaaagacctgctcgactccgtgaagtccttcgaaaattacattaaagcgttctttggggaggggaaggaaactaacagggatgagtccttctatggcgactttgtcctcgcgtacgacatcctgctgaaggtcgaccacatttacgacgcgatccgcaactacgtgacacagaagccgtactccaaagacaagttcaagctgtacttccagaacccgcaatttatggggggctgggacaaggataaagagacagactaccgcgcgacaattctccgctatggctccaaatactatctggccatcatggacaagaagtacgcgaagtgcctgcagaagatcgacaaagacgacgtcaatggcaactatgaaaagatcaactacaagctgctgccgggcccgaacaagatgctcccgaaggtgttcttcagcaagaagtggatggcctactacaatccaagcgaggatattcagaaaatctataaaaacgggaccttcaagaagggggacatgtttaacctcaacgactgccacaagctcattgatttcttcaaggatagcatttcccgctacccgaaatggtccaatgcgtacgattttaacttctccgagacagaaaagtacaaagacatcgcgggcttttacagggaggtggaggagcaagggtataaagtttcttttgaatccgcgagcaagaaggaagtcgacaagctcgtcgaggagggcaagctctacatgttccaaatttataacaaggacttttccgacaagagccatgggaccccaaacctccacaccatgtacttcaaactgctctttgacgagaacaaccacgggcaaatcaggctgagcggcggcgccgaattattcatgcgcagggcctccctcaagaaggaagagctggtcgtccatccagccaattccccgatcgcgaacaagaacccggacaatccgaaaaagaccaccaccctgtcctacgacgtctacaaggacaaacgcttcagcgaagaccagtacgaattacacatcccaattgcgattaataagtgcccaaagaatatcttcaaaattaatacagaggtcagggtgctgctcaaacacgacgacaatccgtatgtcatcggcattgacaggggcgagcgcaatctgctctatatcgtggtcgtggatgggaagggcaatattgtggagcagtactccctgaacgagattatcaacaacttcaatgggattaggattaagaccgactatcacagcctgctcgacaagaaagaaaaagagaggtttgaggcccgccaaaactggacctccattgagaatatcaaagaattaaaggccggctatatttcccaagtcgtccacaagatctgcgagctggtggagaaatatgacgccgtgattgcgctcgaagacttaaattctgggttcaagaactcccgcgtgaaggtggaaaaacaggtgtatcagaaattcgagaaaatgctgatcgacaaactcaattatatggtggataagaagtccaacccgtgtgccacagggggcgcgctgaagggctatcagatcaccaacaagttcgagagcttcaagagcatgagcacccagaacgggtttattttctacatcccggcgtggctcacctccaagattgacccgagcaccggcttcgtgaacctcctgaagacaaagtatacctccattgccgacagcaagaagtttatctcctccttcgaccgcattatgtatgtgccggaggaggacctcttcgagttcgccctcgactacaaaaacttcagccgcacagatgcggattacatcaagaagtggaagctgtactcctacgggaacaggatccgcatcttcaggaatccaaaaaaaaataacgtctttgactgggaggaagtgtgcctgacatccgcctacaaggaactgttcaataaatacggcatcaattaccagcagggcgacattcgcgccctcctctgtgagcagtccgacaaagcgttttactccagcttcatggccctcatgtccctgatgctccaaatgaggaatagcatcacagggcgcaccgacgtcgacttcctcatcagcccggtgaagaactccgacgggatcttttacgactcccgcaactatgaggcgcaagagaatgcgatcctcccgaagaacgccgatgcgaacggggcctataatatcgccaggaaagtgctctgggccatcgggcagttcaaaaaggcggaggatgagaagctcgacaaggtgaaaattgccatttccaacaaggagtggctggagtacgcgcagacctccgtgaagcacggctcctctggcagctccggctctagcggctcctctggcagctccggctccaagctggagaagtttacaaactgttacagcctctccaaaaccctcaggtttaaagcgatcccggtgggcaagacccaggagaacatcgacaacaagaggctcctggtggaagacgagaagcgcgccgaagactacaagggcgtgaagaagctgctcgataggtactacctcagctttattaacgacgtgctgcacagcatcaaactcaagaatctcaacaactacatctccctcttccgcaaaaagacccgcaccgagaaggagaacaaggagctggagaacctggagatcaacctccgcaaggaaatcgccaaagcgttcaagggcaatgaagggtacaagagcctcttcaagaaagacatcatcgaaactatcctcccagagtttctcgatgacaaggacgagatcgcgctggtgaactcctttaacgggttcacaaccgcgtttaccggcttctttgataacagggaaaatatgttctccgaggaggccaagtccaccagcatcgccttcaggtgtatcaacgagaacctcacccgctacatttccaatatggacattttcgagaaggtggatgcgatcttcgataagcacgaggtgcaggagatcaaagagaagattctcaattccgattatgacgtcgaggatttcttcgaaggggagttctttaattttgtgctcacacaagagggcattgacgtgtacaacgcgattatcgggggcttcgtcacagagtccggggagaagattaaggggctgaatgagtacatcaatctgtacaatcagaagaccaagcagaaactgccgaaattcaagccgctctacaagcaagtcctgtccgatagggaaagcctctccttctacggcgagggctataccagcgacgaggaggtgctggaagtcttccgcaacacactgaataagaatagcgagattttctcctccatcaagaagctcgagaagctctttaagaactttgacgagtacagctccgccgggattttcgtgaagaacgggccggcgatcagcaccatctccaaggacatctttggcgagtggaacgtcatcagggacaagtggaacgccgagtacgacgacatccacctgaagaagaaggcggtggtgaccgagaagtatgaggacgatcgcaggaagtccttcaaaaaaatcggctccttcagcctcgaacagctccaggagtatgccgatgcggatctgtccgtcgtcgagaagctgaaggaaatcatcattcagaaggtcgacgagatctataaagtgtacgggtccagcgagaagctgttcgacgccgactttgtgctcgag

SEQ ID NO: 257 - DNA, 3711 bp, synthetic construct
  source 1..3711: mol_type = other DNA
tccgacaaagcgttttactccagcttcatggccctcatgtccctgatgctccaaatgaggaatagcatcacagggcgcaccgacgtcgacttcctcatcagcccggtgaagaactccgacgggatcttttacgactcccgcaactatgaggcgcaagagaatgcgatcctcccgaagaacgccgatgcgaacggggcctataatatcgccaggaaagtgctctgggccatcgggcagttcaaaaaggcggaggatgagaagctcgacaaggtgaaaattgccatttccaacaaggagtggctggagtacgcgcagacctccgtgaagcacggctcctctggcagctccggctctagcggctccaagctggagaagtttacaaactgttacagcctctccaaaaccctcaggtttaaagcgatcccggtgggcaagacccaggagaacatcgacaacaagaggctcctggtggaagacgagaagcgcgccgaagactacaagggcgtgaagaagctgctcgataggtactacctcagctttattaacgacgtgctgcacagcatcaaactcaagaatctcaacaactacatctccctcttccgcaaaaagacccgcaccgagaaggagaacaaggagctggagaacctggagatcaacctccgcaaggaaatcgccaaagcgttcaagggcaatgaagggtacaagagcctcttcaagaaagacatcatcgaaactatcctcccagagtttctcgatgacaaggacgagatcgcgctggtgaactcctttaacgggttcacaaccgcgtttaccggcttctttgataacagggaaaatatgttctccgaggaggccaagtccaccagcatcgccttcaggtgtatcaacgagaacctcacccgctacatttccaatatggacattttcgagaaggtggatgcgatcttcgataagcacgaggtgcaggagatcaaagagaagattctcaattccgattatgacgtcgaggatttcttcgaaggggagttctttaattttgtgctcacacaagagggcattgacgtgtacaacgcgattatcgggggcttcgtcacagagtccggggagaagattaaggggctgaatgagtacatcaatctgtacaatcagaagaccaagcagaaactgccgaaattcaagccgctctacaagcaagtcctgtccgatagggaaagcctctccttctacggcgagggctataccagcgacgaggaggtgctggaagtcttccgcaacacactgaataagaatagcgagattttctcctccatcaagaagctcgagaagctctttaagaactttgacgagtacagctccgccgggattttcgtgaagaacgggccggcgatcagcaccatctccaaggacatctttggcgagtggaacgtcatcagggacaagtggaacgccgagtacgacgacatccacctgaagaagaaggcggtggtgaccgagaagtatgaggacgatcgcaggaagtccttcaaaaaaatcggctccttcagcctcgaacagctccaggagtatgccgatgcggatctgtccgtcgtcgagaagctgaaggaaatcatcattcagaaggtcgacgagatctataaagtgtacgggtccagcgagaagctgttcgacgccgactttgtgctcgagaagtccctcaaaaagaatgacgccgtggtggccattatgaaagacctgctcgactccgtgaagtccttcgaaaattacattaaagcgttctttggggaggggaaggaaactaacagggatgagtccttctatggcgactttgtcctcgcgtacgacatcctgctgaaggtcgaccacatttacgacgcgatccgcaactacgtgacacagaagccgtactccaaagacaagttcaagctgtacttccagaacccgcaatttatggggggctgggacaaggataaagagacagactaccgcgcgacaattctccgctatggctccaaatactatctggccatcatggacaagaagtacgcgaagtgcctgcagaagatcgacaaagacgacgtcaatggcaactatgaaaagatcaactacaagctgctgccgggcccgaacaagatgctcccgaaggtgttcttcagcaagaagtggatggcctactacaatccaagcgaggatattcagaaaatctataaaaacgggaccttcaagaagggggacatgtttaacctcaacgactgccacaagctcattgatttcttcaaggatagcatttcccgctacccgaaatggtccaatgcgtacgattttaacttctccgagacagaaaagtacaaagacatcgcgggcttttacagggaggtggaggagcaagggtataaagtttcttttgaatccgcgagcaagaaggaagtcgacaagctcgtcgaggagggcaagctctacatgttccaaatttataacaaggacttttccgacaagagccatgggaccccaaacctccacaccatgtacttcaaactgctctttgacgagaacaaccacgggcaaatcaggctgagcggcggcgccgaattattcatgcgcagggcctccctcaagaaggaagagctggtcgtccatccagccaattccccgatcgcgaacaagaacccggacaatccgaaaaagaccaccaccctgtcctacgacgtctacaaggacaaacgcttcagcgaagaccagtacgaattacacatcccaattgcgattaataagtgcccaaagaatatcttcaaaattaatacagaggtcagggtgctgctcaaacacgacgacaatccgtatgtcatcggcattgacaggggcgagcgcaatctgctctatatcgtggtcgtggatgggaagggcaatattgtggagcagtactccctgaacgagattatcaacaacttcaatgggattaggattaagaccgactatcacagcctgctcgacaagaaagaaaaagagaggtttgaggcccgccaaaactggacctccattgagaatatcaaagaattaaaggccggctatatttcccaagtcgtccacaagatctgcgagctggtggagaaatatgacgccgtgattgcgctcgaagacttaaattctgggttcaagaactcccgcgtgaaggtggaaaaacaggtgtatcagaaattcgagaaaatgctgatcgacaaactcaattatatggtggataagaagtccaacccgtgtgccacagggggcgcgctgaagggctatcagatcaccaacaagttcgagagcttcaagagcatgagcacccagaacgggtttattttctacatcccggcgtggctcacctccaagattgacccgagcaccggcttcgtgaacctcctgaagacaaagtatacctccattgccgacagcaagaagtttatctcctccttcgaccgcattatgtatgtgccggaggaggacctcttcgagttcgccctcgactacaaaaacttcagccgcacagatgcggattacatcaagaagtggaagctgtactcctacgggaacaggatccgcatcttcaggaatccaaaaaaaaataacgtctttgactgggaggaagtgtgcctgacatccgcctacaaggaactgttcaataaatacggcatcaattaccagcagggcgacattcgcgccctcctctgtgagcag

SEQ ID NO: 258 - DNA, 3729 bp, synthetic construct
  source 1..3729: mol_type = other DNA
tccgacaaagcgttttactccagcttcatggccctcatgtccctgatgctccaaatgaggaatagcatcacagggcgcaccgacgtcgacttcctcatcagcccggtgaagaactccgacgggatcttttacgactcccgcaactatgaggcgcaagagaatgcgatcctcccgaagaacgccgatgcgaacggggcctataatatcgccaggaaagtgctctgggccatcgggcagttcaaaaaggcggaggatgagaagctcgacaaggtgaaaattgccatttccaacaaggagtggctggagtacgcgcagacctccgtgaagcacggctcctctggcagctccggctctagcggctcctctggcagctccggctccaagctggagaagtttacaaactgttacagcctctccaaaaccctcaggtttaaagcgatcccggtgggcaagacccaggagaacatcgacaacaagaggctcctggtggaagacgagaagcgcgccgaagactacaagggcgtgaagaagctgctcgataggtactacctcagctttattaacgacgtgctgcacagcatcaaactcaagaatctcaacaactacatctccctcttccgcaaaaagacccgcaccgagaaggagaacaaggagctggagaacctggagatcaacctccgcaaggaaatcgccaaagcgttcaagggcaatgaagggtacaagagcctcttcaagaaagacatcatcgaaactatcctcccagagtttctcgatgacaaggacgagatcgcgctggtgaactcctttaacgggttcacaaccgcgtttaccggcttctttgataacagggaaaatatgttctccgaggaggccaagtccaccagcatcgccttcaggtgtatcaacgagaacctcacccgctacatttccaatatggacattttcgagaaggtggatgcgatcttcgataagcacgaggtgcaggagatcaaagagaagattctcaattccgattatgacgtcgaggatttcttcgaaggggagttctttaattttgtgctcacacaagagggcattgacgtgtacaacgcgattatcgggggcttcgtcacagagtccggggagaagattaaggggctgaatgagtacatcaatctgtacaatcagaagaccaagcagaaactgccgaaattcaagccgctctacaagcaagtcctgtccgatagggaaagcctctccttctacggcgagggctataccagcgacgaggaggtgctggaagtcttccgcaacacactgaataagaatagcgagattttctcctccatcaagaagctcgagaagctctttaagaactttgacgagtacagctccgccgggattttcgtgaagaacgggccggcgatcagcaccatctccaaggacatctttggcgagtggaacgtcatcagggacaagtggaacgccgagtacgacgacatccacctgaagaagaaggcggtggtgaccgagaagtatgaggacgatcgcaggaagtccttcaaaaaaatcggctccttcagcctcgaacagctccaggagtatgccgatgcggatctgtccgtcgtcgagaagctgaaggaaatcatcattcagaaggtcgacgagatctataaagtgtacgggtccagcgagaagctgttcgacgccgactttgtgctcgagaagtccctcaaaaagaatgacgccgtggtggccattatgaaagacctgctcgactccgtgaagtccttcgaaaattacattaaagcgttctttggggaggggaaggaaactaacagggatgagtccttctatggcgactttgtcctcgcgtacgacatcctgctgaaggtcgaccacatttacgacgcgatccgcaactacgtgacacagaagccgtactccaaagacaagttcaagctgtacttccagaacccgcaatttatggggggctgggacaaggataaagagacagactaccgcgcgacaattctccgctatggctccaaatactatctggccatcatggacaagaagtacgcgaagtgcctgcagaagatcgacaaagacgacgtcaatggcaactatgaaaagatcaactacaagctgctgccgggcccgaacaagatgctcccgaaggtgttcttcagcaagaagtggatggcctactacaatccaagcgaggatattcagaaaatctataaaaacgggaccttcaagaagggggacatgtttaacctcaacgactgccacaagctcattgatttcttcaaggatagcatttcccgctacccgaaatggtccaatgcgtacgattttaacttctccgagacagaaaagtacaaagacatcgcgggcttttacagggaggtggaggagcaagggtataaagtttcttttgaatccgcgagcaagaaggaagtcgacaagctcgtcgaggagggcaagctctacatgttccaaatttataacaaggacttttccgacaagagccatgggaccccaaacctccacaccatgtacttcaaactgctctttgacgagaacaaccacgggcaaatcaggctgagcggcggcgccgaattattcatgcgcagggcctccctcaagaaggaagagctggtcgtccatccagccaattccccgatcgcgaacaagaacccggacaatccgaaaaagaccaccaccctgtcctacgacgtctacaaggacaaacgcttcagcgaagaccagtacgaattacacatcccaattgcgattaataagtgcccaaagaatatcttcaaaattaatacagaggtcagggtgctgctcaaacacgacgacaatccgtatgtcatcggcattgacaggggcgagcgcaatctgctctatatcgtggtcgtggatgggaagggcaatattgtggagcagtactccctgaacgagattatcaacaacttcaatgggattaggattaagaccgactatcacagcctgctcgacaagaaagaaaaagagaggtttgaggcccgccaaaactggacctccattgagaatatcaaagaattaaaggccggctatatttcccaagtcgtccacaagatctgcgagctggtggagaaatatgacgccgtgattgcgctcgaagacttaaattctgggttcaagaactcccgcgtgaaggtggaaaaacaggtgtatcagaaattcgagaaaatgctgatcgacaaactcaattatatggtggataagaagtccaacccgtgtgccacagggggcgcgctgaagggctatcagatcaccaacaagttcgagagcttcaagagcatgagcacccagaacgggtttattttctacatcccggcgtggctcacctccaagattgacccgagcaccggcttcgtgaacctcctgaagacaaagtatacctccattgccgacagcaagaagtttatctcctccttcgaccgcattatgtatgtgccggaggaggacctcttcgagttcgccctcgactacaaaaacttcagccgcacagatgcggattacatcaagaagtggaagctgtactcctacgggaacaggatccgcatcttcaggaatccaaaaaaaaataacgtctttgactgggaggaagtgtgcctgacatccgcctacaaggaactgttcaataaatacggcatcaattaccagcagggcgacattcgcgccctcctctgtgagcag

SEQ ID NO: 259 - DNA, 8019 bp, synthetic construct
  source 1..8019: mol_type = other DNA
tcagcatcttttactttcaccagcgtttctgggtgagcaaaaacaggaaggcaaaatgccgcaaaaaagggaataagggcgacacggaaatgttgaatactcatactcttcctttttcaatattattgaagcatttatcagggttattgtctcatgagcggatacatatttgaatgtatttagaaaaataaacaaataggggttccgcgcacatttccccgaaaagtgccacctgacgtcgacggatcgggagatcgatctcccgatcccctagggtcgactctcagtacaatctgctctgatgccgcatagttaagccagtatctgctccctgcttgtgtgttggaggtcgctgagtagtgcgcgagcaaaatttaagctacaacaaggcaaggcttgaccgacaattgcatgaagaatctgcttagggttaggcgttttgcgctgcttcgcgatgtacgggccagatatacgcgttgacattgattattgactagttattaatagtaatcaattacggggtcattagttcatagcccatatatggagttccgcgttacataacttacggtaaatggcccgcctggctgaccgcccaacgacccccgcccattgacgtcaataatgacgtatgttcccatagtaacgccaatagggactttccattgacgtcaatgggtggagtatttacggtaaactgcccacttggcagtacatcaagtgtatcatatgccaagtacgccccctattgacgtcaatgacggtaaatggcccgcctggcattatgcccagtacatgaccttatgggactttcctacttggcagtacatctacgtattagtcatcgctattaccatggtgatgcggttttggcagtacatcaatgggcgtggatagcggtttgactcacggggatttccaagtctccaccccattgacgtcaatgggagtttgttttggcaccaaaatcaacgggactttccaaaatgtcgtaacaactccgccccattgacgcaaatgggcggtaggcgtgtacggtgggaggtctatataagcagagctggtttagtgaaccgtcagatccgctagagatccgcggccgctaatacgactcactatagggagagccgccaccatgaaacggacagccgacggaagcgagttcgagtcaccaaagaagaagcggaaagtctccaagctggagaagtttacaaactgttacagcctctccaaaaccctcaggtttaaagcgatcccggtgggcaagacccaggagaacatcgacaacaagaggctcctggtggaagacgagaagcgcgccgaagactacaagggcgtgaagaagctgctcgataggtactacctcagctttattaacgacgtgctgcacagcatcaaactcaagaatctcaacaactacatctccctcttccgcaaaaagacccgcaccgagaaggagaacaaggagctggagaacctggagatcaacctccgcaaggaaatcgccaaagcgttcaagggcaatgaagggtacaagagcctcttcaagaaagacatcatcgaaactatcctcccagagtttctcgatgacaaggacgagatcgcgctggtgaactcctttaacgggttcacaaccgcgtttaccggcttctttgataacagggaaaatatgttctccgaggaggccaagtccaccagcatcgccttcaggtgtatcaacgagaacctcacccgctacatttccaatatggacattttcgagaaggtggatgcgatcttcgataagcacgaggtgcaggagatcaaagagaagattctcaattccgattatgacgtcgaggatttcttcgaaggggagttctttaattttgtgctcacacaagagggcattgacgtgtacaacgcgattatcgggggcttcgtcacagagtccggggagaagattaaggggctgaatgagtacatcaatctgtacaatcagaagaccaagcagaaactgccgaaattcaagccgctctacaagcaagtcctgtccgatagggaaagcctctccttctacggcgagggctataccagcgacgaggaggtgctggaagtcttccgcaacacactgaataagaatagcgagattttctcctccatcaagaagctcgagaagctctttaagaactttgacgagtacagctccgccgggattttcgtgaagaacgggccggcgatcagcaccatctccaaggacatctttggcgagtggaacgtcatcagggacaagtggaacgccgagtacgacgacatccacctgaagaagaaggcggtggtgaccgagaagtatgaggacgatcgcaggaagtccttcaaaaaaatcggctccttcagcctcgaacagctccaggagtatgccgatgcggatctgtccgtcgtcgagaagctgaaggaaatcatcattcagaaggtcgacgagatctataaagtgtacgggtccagcgagaagctgttcgacgccgactttgtgctcgagaagtccctcaaaaagaatgacgccgtggtggccattatgaaagacctgctcgactccgtgaagtccttcgaaaattacattaaagcgttctttggggaggggaaggaaactaacagggatgagtccttctatggcgactttgtcctcgcgtacgacatcctgctgaaggtcgaccacatttacgacgcgatccgcaactacgtgacacagaagccgtactccaaagacaagttcaagctgtacttccagaacccgcaatttatggggggctgggacaaggataaagagacagactaccgcgcgacaattctccgctatggctccaaatactatctggccatcatggacaagaagtacgcgaagtgcctgcagaagatcgacaaagacgacgtcaatggcaactatgaaaagatcaactacaagctgctgccgggcccgaacaagatgctcccgaaggtgttcttcagcaagaagtggatggcctactacaatccaagcgaggatattcagaaaatctataaaaacgggaccttcaagaagggggacatgtttaacctcaacgactgccacaagctcattgatttcttcaaggatagcatttcccgctacccgaaatggtccaatgcgtacgattttaacttctccgagacagaaaagtacaaagacatcgcgggcttttacagggaggtggaggagcaagggtataaagtttcttttgaatccgcgagcaagaaggaagtcgacaagctcgtcgaggagggcaagctctacatgttccaaatttataacaaggacttttccgacaagagccatgggaccccaaacctccacaccatgtacttcaaactgctctttgacgagaacaaccacgggcaaatcaggctgagcggcggcgccgaattattcatgcgcagggcctccctcaagaaggaagagctggtcgtccatccagccaattccccgatcgcgaacaagaacccggacaatccgaaaaagaccaccaccctgtcctacgacgtctacaaggacaaacgcttcagcgaagaccagtacgaattacacatcccaattgcgattaataagtgcccaaagaatatcttcaaaattaatacagaggtcagggtgctgctcaaacacgacgacaatccgtatgtcatcggcattgacaggggcgagcgcaatctgctctatatcgtggtcgtggatgggaagggcaatattgtggagcagtactccctgaacgagattatcaacaacttcaatgggattaggattaagaccgactatcacagcctgctcgacaagaaagaaaaagagaggtttgaggcccgccaaaactggacctccattgagaatatcaaagaattaaaggccggctatatttcccaagtcgtccacaagatctgcgagctggtggagaaatatgacgccgtgattgcgctcgaagacttaaattctgggttcaagaactcccgcgtgaaggtggaaaaacaggtgtatcagaaattcgagaaaatgctgatcgacaaactcaattatatggtggataagaagtccaacccgtgtgccacagggggcgcgctgaagggctatcagatcaccaacaagttcgagagcttcaagagcatgagcacccagaacgggtttattttctacatcccggcgtggctcacctccaagattgacccgagcaccggcttcgtgaacctcctgaagacaaagtatacctccattgccgacagcaagaagtttatctcctccttcgaccgcattatgtatgtgccggaggaggacctcttcgagttcgccctcgactacaaaaacttcagccgcacagatgcggattacatcaagaagtggaagctgtactcctacgggaacaggatccgcatcttcaggaatccaaaaaaaaataacgtctttgactgggaggaagtgtgcctgacatccgcctacaaggaactgttcaataaatacggcatcaattaccagcagggcgacattcgcgccctcctctgtgagcagtccgacaaagcgttttactccagcttcatggccctcatgtccctgatgctccaaatgaggaatagcatcacagggcgcaccgacgtcgacttcctcatcagcccggtgaagaactccgacgggatcttttacgactcccgcaactatgaggcgcaagagaatgcgatcctcccgaagaacgccgatgcgaacggggcctataatatcgccaggaaagtgctctgggccatcgggcagttcaaaaaggcggaggatgagaagctcgacaaggtgaaaattgccatttccaacaaggagtggctggagtacgcgcagacctccgtgaagcactctggcggctcaaaaagaaccgccgacggcagcgaattcgagcccaagaagaagaggaaagtcggaagcggagctactaacttcagcctgctgaagcaggctggagacgtggaggagaaccctggacctatggtgagcaagggcgaggagctgttcaccggggtggtgcccatcctggtcgagctggacggcgacgtaaacggccacaagttcagcgtgtccggcgagggcgagggcgatgccacctacggcaagctgaccctgaagttcatctgcaccaccggcaagctgcccgtgccctggcccaccctcgtgaccaccctgacctatggagtgcagtgcttcagccgctaccccgaccacatgaagcagcacgacttcttcaagtccgccatgcccgaaggctacgtccaggagcgcaccatcttcttcaaggacgacggcaactacaagacccgcgccgaggtgaagttcgagggcgacaccctggtgaaccgcatcgagctgaagggcatcgacttcaaggaggacggcaacatcctggggcacaagctggagtacaactacaacagccacaacgtctatatcatggccgacaagcagaagaacggcatcaaggtgaacttcaagatccgccacaacatcgaggacggcagcgtgcagctcgccgaccactaccagcagaacacccccatcggcgacggccccgtgctgctgcccgacaaccactacctgagcacccagtccgccctgagcaaagaccccaacgagaagcgcgatcacatggtcctgctggagttcgtgaccgccgccgggatcactctcggcatggacgagctgtacaagtctggtggttctcccaagaagaagaggaaagtctaaccggtcatcatcaccatcaccattgagtttaaacccgctgatcagcctcgactgtgccttctagttgccagccatctgttgtttgcccctcccccgtgccttccttgaccctggaaggtgccactcccactgtcctttcctaataaaatgaggaaattgcatcgcattgtctgagtaggtgtcattctattctggggggtggggtggggcaggacagcaagggggaggattgggaagacaatagcaggcatgctggggatgcggtgggctctatggcttctgaggcggaaagaaccagctggggctcgataccgtcgacctctagctagagcttggcgtaatcatggtcatagctgtttcctgtgtgaaattgttatccgctcacaattccacacaacatacgagccggaagcataaagtgtaaagcctagggtgcctaatgagtgagctaactcacattaattgcgttgcgctcactgcccgctttccagtcgggaaacctgtcgtgccagctgcattaatgaatcggccaacgcgcggggagaggcggtttgcgtattgggcgctcttccgcttcctcgctcactgactcgctgcgctcggtcgttcggctgcggcgagcggtatcagctcactcaaaggcggtaatacggttatccacagaatcaggggataacgcaggaaagaacatgtgagcaaaaggccagcaaaaggccaggaaccgtaaaaaggccgcgttgctggcgtttttccataggctccgcccccctgacgagcatcacaaaaatcgacgctcaagtcagaggtggcgaaacccgacaggactataaagataccaggcgtttccccctggaagctccctcgtgcgctctcctgttccgaccctgccgcttaccggatacctgtccgcctttctcccttcgggaagcgtggcgctttctcatagctcacgctgtaggtatctcagttcggtgtaggtcgttcgctccaagctgggctgtgtgcacgaaccccccgttcagcccgaccgctgcgccttatccggtaactatcgtcttgagtccaacccggtaagacacgacttatcgccactggcagcagccactggtaacaggattagcagagcgaggtatgtaggcggtgctacagagttcttgaagtggtggcctaactacggctacactagaagaacagtatttggtatctgcgctctgctgaagccagttaccttcggaaaaagagttggtagctcttgatccggcaaacaaaccaccgctggtagcggtggtttttttgtttgcaagcagcagattacgcgcagaaaaaaaggatctcaagaagatcctttgatcttttctacggggtctgacactcagtggaacgaaaactcacgttaagggattttggtcatgagattatcaaaaaggatcttcacctagatccttttaaattaaaaatgaagttttaaatcaatctaaagtatatatgagtaaacttggtctgacagttaccaatgcttaatcagtgaggcacctatctcagcgatctgtctatttcgttcatccatagttgcctgactccccgtcgtgtagataactacgatacgggagggcttaccatctggccccagtgctgcaatgataccgcgagacccacgctcaccggctccagatttatcagcaataaaccagccagccggaagggccgagcgcagaagtggtcctgcaactttatccgcctccatccagtctattaattgttgccgggaagctagagtaagtagttcgccagttaatagtttgcgcaacgttgttgccattgctacaggcatcgtggtgtcacgctcgtcgtttggtatggcttcattcagctccggttcccaacgatcaaggcgagttacatgatcccccatgttgtgcaaaaaagcggttagctccttcggtcctccgatcgttgtcagaagtaagttggccgcagtgttatcactcatggttatggcagcactgcataattctcttactgtcatgccatccgtaagatgcttttctgtgactggtgagtactcaaccaagtcattctgagaatagtgtatgcggcgaccgagttgctcttgcccggcgtcaatacgggataataccgcgccacatagcagaactttaaaagtgctcatcattggaaaacgttcttcggggcgaaaactctcaaggatcttaccgctgttgagatccagttcgatgtaacccactcgtgcacccaactgatct

SEQ ID NO: 260 - DNA, 8049 bp, synthetic construct
  source 1..8049: mol_type = other DNA
gacattgattattgactagttattaatagtaatcaattacggggtcattagttcatagcccatatatggagttccgcgttacataacttacggtaaatggcccgcctggctgaccgcccaacgacccccgcccattgacgtcaataatgacgtatgttcccatagtaacgccaatagggactttccattgacgtcaatgggtggagtatttacggtaaactgcccacttggcagtacatcaagtgtatcatatgccaagtacgccccctattgacgtcaatgacggtaaatggcccgcctggcattatgcccagtacatgaccttatgggactttcctacttggcagtacatctacgtattagtcatcgctattaccatggtgatgcggttttggcagtacatcaatgggcgtggatagcggtttgactcacggggatttccaagtctccaccccattgacgtcaatgggagtttgttttggcaccaaaatcaacgggactttccaaaatgtcgtaacaactccgccccattgacgcaaatgggcggtaggcgtgtacggtgggaggtctatataagcagagctggtttagtgaaccgtcagatccgctagagatccgcggccgctaatacgactcactatagggagagccgccaccatgaaacggacagccgacggaagcgagttcgagtcaccaaagaagaagcggaaagtccgcaccgagaaggagaacaaggagctggagaacctggagatcaacctccgcaaggaaatcgccaaagcgttcaagggcaatgaagggtacaagagcctcttcaagaaagacatcatcgaaactatcctcccagagtttctcgatgacaaggacgagatcgcgctggtgaactcctttaacgggttcacaaccgcgtttaccggcttctttgataacagggaaaatatgttctccgaggaggccaagtccaccagcatcgccttcaggtgtatcaacgagaacctcacccgctacatttccaatatggacattttcgagaaggtggatgcgatcttcgataagcacgaggtgcaggagatcaaagagaagattctcaattccgattatgacgtcgaggatttcttcgaaggggagttctttaattttgtgctcacacaagagggcattgacgtgtacaacgcgattatcgggggcttcgtcacagagtccggggagaagattaaggggctgaatgagtacatcaatctgtacaatcagaagaccaagcagaaactgccgaaattcaagccgctctacaagcaagtcctgtccgatagggaaagcctctccttctacggcgagggctataccagcgacgaggaggtgctggaagtcttccgcaacacactgaataagaatagcgagattttctcctccatcaagaagctcgagaagctctttaagaactttgacgagtacagctccgccgggattttcgtgaagaacgggccggcgatcagcaccatctccaaggacatctttggcgagtggaacgtcatcagggacaagtggaacgccgagtacgacgacatccacctgaagaagaaggcggtggtgaccgagaagtatgaggacgatcgcaggaagtccttcaaaaaaatcggctccttcagcctcgaacagctccaggagtatgccgatgcggatctgtccgtcgtcgagaagctgaaggaaatcatcattcagaaggtcgacgagatctataaagtgtacgggtccagcgagaagctgttcgacgccgactttgtgctcgagaagtccctcaaaaagaatgacgccgtggtggccattatgaaagacctgctcgactccgtgaagtccttcgaaaattacattaaagcgttctttggggaggggaaggaaactaacagggatgagtccttctatggcgactttgtcctcgcgtacgacatcctgctgaaggtcgaccacatttacgacgcgatccgcaactacgtgacacagaagccgtactccaaagacaagttcaagctgtacttccagaacccgcaatttatggggggctgggacaaggataaagagacagactaccgcgcgacaattctccgctatggctccaaatactatctggccatcatggacaagaagtacgcgaagtgcctgcagaagatcgacaaagacgacgtcaatggcaactatgaaaagatcaactacaagctgctgccgggcccgaacaagatgctcccgaaggtgttcttcagcaagaagtggatggcctactacaatccaagcgaggatattcagaaaatctataaaaacgggaccttcaagaagggggacatgtttaacctcaacgactgccacaagctcattgatttcttcaaggatagcatttcccgctacccgaaatggtccaatgcgtacgattttaacttctccgagacagaaaagtacaaagacatcgcgggcttttacagggaggtggaggagcaagggtataaagtttcttttgaatccgcgagcaagaaggaagtcgacaagctcgtcgaggagggcaagctctacatgttccaaatttataacaaggacttttccgacaagagccatgggaccccaaacctccacaccatgtacttcaaactgctctttgacgagaacaaccacgggcaaatcaggctgagcggcggcgccgaattattcatgcgcagggcctccctcaagaaggaagagctggtcgtccatccagccaattccccgatcgcgaacaagaacccggacaatccgaaaaagaccaccaccctgtcctacgacgtctacaaggacaaacgcttcagcgaagaccagtacgaattacacatcccaattgcgattaataagtgcccaaagaatatcttcaaaattaatacagaggtcagggtgctgctcaaacacgacgacaatccgtatgtcatcggcattgacaggggcgagcgcaatctgctctatatcgtggtcgtggatgggaagggcaatattgtggagcagtactccctgaacgagattatcaacaacttcaatgggattaggattaagaccgactatcacagcctgctcgacaagaaagaaaaagagaggtttgaggcccgccaaaactggacctccattgagaatatcaaagaattaaaggccggctatatttcccaagtcgtccacaagatctgcgagctggtggagaaatatgacgccgtgattgcgctcgaagacttaaattctgggttcaagaactcccgcgtgaaggtggaaaaacaggtgtatcagaaattcgagaaaatgctgatcgacaaactcaattatatggtggataagaagtccaacccgtgtgccacagggggcgcgctgaagggctatcagatcaccaacaagttcgagagcttcaagagcatgagcacccagaacgggtttattttctacatcccggcgtggctcacctccaagattgacccgagcaccggcttcgtgaacctcctgaagacaaagtatacctccattgccgacagcaagaagtttatctcctccttcgaccgcattatgtatgtgccggaggaggacctcttcgagttcgccctcgactacaaaaacttcagccgcacagatgcggattacatcaagaagtggaagctgtactcctacgggaacaggatccgcatcttcaggaatccaaaaaaaaataacgtctttgactgggaggaagtgtgcctgacatccgcctacaaggaactgttcaataaatacggcatcaattaccagcagggcgacattcgcgccctcctctgtgagcagtccgacaaagcgttttactccagcttcatggccctcatgtccctgatgctccaaatgaggaatagcatcacagggcgcaccgacgtcgacttcctcatcagcccggtgaagaactccgacgggatcttttacgactcccgcaactatgaggcgcaagagaatgcgatcctcccgaagaacgccgatgcgaacggggcctataatatcgccaggaaagtgctctgggccatcgggcagttcaaaaaggcggaggatgagaagctcgacaaggtgaaaattgccatttccaacaaggagtggctggagtacgcgcagacctccgtgaagcacggctcctctggcagctccggctctagcggctccaagctggagaagtttacaaactgttacagcctctccaaaaccctcaggtttaaagcgatcccggtgggcaagacccaggagaacatcgacaacaagaggctcctggtggaagacgagaagcgcgccgaagactacaagggcgtgaagaagctgctcgataggtactacctcagctttattaacgacgtgctgcacagcatcaaactcaagaatctcaacaactacatctccctcttccgcaaaaagacctctggcggctcaaaaagaaccgccgacggcagcgaattcgagcccaagaagaagaggaaagtcggaagcggagctactaacttcagcctgctgaagcaggctggagacgtggaggagaaccctggacctatggtgagcaagggcgaggagctgttcaccggggtggtgcccatcctggtcgagctggacggcgacgtaaacggccacaagttcagcgtgtccggcgagggcgagggcgatgccacctacggcaagctgaccctgaagttcatctgcaccaccggcaagctgcccgtgccctggcccaccctcgtgaccaccctgacctatggagtgcagtgcttcagccgctaccccgaccacatgaagcagcacgacttcttcaagtccgccatgcccgaaggctacgtccaggagcgcaccatcttcttcaaggacgacggcaactacaagacccgcgccgaggtgaagttcgagggcgacaccctggtgaaccgcatcgagctgaagggcatcgacttcaaggaggacggcaacatcctggggcacaagctggagtacaactacaacagccacaacgtctatatcatggccgacaagcagaagaacggcatcaaggtgaacttcaagatccgccacaacatcgaggacggcagcgtgcagctcgccgaccactaccagcagaacacccccatcggcgacggccccgtgctgctgcccgacaaccactacctgagcacccagtccgccctgagcaaagaccccaacgagaagcgcgatcacatggtcctgctggagttcgtgaccgccgccgggatcactctcggcatggacgagctgtacaagtctggtggttctcccaagaagaagaggaaagtctaaccggtcatcatcaccatcaccattgagtttaaacccgctgatcagcctcgactgtgccttctagttgccagccatctgttgtttgcccctcccccgtgccttccttgaccctggaaggtgccactcccactgtcctttcctaataaaatgaggaaattgcatcgcattgtctgagtaggtgtcattctattctggggggtggggtggggcaggacagcaagggggaggattgggaagacaatagcaggcatgctggggatgcggtgggctctatggcttctgaggcggaaagaaccagctggggctcgataccgtcgacctctagctagagcttggcgtaatcatggtcatagctgtttcctgtgtgaaattgttatccgctcacaattccacacaacatacgagccggaagcataaagtgtaaagcctagggtgcctaatgagtgagctaactcacattaattgcgttgcgctcactgcccgctttccagtcgggaaacctgtcgtgccagctgcattaatgaatcggccaacgcgcggggagaggcggtttgcgtattgggcgctcttccgcttcctcgctcactgactcgctgcgctcggtcgttcggctgcggcgagcggtatcagctcactcaaaggcggtaatacggttatccacagaatcaggggataacgcaggaaagaacatgtgagcaaaaggccagcaaaaggccaggaaccgtaaaaaggccgcgttgctggcgtttttccataggctccgcccccctgacgagcatcacaaaaatcgacgctcaagtcagaggtggcgaaacccgacaggactataaagataccaggcgtttccccctggaagctccctcgtgcgctctcctgttccgaccctgccgcttaccggatacctgtccgcctttctcccttcgggaagcgtggcgctttctcatagctcacgctgtaggtatctcagttcggtgtaggtcgttcgctccaagctgggctgtgtgcacgaaccccccgttcagcccgaccgctgcgccttatccggtaactatcgtcttgagtccaacccggtaagacacgacttatcgccactggcagcagccactggtaacaggattagcagagcgaggtatgtaggcggtgctacagagttcttgaagtggtggcctaactacggctacactagaagaacagtatttggtatctgcgctctgctgaagccagttaccttcggaaaaagagttggtagctcttgatccggcaaacaaaccaccgctggtagcggtggtttttttgtttgcaagcagcagattacgcgcagaaaaaaaggatctcaagaagatcctttgatcttttctacggggtctgacactcagtggaacgaaaactcacgttaagggattttggtcatgagattatcaaaaaggatcttcacctagatccttttaaattaaaaatgaagttttaaatcaatctaaagtatatatgagtaaacttggtctgacagttaccaatgcttaatcagtgaggcacctatctcagcgatctgtctatttcgttcatccatagttgcctgactccccgtcgtgtagataactacgatacgggagggcttaccatctggccccagtgctgcaatgataccgcgagacccacgctcaccggctccagatttatcagcaataaaccagccagccggaagggccgagcgcagaagtggtcctgcaactttatccgcctccatccagtctattaattgttgccgggaagctagagtaagtagttcgccagttaatagtttgcgcaacgttgttgccattgctacaggcatcgtggtgtcacgctcgtcgtttggtatggcttcattcagctccggttcccaacgatcaaggcgagttacatgatcccccatgttgtgcaaaaaagcggttagctccttcggtcctccgatcgttgtcagaagtaagttggccgcagtgttatcactcatggttatggcagcactgcataattctcttactgtcatgccatccgtaagatgcttttctgtgactggtgagtactcaaccaagtcattctgagaatagtgtatgcggcgaccgagttgctcttgcccggcgtcaatacgggataataccgcgccacatagcagaactttaaaagtgctcatcattggaaaacgttcttcggggcgaaaactctcaaggatcttaccgctgttgagatccagttcgatgtaacccactcgtgcacccaactgatcttcagcatcttttactttcaccagcgtttctgggtgagcaaaaacaggaaggcaaaatgccgcaaaaaagggaataagggcgacacggaaatgttgaatactcatactcttcctttttcaatattattgaagcatttatcagggttattgtctcatgagcggatacatatttgaatgtatttagaaaaataaacaaataggggttccgcgcacatttccccgaaaagtgccacctgacgtcgacggatcgggagatcgatctcccgatcccctagggtcgactctcagtacaatctgctctgatgccgcatagttaagccagtatctgctccctgcttgtgtgttggaggtcgctgagtagtgcgcgagcaaaatttaagctacaacaaggcaaggcttgaccgacaattgcatgaagaatctgcttagggttaggcgttttgcgctgcttcgcgatgtacgggccagatatacgcgtt

SEQ ID NO: 261 - DNA, 8067 bp, synthetic construct
  source 1..8067: mol_type = other DNA
gacattgattattgactagttattaatagtaatcaattacggggtcattagttcatagcccatatatggagttccgcgttacataacttacggtaaatggcccgcctggctgaccgcccaacgacccccgcccattgacgtcaataatgacgtatgttcccatagtaacgccaatagggactttccattgacgtcaatgggtggagtatttacggtaaactgcccacttggcagtacatcaagtgtatcatatgccaagtacgccccctattgacgtcaatgacggtaaatggcccgcctggcattatgcccagtacatgaccttatgggactttcctacttggcagtacatctacgtattagtcatcgctattaccatggtgatgcggttttggcagtacatcaatgggcgtggatagcggtttgactcacggggatttccaagtctccaccccattgacgtcaatgggagtttgttttggcaccaaaatcaacgggactttccaaaatgtcgtaacaactccgccccattgacgcaaatgggcggtaggcgtgtacggtgggaggtctatataagcagagctggtttagtgaaccgtcagatccgctagagatccgcggccgctaatacgactcactatagggagagccgccaccatgaaacggacagccgacggaagcgagttcgagtcaccaaagaagaagcggaaagtccgcaccgagaaggagaacaaggagctggagaacctggagatcaacctccgcaaggaaatcgccaaagcgttcaagggcaatgaagggtacaagagcctcttcaagaaagacatcatcgaaactatcctcccagagtttctcgatgacaaggacgagatcgcgctggtgaactcctttaacgggttcacaaccgcgtttaccggcttctttgataacagggaaaatatgttctccgaggaggccaagtccaccagcatcgccttcaggtgtatcaacgagaacctcacccgctacatttccaatatggacattttcgagaaggtggatgcgatcttcgataagcacgaggtgcaggagatcaaagagaagattctcaattccgattatgacgtcgaggatttcttcgaaggggagttctttaattttgtgctcacacaagagggcattgacgtgtacaacgcgattatcgggggcttcgtcacagagtccggggagaagattaaggggctgaatgagtacatcaatctgtacaatcagaagaccaagcagaaactgccgaaattcaagccgctctacaagcaagtcctgtccgatagggaaagcctctccttctacggcgagggctataccagcgacgaggaggtgctggaagtcttccgcaacacactgaataagaatagcgagattttctcctccatcaagaagctcgagaagctctttaagaactttgacgagtacagctccgccgggattttcgtgaagaacgggccggcgatcagcaccatctccaaggacatctttggcgagtggaacgtcatcagggacaagtggaacgccgagtacgacgacatccacctgaagaagaaggcggtggtgaccgagaagtatgaggacgatcgcaggaagtccttcaaaaaaatcggctccttcagcctcgaacagctccaggagtatgccgatgcggatctgtccgtcgtcgagaagctgaaggaaatcatcattcagaaggtcgacgagatctataaagtgtacgggtccagcgagaagctgttcgacgccgactttgtgctcgagaagtccctcaaaaagaatgacgccgtggtggccattatgaaagacctgctcgactccgtgaagtccttcgaaaattacattaaagcgttctttggggaggggaaggaaactaacagggatgagtccttctatggcgactttgtcctcgcgtacgacatcctgctgaaggtcgaccacatttacgacgcgatccgcaactacgtgacacagaagccgtactccaaagacaagttcaagctgtacttccagaacccgcaatttatggggggctgggacaaggataaagagacagactaccgcgcgacaattctccgctatggctccaaatactatctggccatcatggacaagaagtacgcgaagtgcctgcagaagatcgacaaagacgacgtcaatggcaactatgaaaagatcaactacaagctgctgccgggcccgaacaagatgctcccgaaggtgttcttcagcaagaagtggatggcctactacaatccaagcgaggatattcagaaaatctataaaaacgggaccttcaagaagggggacatgtttaacctcaacgactgccacaagctcattgatttcttcaaggatagcatttcccgctacccgaaatggtccaatgcgtacgattttaacttctccgagacagaaaagtacaaagacatcgcgggcttttacagggaggtggaggagcaagggtataaagtttcttttgaatccgcgagcaagaaggaagtcgacaagctcgtcgaggagggcaagctctacatgttccaaatttataacaaggacttttccgacaagagccatgggaccccaaacctccacaccatgtacttcaaactgctctttgacgagaacaaccacgggcaaatcaggctgagcggcggcgccgaattattcatgcgcagggcctccctcaagaaggaagagctggtcgtccatccagccaattccccgatcgcgaacaagaacccggacaatccgaaaaagaccaccaccctgtcctacgacgtctacaaggacaaacgcttcagcgaagaccagtacgaattacacatcccaattgcgattaataagtgcccaaagaatatcttcaaaattaatacagaggtcagggtgctgctcaaacacgacgacaatccgtatgtcatcggcattgacaggggcgagcgcaatctgctctatatcgtggtcgtggatgggaagggcaatattgtggagcagtactccctgaacgagattatcaacaacttcaatgggattaggattaagaccgactatcacagcctgctcgacaagaaagaaaaagagaggtttgaggcccgccaaaactggacctccattgagaatatcaaagaattaaaggccggctatatttcccaagtcgtccacaagatctgcgagctggtggagaaatatgacgccgtgattgcgctcgaagacttaaattctgggttcaagaactcccgcgtgaaggtggaaaaacaggtgtatcagaaattcgagaaaatgctgatcgacaaactcaattatatggtggataagaagtccaacccgtgtgccacagggggcgcgctgaagggctatcagatcaccaacaagttcgagagcttcaagagcatgagcacccagaacgggtttattttctacatcccggcgtggctcacctccaagattgacccgagcaccggcttcgtgaacctcctgaagacaaagtatacctccattgccgacagcaagaagtttatctcctccttcgaccgcattatgtatgtgccggaggaggacctcttcgagttcgccctcgactacaaaaacttcagccgcacagatgcggattacatcaagaagtggaagctgtactcctacgggaacaggatccgcatcttcaggaatccaaaaaaaaataacgtctttgactgggaggaagtgtgcctgacatccgcctacaaggaactgttcaataaatacggcatcaattaccagcagggcgacattcgcgccctcctctgtgagcagtccgacaaagcgttttactccagcttcatggccctcatgtccctgatgctccaaatgaggaatagcatcacagggcgcaccgacgtcgacttcctcatcagcccggtgaagaactccgacgggatcttttacgactcccgcaactatgaggcgcaagagaatgcgatcctcccgaagaacgccgatgcgaacggggcctataatatcgccaggaaagtgctctgggccatcgggcagttcaaaaaggcggaggatgagaagctcgacaaggtgaaaattgccatttccaacaaggagtggctggagtacgcgcagacctccgtgaagcacggctcctctggcagctccggctctagcggctcctctggcagctccggctccaagctggagaagtttacaaactgttacagcctctccaaaaccctcaggtttaaagcgatcccggtgggcaagacccaggagaacatcgacaacaagaggctcctggtggaagacgagaagcgcgccgaagactacaagggcgtgaagaagctgctcgataggtactacctcagctttattaacgacgtgctgcacagcatcaaactcaagaatctcaacaactacatctccctcttccgcaaaaagacctctggcggctcaaaaagaaccgccgacggcagcgaattcgagcccaagaagaagaggaaagtcggaagcggagctactaacttcagcctgctgaagcaggctggagacgtggaggagaaccctggacctatggtgagcaagggcgaggagctgttcaccggggtggtgcccatcctggtcgagctggacggcgacgtaaacggccacaagttcagcgtgtccggcgagggcgagggcgatgccacctacggcaagctgaccctgaagttcatctgcaccaccggcaagctgcccgtgccctggcccaccctcgtgaccaccctgacctatggagtgcagtgcttcagccgctaccccgaccacatgaagcagcacgacttcttcaagtccgccatgcccgaaggctacgtccaggagcgcaccatcttcttcaaggacgacggcaactacaagacccgcgccgaggtgaagttcgagggcgacaccctggtgaaccgcatcgagctgaagggcatcgacttcaaggaggacggcaacatcctggggcacaagctggagtacaactacaacagccacaacgtctatatcatggccgacaagcagaagaacggcatcaaggtgaacttcaagatccgccacaacatcgaggacggcagcgtgcagctcgccgaccactaccagcagaacacccccatcggcgacggccccgtgctgctgcccgacaaccactacctgagcacccagtccgccctgagcaaagaccccaacgagaagcgcgatcacatggtcctgctggagttcgtgaccgccgccgggatcactctcggcatggacgagctgtacaagtctggtggttctcccaagaagaagaggaaagtctaaccggtcatcatcaccatcaccattgagtttaaacccgctgatcagcctcgactgtgccttctagttgccagccatctgttgtttgcccctcccccgtgccttccttgaccctggaaggtgccactcccactgtcctttcctaataaaatgaggaaattgcatcgcattgtctgagtaggtgtcattctattctggggggtggggtggggcaggacagcaagggggaggattgggaagacaatagcaggcatgctggggatgcggtgggctctatggcttctgaggcggaaagaaccagctggggctcgataccgtcgacctctagctagagcttggcgtaatcatggtcatagctgtttcctgtgtgaaattgttatccgctcacaattccacacaacatacgagccggaagcataaagtgtaaagcctagggtgcctaatgagtgagctaactcacattaattgcgttgcgctcactgcccgctttccagtcgggaaacctgtcgtgccagctgcattaatgaatcggccaacgcgcggggagaggcggtttgcgtattgggcgctcttccgcttcctcgctcactgactcgctgcgctcggtcgttcggctgcggcgagcggtatcagctcactcaaaggcggtaatacggttatccacagaatcaggggataacgcaggaaagaacatgtgagcaaaaggccagcaaaaggccaggaaccgtaaaaaggccgcgttgctggcgtttttccataggctccgcccccctgacgagcatcacaaaaatcgacgctcaagtcagaggtggcgaaacccgacaggactataaagataccaggcgtttccccctggaagctccctcgtgcgctctcctgttccgaccctgccgcttaccggatacctgtccgcctttctcccttcgggaagcgtggcgctttctcatagctcacgctgtaggtatctcagttcggtgtaggtcgttcgctccaagctgggctgtgtgcacgaaccccccgttcagcccgaccgctgcgccttatccggtaactatcgtcttgagtccaacccggtaagacacgacttatcgccactggcagcagccactggtaacaggattagcagagcgaggtatgtaggcggtgctacagagttcttgaagtggtggcctaactacggctacactagaagaacagtatttggtatctgcgctctgctgaagccagttaccttcggaaaaagagttggtagctcttgatccggcaaacaaaccaccgctggtagcggtggtttttttgtttgcaagcagcagattacgcgcagaaaaaaaggatctcaagaagatcctttgatcttttctacggggtctgacactcagtggaacgaaaactcacgttaagggattttggtcatgagattatcaaaaaggatcttcacctagatccttttaaattaaaaatgaagttttaaatcaatctaaagtatatatgagtaaacttggtctgacagttaccaatgcttaatcagtgaggcacctatctcagcgatctgtctatttcgttcatccatagttgcctgactccccgtcgtgtagataactacgatacgggagggcttaccatctggccccagtgctgcaatgataccgcgagacccacgctcaccggctccagatttatcagcaataaaccagccagccggaagggccgagcgcagaagtggtcctgcaactttatccgcctccatccagtctattaattgttgccgggaagctagagtaagtagttcgccagttaatagtttgcgcaacgttgttgccattgctacaggcatcgtggtgtcacgctcgtcgtttggtatggcttcattcagctccggttcccaacgatcaaggcgagttacatgatcccccatgttgtgcaaaaaagcggttagctccttcggtcctccgatcgttgtcagaagtaagttggccgcagtgttatcactcatggttatggcagcactgcataattctcttactgtcatgccatccgtaagatgcttttctgtgactggtgagtactcaaccaagtcattctgagaatagtgtatgcggcgaccgagttgctcttgcccggcgtcaatacgggataataccgcgccacatagcagaactttaaaagtgctcatcattggaaaacgttcttcggggcgaaaactctcaaggatcttaccgctgttgagatccagttcgatgtaacccactcgtgcacccaactgatcttcagcatcttttactttcaccagcgtttctgggtgagcaaaaacaggaaggcaaaatgccgcaaaaaagggaataagggcgacacggaaatgttgaatactcatactcttcctttttcaatattattgaagcatttatcagggttattgtctcatgagcggatacatatttgaatgtatttagaaaaataaacaaataggggttccgcgcacatttccccgaaaagtgccacctgacgtcgacggatcgggagatcgatctcccgatcccctagggtcgactctcagtacaatctgctctgatgccgcatagttaagccagtatctgctccctgcttgtgtgttggaggtcgctgagtagtgcgcgagcaaaatttaagctacaacaaggcaaggcttgaccgacaattgcatgaagaatctgcttagggttaggcgttttgcgctgcttcgcgatgtacgggccagatatacgcgtt

SEQ ID NO: 262 - DNA, 8049 bp, synthetic construct
  source 1..8049: mol_type = other DNA
gacattgattattgactagttattaatagtaatcaattacggggtcattagttcatagcccatatatggagttccgcgttacataacttacggtaaatggcccgcctggctgaccgcccaacgacccccgcccattgacgtcaataatgacgtatgttcccatagtaacgccaatagggactttccattgacgtcaatgggtggagtatttacggtaaactgcccacttggcagtacatcaagtgtatcatatgccaagtacgccccctattgacgtcaatgacggtaaatggcccgcctggcattatgcccagtacatgaccttatgggactttcctacttggcagtacatctacgtattagtcatcgctattaccatggtgatgcggttttggcagtacatcaatgggcgtggatagcggtttgactcacggggatttccaagtctccaccccattgacgtcaatgggagtttgttttggcaccaaaatcaacgggactttccaaaatgtcgtaacaactccgccccattgacgcaaatgggcggtaggcgtgtacggtgggaggtctatataagcagagctggtttagtgaaccgtcagatccgctagagatccgcggccgctaatacgactcactatagggagagccgccaccatgaaacggacagccgacggaagcgagttcgagtcaccaaagaagaagcggaaagtcggctataccagcgacgaggaggtgctggaagtcttccgcaacacactgaataagaatagcgagattttctcctccatcaagaagctcgagaagctctttaagaactttgacgagtacagctccgccgggattttcgtgaagaacgggccggcgatcagcaccatctccaaggacatctttggcgagtggaacgtcatcagggacaagtggaacgccgagtacgacgacatccacctgaagaagaaggcggtggtgaccgagaagtatgaggacgatcgcaggaagtccttcaaaaaaatcggctccttcagcctcgaacagctccaggagtatgccgatgcggatctgtccgtcgtcgagaagctgaaggaaatcatcattcagaaggtcgacgagatctataaagtgtacgggtccagcgagaagctgttcgacgccgactttgtgctcgagaagtccctcaaaaagaatgacgccgtggtggccattatgaaagacctgctcgactccgtgaagtccttcgaaaattacattaaagcgttctttggggaggggaaggaaactaacagggatgagtccttctatggcgactttgtcctcgcgtacgacatcctgctgaaggtcgaccacatttacgacgcgatccgcaactacgtgacacagaagccgtactccaaagacaagttcaagctgtacttccagaacccgcaatttatggggggctgggacaaggataaagagacagactaccgcgcgacaattctccgctatggctccaaatactatctggccatcatggacaagaagtacgcgaagtgcctgcagaagatcgacaaagacgacgtcaatggcaactatgaaaagatcaactacaagctgctgccgggcccgaacaagatgctcccgaaggtgttcttcagcaagaagtggatggcctactacaatccaagcgaggatattcagaaaatctataaaaacgggaccttcaagaagggggacatgtttaacctcaacgactgccacaagctcattgatttcttcaaggatagcatttcccgctacccgaaatggtccaatgcgtacgattttaacttctccgagacagaaaagtacaaagacatcgcgggcttttacagggaggtggaggagcaagggtataaagtttcttttgaatccgcgagcaagaaggaagtcgacaagctcgtcgaggagggcaagctctacatgttccaaatttataacaaggacttttccgacaagagccatgggaccccaaacctccacaccatgtacttcaaactgctctttgacgagaacaaccacgggcaaatcaggctgagcggcggcgccgaattattcatgcgcagggcctccctcaagaaggaagagctggtcgtccatccagccaattccccgatcgcgaacaagaacccggacaatccgaaaaagaccaccaccctgtcctacgacgtctacaaggacaaacgcttcagcgaagaccagtacgaattacacatcccaattgcgattaataagtgcccaaagaatatcttcaaaattaatacagaggtcagggtgctgctcaaacacgacgacaatccgtatgtcatcggcattgacaggggcgagcgcaatctgctctatatcgtggtcgtggatgggaagggcaatattgtggagcagtactccctgaacgagattatcaacaacttcaatgggattaggattaagaccgactatcacagcctgctcgacaagaaagaaaaagagaggtttgaggcccgccaaaactggacctccattgagaatatcaaagaattaaaggccggctatatttcccaagtcgtccacaagatctgcgagctggtggagaaatatgacgccgtgattgcgctcgaagacttaaattctgggttcaagaactcccgcgtgaaggtggaaaaacaggtgtatcagaaattcgagaaaatgctgatcgacaaactcaattatatggtggataagaagtccaacccgtgtgccacagggggcgcgctgaagggctatcagatcaccaacaagttcgagagcttcaagagcatgagcacccagaacgggtttattttctacatcccggcgtggctcacctccaagattgacccgagcaccggcttcgtgaacctcctgaagacaaagtatacctccattgccgacagcaagaagtttatctcctccttcgaccgcattatgtatgtgccggaggaggacctcttcgagttcgccctcgactacaaaaacttcagccgcacagatgcggattacatcaagaagtggaagctgtactcctacgggaacaggatccgcatcttcaggaatccaaaaaaaaataacgtctttgactgggaggaagtgtgcctgacatccgcctacaaggaactgttcaataaatacggcatcaattaccagcagggcgacattcgcgccctcctctgtgagcagtccgacaaagcgttttactccagcttcatggccctcatgtccctgatgctccaaatgaggaatagcatcacagggcgcaccgacgtcgacttcctcatcagcccggtgaagaactccgacgggatcttttacgactcccgcaactatgaggcgcaagagaatgcgatcctcccgaagaacgccgatgcgaacggggcctataatatcgccaggaaagtgctctgggccatcgggcagttcaaaaaggcggaggatgagaagctcgacaaggtgaaaattgccatttccaacaaggagtggctggagtacgcgcagacctccgtgaagcacggctcctctggcagctccggctctagcggctccaagctggagaagtttacaaactgttacagcctctccaaaaccctcaggtttaaagcgatcccggtgggcaagacccaggagaacatcgacaacaagaggctcctggtggaagacgagaagcgcgccgaagactacaagggcgtgaagaagctgctcgataggtactacctcagctttattaacgacgtgctgcacagcatcaaactcaagaatctcaacaactacatctccctcttccgcaaaaagacccgcaccgagaaggagaacaaggagctggagaacctggagatcaacctccgcaaggaaatcgccaaagcgttcaagggcaatgaagggtacaagagcctcttcaagaaagacatcatcgaaactatcctcccagagtttctcgatgacaaggacgagatcgcgctggtgaactcctttaacgggttcacaaccgcgtttaccggcttctttgataacagggaaaatatgttctccgaggaggccaagtccaccagcatcgccttcaggtgtatcaacgagaacctcacccgctacatttccaatatggacattttcgagaaggtggatgcgatcttcgataagcacgaggtgcaggagatcaaagagaagattctcaattccgattatgacgtcgaggatttcttcgaaggggagttctttaattttgtgctcacacaagagggcattgacgtgtacaacgcgattatcgggggcttcgtcacagagtccggggagaagattaaggggctgaatgagtacatcaatctgtacaatcagaagaccaagcagaaactgccgaaattcaagccgctctacaagcaagtcctgtccgatagggaaagcctctccttctacggcgagtctggcggctcaaaaagaaccgccgacggcagcgaattcgagcccaagaagaagaggaaagtcggaagcggagctactaacttcagcctgctgaagcaggctggagacgtggaggagaaccctggacctatggtgagcaagggcgaggagctgttcaccggggtggtgcccatcctggtcgagctggacggcgacgtaaacggccacaagttcagcgtgtccggcgagggcgagggcgatgccacctacggcaagctgaccctgaagttcatctgcaccaccggcaagctgcccgtgccctggcccaccctcgtgaccaccctgacctatggagtgcagtgcttcagccgctaccccgaccacatgaagcagcacgacttcttcaagtccgccatgcccgaaggctacgtccaggagcgcaccatcttcttcaaggacgacggcaactacaagacccgcgccgaggtgaagttcgagggcgacaccctggtgaaccgcatcgagctgaagggcatcgacttcaaggaggacggcaacatcctggggcacaagctggagtacaactacaacagccacaacgtctatatcatggccgacaagcagaagaacggcatcaaggtgaacttcaagatccgccacaacatcgaggacggcagcgtgcagctcgccgaccactaccagcagaacacccccatcggcgacggccccgtgctgctgcccgacaaccactacctgagcacccagtccgccctgagcaaagaccccaacgagaagcgcgatcacatggtcctgctggagttcgtgaccgccgccgggatcactctcggcatggacgagctgtacaagtctggtggttctcccaagaagaagaggaaagtctaaccggtcatcatcaccatcaccattgagtttaaacccgctgatcagcctcgactgtgccttctagttgccagccatctgttgtttgcccctcccccgtgccttccttgaccctggaaggtgccactcccactgtcctttcctaataaaatgaggaaattgcatcgcattgtctgagtaggtgtcattctattctggggggtggggtggggcaggacagcaagggggaggattgggaagacaatagcaggcatgctggggatgcggtgggctctatggcttctgaggcggaaagaaccagctggggctcgataccgtcgacctctagctagagcttggcgtaatcatggtcatagctgtttcctgtgtgaaattgttatccgctcacaattccacacaacatacgagccggaagcataaagtgtaaagcctagggtgcctaatgagtgagctaactcacattaattgcgttgcgctcactgcccgctttccagtcgggaaacctgtcgtgccagctgcattaatgaatcggccaacgcgcggggagaggcggtttgcgtattgggcgctcttccgcttcctcgctcactgactcgctgcgctcggtcgttcggctgcggcgagcggtatcagctcactcaaaggcggtaatacggttatccacagaatcaggggataacgcaggaaagaacatgtgagcaaaaggccagcaaaaggccaggaaccgtaaaaaggccgcgttgctggcgtttttccataggctccgcccccctgacgagcatcacaaaaatcgacgctcaagtcagaggtggcgaaacccgacaggactataaagataccaggcgtttccccctggaagctccctcgtgcgctctcctgttccgaccctgccgcttaccggatacctgtccgcctttctcccttcgggaagcgtggcgctttctcatagctcacgctgtaggtatctcagttcggtgtaggtcgttcgctccaagctgggctgtgtgcacgaaccccccgttcagcccgaccgctgcgccttatccggtaactatcgtcttgagtccaacccggtaagacacgacttatcgccactggcagcagccactggtaacaggattagcagagcgaggtatgtaggcggtgctacagagttcttgaagtggtggcctaactacggctacactagaagaacagtatttggtatctgcgctctgctgaagccagttaccttcggaaaaagagttggtagctcttgatccggcaaacaaaccaccgctggtagcggtggtttttttgtttgcaagcagcagattacgcgcagaaaaaaaggatctcaagaagatcctttgatcttttctacggggtctgacactcagtggaacgaaaactcacgttaagggattttggtcatgagattatcaaaaaggatcttcacctagatccttttaaattaaaaatgaagttttaaatcaatctaaagtatatatgagtaaacttggtctgacagttaccaatgcttaatcagtgaggcacctatctcagcgatctgtctatttcgttcatccatagttgcctgactccccgtcgtgtagataactacgatacgggagggcttaccatctggccccagtgctgcaatgataccgcgagacccacgctcaccggctccagatttatcagcaataaaccagccagccggaagggccgagcgcagaagtggtcctgcaactttatccgcctccatccagtctattaattgttgccgggaagctagagtaagtagttcgccagttaatagtttgcgcaacgttgttgccattgctacaggcatcgtggtgtcacgctcgtcgtttggtatggcttcattcagctccggttcccaacgatcaaggcgagttacatgatcccccatgttgtgcaaaaaagcggttagctccttcggtcctccgatcgttgtcagaagtaagttggccgcagtgttatcactcatggttatggcagcactgcataattctcttactgtcatgccatccgtaagatgcttttctgtgactggtgagtactcaaccaagtcattctgagaatagtgtatgcggcgaccgagttgctcttgcccggcgtcaatacgggataataccgcgccacatagcagaactttaaaagtgctcatcattggaaaacgttcttcggggcgaaaactctcaaggatcttaccgctgttgagatccagttcgatgtaacccactcgtgcacccaactgatcttcagcatcttttactttcaccagcgtttctgggtgagcaaaaacaggaaggcaaaatgccgcaaaaaagggaataagggcgacacggaaatgttgaatactcatactcttcctttttcaatattattgaagcatttatcagggttattgtctcatgagcggatacatatttgaatgtatttagaaaaataaacaaataggggttccgcgcacatttccccgaaaagtgccacctgacgtcgacggatcgggagatcgatctcccgatcccctagggtcgactctcagtacaatctgctctgatgccgcatagttaagccagtatctgctccctgcttgtgtgttggaggtcgctgagtagtgcgcgagcaaaatttaagctacaacaaggcaaggcttgaccgacaattgcatgaagaatctgcttagggttaggcgttttgcgctgcttcgcgatgtacgggccagatatacgcgtt

SEQ ID NO: 263 - DNA, 8067 bp, synthetic construct
  source 1..8067: mol_type = other DNA
gacattgattattgactagttattaatagtaatcaattacggggtcattagttcatagcccatatatggagttccgcgttacataacttacggtaaatggcccgcctggctgaccgcccaacgacccccgcccattgacgtcaataatgacgtatgttcccatagtaacgccaatagggactttccattgacgtcaatgggtggagtatttacggtaaactgcccacttggcagtacatcaagtgtatcatatgccaagtacgccccctattgacgtcaatgacggtaaatggcccgcctggcattatgcccagtacatgaccttatgggactttcctacttggcagtacatctacgtattagtcatcgctattaccatggtgatgcggttttggcagtacatcaatgggcgtggatagcggtttgactcacggggatttccaagtctccaccccattgacgtcaatgggagtttgttttggcaccaaaatcaacgggactttccaaaatgtcgtaacaactccgccccattgacgcaaatgggcggtaggcgtgtacggtgggaggtctatataagcagagctggtttagtgaaccgtcagatccgctagagatccgcggccgctaatacgactcactatagggagagccgccaccatgaaacggacagccgacggaagcgagttcgagtcaccaaagaagaagcggaaagtcggctataccagcgacgaggaggtgctggaagtcttccgcaacacactgaataagaatagcgagattttctcctccatcaagaagctcgagaagctctttaagaactttgacgagtacagctccgccgggattttcgtgaagaacgggccggcgatcagcaccatctccaaggacatctttggcgagtggaacgtcatcagggacaagtggaacgccgagtacgacgacatccacctgaagaagaaggcggtggtgaccgagaagtatgaggacgatcgcaggaagtccttcaaaaaaatcggctccttcagcctcgaacagctccaggagtatgccgatgcggatctgtccgtcgtcgagaagctgaaggaaatcatcattcagaaggtcgacgagatctataaagtgtacgggtccagcgagaagctgttcgacgccgactttgtgctcgagaagtccctcaaaaagaatgacgccgtggtggccattatgaaagacctgctcgactccgtgaagtccttcgaaaattacattaaagcgttctttggggaggggaaggaaactaacagggatgagtccttctatggcgactttgtcctcgcgtacgacatcctgctgaaggtcgaccacatttacgacgcgatccgcaactacgtgacacagaagccgtactccaaagacaagttcaagctgtacttccagaacccgcaatttatggggggctgggacaaggataaagagacagactaccgcgcgacaattctccgctatggctccaaatactatctggccatcatggacaagaagtacgcgaagtgcctgcagaagatcgacaaagacgacgtcaatggcaactatgaaaagatcaactacaagctgctgccgggcccgaacaagatgctcccgaaggtgttcttcagcaagaagtggatggcctactacaatccaagcgaggatattcagaaaatctataaaaacgggaccttcaagaagggggacatgtttaacctcaacgactgccacaagctcattgatttcttcaaggatagcatttcccgctacccgaaatggtccaatgcgtacgattttaacttctccgagacagaaaagtacaaagacatcgcgggcttttacagggaggtggaggagcaagggtataaagtttcttttgaatccgcgagcaagaaggaagtcgacaagctcgtcgaggagggcaagctctacatgttccaaatttataacaaggacttttccgacaagagccatgggaccccaaacctccacaccatgtacttcaaactgctctttgacgagaacaaccacgggcaaatcaggctgagcggcggcgccgaattattcatgcgcagggcctccctcaagaaggaagagctggtcgtccatccagccaattccccgatcgcgaacaagaacccggacaatccgaaaaagaccaccaccctgtcctacgacgtctacaaggacaaacgcttcagcgaagaccagtacgaattacacatcccaattgcgattaataagtgcccaaagaatatcttcaaaattaatacagaggtcagggtgctgctcaaacacgacgacaatccgtatgtcatcggcattgacaggggcgagcgcaatctgctctatatcgtggtcgtggatgggaagggcaatattgtggagcagtactccctgaacgagattatcaacaacttcaatgggattaggattaagaccgactatcacagcctgctcgacaagaaagaaaaagagaggtttgaggcccgccaaaactggacctccattgagaatatcaaagaattaaaggccggctatatttcccaagtcgtccacaagatctgcgagctggtggagaaatatgacgccgtgattgcgctcgaagacttaaattctgggttcaagaactcccgcgtgaaggtggaaaaacaggtgtatcagaaattcgagaaaatgctgatcgacaaactcaattatatggtggataagaagtccaacccgtgtgccacagggggcgcgctgaagggctatcagatcaccaacaagttcgagagcttcaagagcatgagcacccagaacgggtttattttctacatcccggcgtggctcacctccaagattgacccgagcaccggcttcgtgaacctcctgaagacaaagtatacctccattgccgacagcaagaagtttatctcctccttcgaccgcattatgtatgtgccggaggaggacctcttcgagttcgccctcgactacaaaaacttcagccgcacagatgcggattacatcaagaagtggaagctgtactcctacgggaacaggatccgcatcttcaggaatccaaaaaaaaataacgtctttgactgggaggaagtgtgcctgacatccgcctacaaggaactgttcaataaatacggcatcaattaccagcagggcgacattcgcgccctcctctgtgagcagtccgacaaagcgttttactccagcttcatggccctcatgtccctgatgctccaaatgaggaatagcatcacagggcgcaccgacgtcgacttcctcatcagcccggtgaagaactccgacgggatcttttacgactcccgcaactatgaggcgcaagagaatgcgatcctcccgaagaacgccgatgcgaacggggcctataatatcgccaggaaagtgctctgggccatcgggcagttcaaaaaggcggaggatgagaagctcgacaaggtgaaaattgccatttccaacaaggagtggctggagtacgcgcagacctccgtgaagcacggctcctctggcagctccggctctagcggctcctctggcagctccggctccaagctggagaagtttacaaactgttacagcctctccaaaaccctcaggtttaaagcgatcccggtgggcaagacccaggagaacatcgacaacaagaggctcctggtggaagacgagaagcgcgccgaagactacaagggcgtgaagaagctgctcgataggtactacctcagctttattaacgacgtgctgcacagcatcaaactcaagaatctcaacaactacatctccctcttccgcaaaaagacccgcaccgagaaggagaacaaggagctggagaacctggagatcaacctccgcaaggaaatcgccaaagcgttcaagggcaatgaagggtacaagagcctcttcaagaaagacatcatcgaaactatcctcccagagtttctcgatgacaaggacgagatcgcgctggtgaactcctttaacgggttcacaaccgcgtttaccggcttctttgataacagggaaaatatgttctccgaggaggccaagtccaccagcatcgccttcaggtgtatcaacgagaacctcacccgctacatttccaatatggacattttcgagaaggtggatgcgatcttcgataagcacgaggtgcaggagatcaaagagaagattctcaattccgattatgacgtcgaggatttcttcgaaggggagttctttaattttgtgctcacacaagagggcattgacgtgtacaacgcgattatcgggggcttcgtcacagagtccggggagaagattaaggggctgaatgagtacatcaatctgtacaatcagaagaccaagcagaaactgccgaaattcaagccgctctacaagcaagtcctgtccgatagggaaagcctctccttctacggcgagtctggcggctcaaaaagaaccgccgacggcagcgaattcgagcccaagaagaagaggaaagtcggaagcggagctactaacttcagcctgctgaagcaggctggagacgtggaggagaaccctggacctatggtgagcaagggcgaggagctgttcaccggggtggtgcccatcctggtcgagctggacggcgacgtaaacggccacaagttcagcgtgtccggcgagggcgagggcgatgccacctacggcaagctgaccctgaagttcatctgcaccaccggcaagctgcccgtgccctggcccaccctcgtgaccaccctgacctatggagtgcagtgcttcagccgctaccccgaccacatgaagcagcacgacttcttcaagtccgccatgcccgaaggctacgtccaggagcgcaccatcttcttcaaggacgacggcaactacaagacccgcgccgaggtgaagttcgagggcgacaccctggtgaaccgcatcgagctgaagggcatcgacttcaaggaggacggcaacatcctggggcacaagctggagtacaactacaacagccacaacgtctatatcatggccgacaagcagaagaacggcatcaaggtgaacttcaagatccgccacaacatcgaggacggcagcgtgcagctcgccgaccactaccagcagaacacccccatcggcgacggccccgtgctgctgcccgacaaccactacctgagcacccagtccgccctgagcaaagaccccaacgagaagcgcgatcacatggtcctgctggagttcgtgaccgccgccgggatcactctcggcatggacgagctgtacaagtctggtggttctcccaagaagaagaggaaagtctaaccggtcatcatcaccatcaccattgagtttaaacccgctgatcagcctcgactgtgccttctagttgccagccatctgttgtttgcccctcccccgtgccttccttgaccctggaaggtgccactcccactgtcctttcctaataaaatgaggaaattgcatcgcattgtctgagtaggtgtcattctattctggggggtggggtggggcaggacagcaagggggaggattgggaagacaatagcaggcatgctggggatgcggtgggctctatggcttctgaggcggaaagaaccagctggggctcgataccgtcgacctctagctagagcttggcgtaatcatggtcatagctgtttcctgtgtgaaattgttatccgctcacaattccacacaacatacgagccggaagcataaagtgtaaagcctagggtgcctaatgagtgagctaactcacattaattgcgttgcgctcactgcccgctttccagtcgggaaacctgtcgtgccagctgcattaatgaatcggccaacgcgcggggagaggcggtttgcgtattgggcgctcttccgcttcctcgctcactgactcgctgcgctcggtcgttcggctgcggcgagcggtatcagctcactcaaaggcggtaatacggttatccacagaatcaggggataacgcaggaaagaacatgtgagcaaaaggccagcaaaaggccaggaaccgtaaaaaggccgcgttgctggcgtttttccataggctccgcccccctgacgagcatcacaaaaatcgacgctcaagtcagaggtggcgaaacccgacaggactataaagataccaggcgtttccccctggaagctccctcgtgcgctctcctgttccgaccctgccgcttaccggatacctgtccgcctttctcccttcgggaagcgtggcgctttctcatagctcacgctgtaggtatctcagttcggtgtaggtcgttcgctccaagctgggctgtgtgcacgaaccccccgttcagcccgaccgctgcgccttatccggtaactatcgtcttgagtccaacccggtaagacacgacttatcgccactggcagcagccactggtaacaggattagcagagcgaggtatgtaggcggtgctacagagttcttgaagtggtggcctaactacggctacactagaagaacagtatttggtatctgcgctctgctgaagccagttaccttcggaaaaagagttggtagctcttgatccggcaaacaaaccaccgctggtagcggtggtttttttgtttgcaagcagcagattacgcgcagaaaaaaaggatctcaagaagatcctttgatcttttctacggggtctgacactcagtggaacgaaaactcacgttaagggattttggtcatgagattatcaaaaaggatcttcacctagatccttttaaattaaaaatgaagttttaaatcaatctaaagtatatatgagtaaacttggtctgacagttaccaatgcttaatcagtgaggcacctatctcagcgatctgtctatttcgttcatccatagttgcctgactccccgtcgtgtagataactacgatacgggagggcttaccatctggccccagtgctgcaatgataccgcgagacccacgctcaccggctccagatttatcagcaataaaccagccagccggaagggccgagcgcagaagtggtcctgcaactttatccgcctccatccagtctattaattgttgccgggaagctagagtaagtagttcgccagttaatagtttgcgcaacgttgttgccattgctacaggcatcgtggtgtcacgctcgtcgtttggtatggcttcattcagctccggttcccaacgatcaaggcgagttacatgatcccccatgttgtgcaaaaaagcggttagctccttcggtcctccgatcgttgtcagaagtaagttggccgcagtgttatcactcatggttatggcagcactgcataattctcttactgtcatgccatccgtaagatgcttttctgtgactggtgagtactcaaccaagtcattctgagaatagtgtatgcggcgaccgagttgctcttgcccggcgtcaatacgggataataccgcgccacatagcagaactttaaaagtgctcatcattggaaaacgttcttcggggcgaaaactctcaaggatcttaccgctgttgagatccagttcgatgtaacccactcgtgcacccaactgatcttcagcatcttttactttcaccagcgtttctgggtgagcaaaaacaggaaggcaaaatgccgcaaaaaagggaataagggcgacacggaaatgttgaatactcatactcttcctttttcaatattattgaagcatttatcagggttattgtctcatgagcggatacatatttgaatgtatttagaaaaataaacaaataggggttccgcgcacatttccccgaaaagtgccacctgacgtcgacggatcgggagatcgatctcccgatcccctagggtcgactctcagtacaatctgctctgatgccgcatagttaagccagtatctgctccctgcttgtgtgttggaggtcgctgagtagtgcgcgagcaaaatttaagctacaacaaggcaaggcttgaccgacaattgcatgaagaatctgcttagggttaggcgttttgcgctgcttcgcgatgtacgggccagatatacgcgtt

SEQ ID NO: 264 - DNA, 8049 bp, synthetic construct
  source 1..8049: mol_type = other DNA
gttatggcagcactgcataattctcttactgtcatgccatccgtaagatgcttttctgtgactggtgagtactcaaccaagtcattctgagaatagtgtatgcggcgaccgagttgctcttgcccggcgtcaatacgggataataccgcgccacatagcagaactttaaaagtgctcatcattggaaaacgttcttcggggcgaaaactctcaaggatcttaccgctgttgagatccagttcgatgtaacccactcgtgcacccaactgatcttcagcatcttttactttcaccagcgtttctgggtgagcaaaaacaggaaggcaaaatgccgcaaaaaagggaataagggcgacacggaaatgttgaatactcatactcttcctttttcaatattattgaagcatttatcagggttattgtctcatgagcggatacatatttgaatgtatttagaaaaataaacaaataggggttccgcgcacatttccccgaaaagtgccacctgacgtcgacggatcgggagatcgatctcccgatcccctagggtcgactctcagtacaatctgctctgatgccgcatagttaagccagtatctgctccctgcttgtgtgttggaggtcgctgagtagtgcgcgagcaaaatttaagctacaacaaggcaaggcttgaccgacaattgcatgaagaatctgcttagggttaggcgttttgcgctgcttcgcgatgtacgggccagatatacgcgttgacattgattattgactagttattaatagtaatcaattacggggtcattagttcatagcccatatatggagttccgcgttacataacttacggtaaatggcccgcctggctgaccgcccaacgacccccgcccattgacgtcaataatgacgtatgttcccatagtaacgccaatagggactttccattgacgtcaatgggtggagtatttacggtaaactgcccacttggcagtacatcaagtgtatcatatgccaagtacgccccctattgacgtcaatgacggtaaatggcccgcctggcattatgcccagtacatgaccttatgggactttcctacttggcagtacatctacgtattagtcatcgctattaccatggtgatgcggttttggcagtacatcaatgggcgtggatagcggtttgactcacggggatttccaagtctccaccccattgacgtcaatgggagtttgttttggcaccaaaatcaacgggactttccaaaatgtcgtaacaactccgccccattgacgcaaatgggcggtaggcgtgtacggtgggaggtctatataagcagagctggtttagtgaaccgtcagatccgctagagatccgcggccgctaatacgactcactatagggagagccgccaccatgaaacggacagccgacggaagcgagttcgagtcaccaaagaagaagcggaaagtctccgacgggatcttttacgactcccgcaactatgaggcgcaagagaatgcgatcctcccgaagaacgccgatgcgaacggggcctataatatcgccaggaaagtgctctgggccatcgggcagttcaaaaaggcggaggatgagaagctcgacaaggtgaaaattgccatttccaacaaggagtggctggagtacgcgcagacctccgtgaagcacggctcctctggcagctccggctctagcggctccaagctggagaagtttacaaactgttacagcctctccaaaaccctcaggtttaaagcgatcccggtgggcaagacccaggagaacatcgacaacaagaggctcctggtggaagacgagaagcgcgccgaagactacaagggcgtgaagaagctgctcgataggtactacctcagctttattaacgacgtgctgcacagcatcaaactcaagaatctcaacaactacatctccctcttccgcaaaaagacccgcaccgagaaggagaacaaggagctggagaacctggagatcaacctccgcaaggaaatcgccaaagcgttcaagggcaatgaagggtacaagagcctcttcaagaaagacatcatcgaaactatcctcccagagtttctcgatgacaaggacgagatcgcgctggtgaactcctttaacgggttcacaaccgcgtttaccggcttctttgataacagggaaaatatgttctccgaggaggccaagtccaccagcatcgccttcaggtgtatcaacgagaacctcacccgctacatttccaatatggacattttcgagaaggtggatgcgatcttcgataagcacgaggtgcaggagatcaaagagaagattctcaattccgattatgacgtcgaggatttcttcgaaggggagttctttaattttgtgctcacacaagagggcattgacgtgtacaacgcgattatcgggggcttcgtcacagagtccggggagaagattaaggggctgaatgagtacatcaatctgtacaatcagaagaccaagcagaaactgccgaaattcaagccgctctacaagcaagtcctgtccgatagggaaagcctctccttctacggcgagggctataccagcgacgaggaggtgctggaagtcttccgcaacacactgaataagaatagcgagattttctcctccatcaagaagctcgagaagctctttaagaactttgacgagtacagctccgccgggattttcgtgaagaacgggccggcgatcagcaccatctccaaggacatctttggcgagtggaacgtcatcagggacaagtggaacgccgagtacgacgacatccacctgaagaagaaggcggtggtgaccgagaagtatgaggacgatcgcaggaagtccttcaaaaaaatcggctccttcagcctcgaacagctccaggagtatgccgatgcggatctgtccgtcgtcgagaagctgaaggaaatcatcattcagaaggtcgacgagatctataaagtgtacgggtccagcgagaagctgttcgacgccgactttgtgctcgagaagtccctcaaaaagaatgacgccgtggtggccattatgaaagacctgctcgactccgtgaagtccttcgaaaattacattaaagcgttctttggggaggggaaggaaactaacagggatgagtccttctatggcgactttgtcctcgcgtacgacatcctgctgaaggtcgaccacatttacgacgcgatccgcaactacgtgacacagaagccgtactccaaagacaagttcaagctgtacttccagaacccgcaatttatggggggctgggacaaggataaagagacagactaccgcgcgacaattctccgctatggctccaaatactatctggccatcatggacaagaagtacgcgaagtgcctgcagaagatcgacaaagacgacgtcaatggcaactatgaaaagatcaactacaagctgctgccgggcccgaacaagatgctcccgaaggtgttcttcagcaagaagtggatggcctactacaatccaagcgaggatattcagaaaatctataaaaacgggaccttcaagaagggggacatgtttaacctcaacgactgccacaagctcattgatttcttcaaggatagcatttcccgctacccgaaatggtccaatgcgtacgattttaacttctccgagacagaaaagtacaaagacatcgcgggcttttacagggaggtggaggagcaagggtataaagtttcttttgaatccgcgagcaagaaggaagtcgacaagctcgtcgaggagggcaagctctacatgttccaaatttataacaaggacttttccgacaagagccatgggaccccaaacctccacaccatgtacttcaaactgctctttgacgagaacaaccacgggcaaatcaggctgagcggcggcgccgaattattcatgcgcagggcctccctcaagaaggaagagctggtcgtccatccagccaattccccgatcgcgaacaagaacccggacaatccgaaaaagaccaccaccctgtcctacgacgtctacaaggacaaacgcttcagcgaagaccagtacgaattacacatcccaattgcgattaataagtgcccaaagaatatcttcaaaattaatacagaggtcagggtgctgctcaaacacgacgacaatccgtatgtcatcggcattgacaggggcgagcgcaatctgctctatatcgtggtcgtggatgggaagggcaatattgtggagcagtactccctgaacgagattatcaacaacttcaatgggattaggattaagaccgactatcacagcctgctcgacaagaaagaaaaagagaggtttgaggcccgccaaaactggacctccattgagaatatcaaagaattaaaggccggctatatttcccaagtcgtccacaagatctgcgagctggtggagaaatatgacgccgtgattgcgctcgaagacttaaattctgggttcaagaactcccgcgtgaaggtggaaaaacaggtgtatcagaaattcgagaaaatgctgatcgacaaactcaattatatggtggataagaagtccaacccgtgtgccacagggggcgcgctgaagggctatcagatcaccaacaagttcgagagcttcaagagcatgagcacccagaacgggtttattttctacatcccggcgtggctcacctccaagattgacccgagcaccggcttcgtgaacctcctgaagacaaagtatacctccattgccgacagcaagaagtttatctcctccttcgaccgcattatgtatgtgccggaggaggacctcttcgagttcgccctcgactacaaaaacttcagccgcacagatgcggattacatcaagaagtggaagctgtactcctacgggaacaggatccgcatcttcaggaatccaaaaaaaaataacgtctttgactgggaggaagtgtgcctgacatccgcctacaaggaactgttcaataaatacggcatcaattaccagcagggcgacattcgcgccctcctctgtgagcagtccgacaaagcgttttactccagcttcatggccctcatgtccctgatgctccaaatgaggaatagcatcacagggcgcaccgacgtcgacttcctcatcagcccggtgaagaactctggcggctcaaaaagaaccgccgacggcagcgaattcgagcccaagaagaagaggaaagtcggaagcggagctactaacttcagcctgctgaagcaggctggagacgtggaggagaaccctggacctatggtgagcaagggcgaggagctgttcaccggggtggtgcccatcctggtcgagctggacggcgacgtaaacggccacaagttcagcgtgtccggcgagggcgagggcgatgccacctacggcaagctgaccctgaagttcatctgcaccaccggcaagctgcccgtgccctggcccaccctcgtgaccaccctgacctatggagtgcagtgcttcagccgctaccccgaccacatgaagcagcacgacttcttcaagtccgccatgcccgaaggctacgtccaggagcgcaccatcttcttcaaggacgacggcaactacaagacccgcgccgaggtgaagttcgagggcgacaccctggtgaaccgcatcgagctgaagggcatcgacttcaaggaggacggcaacatcctggggcacaagctggagtacaactacaacagccacaacgtctatatcatggccgacaagcagaagaacggcatcaaggtgaacttcaagatccgccacaacatcgaggacggcagcgtgcagctcgccgaccactaccagcagaacacccccatcggcgacggccccgtgctgctgcccgacaaccactacctgagcacccagtccgccctgagcaaagaccccaacgagaagcgcgatcacatggtcctgctggagttcgtgaccgccgccgggatcactctcggcatggacgagctgtacaagtctggtggttctcccaagaagaagaggaaagtctaaccggtcatcatcaccatcaccattgagtttaaacccgctgatcagcctcgactgtgccttctagttgccagccatctgttgtttgcccctcccccgtgccttccttgaccctggaaggtgccactcccactgtcctttcctaataaaatgaggaaattgcatcgcattgtctgagtaggtgtcattctattctggggggtggggtggggcaggacagcaagggggaggattgggaagacaatagcaggcatgctggggatgcggtgggctctatggcttctgaggcggaaagaaccagctggggctcgataccgtcgacctctagctagagcttggcgtaatcatggtcatagctgtttcctgtgtgaaattgttatccgctcacaattccacacaacatacgagccggaagcataaagtgtaaagcctagggtgcctaatgagtgagctaactcacattaattgcgttgcgctcactgcccgctttccagtcgggaaacctgtcgtgccagctgcattaatgaatcggccaacgcgcggggagaggcggtttgcgtattgggcgctcttccgcttcctcgctcactgactcgctgcgctcggtcgttcggctgcggcgagcggtatcagctcactcaaaggcggtaatacggttatccacagaatcaggggataacgcaggaaagaacatgtgagcaaaaggccagcaaaaggccaggaaccgtaaaaaggccgcgttgctggcgtttttccataggctccgcccccctgacgagcatcacaaaaatcgacgctcaagtcagaggtggcgaaacccgacaggactataaagataccaggcgtttccccctggaagctccctcgtgcgctctcctgttccgaccctgccgcttaccggatacctgtccgcctttctcccttcgggaagcgtggcgctttctcatagctcacgctgtaggtatctcagttcggtgtaggtcgttcgctccaagctgggctgtgtgcacgaaccccccgttcagcccgaccgctgcgccttatccggtaactatcgtcttgagtccaacccggtaagacacgacttatcgccactggcagcagccactggtaacaggattagcagagcgaggtatgtaggcggtgctacagagttcttgaagtggtggcctaactacggctacactagaagaacagtatttggtatctgcgctctgctgaagccagttaccttcggaaaaagagttggtagctcttgatccggcaaacaaaccaccgctggtagcggtggtttttttgtttgcaagcagcagattacgcgcagaaaaaaaggatctcaagaagatcctttgatcttttctacggggtctgacactcagtggaacgaaaactcacgttaagggattttggtcatgagattatcaaaaaggatcttcacctagatccttttaaattaaaaatgaagttttaaatcaatctaaagtatatatgagtaaacttggtctgacagttaccaatgcttaatcagtgaggcacctatctcagcgatctgtctatttcgttcatccatagttgcctgactccccgtcgtgtagataactacgatacgggagggcttaccatctggccccagtgctgcaatgataccgcgagacccacgctcaccggctccagatttatcagcaataaaccagccagccggaagggccgagcgcagaagtggtcctgcaactttatccgcctccatccagtctattaattgttgccgggaagctagagtaagtagttcgccagttaatagtttgcgcaacgttgttgccattgctacaggcatcgtggtgtcacgctcgtcgtttggtatggcttcattcagctccggttcccaacgatcaaggcgagttacatgatcccccatgttgtgcaaaaaagcggttagctccttcggtcctccgatcgttgtcagaagtaagttggccgcagtgttatcactcatg

SEQ ID NO: 265 - DNA, 8067 bp, synthetic construct
  source 1..8067: mol_type = other DNA
aggatttcttcgaaggggagttctttaattttgtgctcacacaagagggcattgacgtgtacaacgcgattatcgggggcttcgtcacagagtccggggagaagattaaggggctgaatgagtacatcaatctgtacaatcagaagaccaagcagaaactgccgaaattcaagccgctctacaagcaagtcctgtccgatagggaaagcctctccttctacggcgagggctataccagcgacgaggaggtgctggaagtcttccgcaacacactgaataagaatagcgagattttctcctccatcaagaagctcgagaagctctttaagaactttgacgagtacagctccgccgggattttcgtgaagaacgggccggcgatcagcaccatctccaaggacatctttggcgagtggaacgtcatcagggacaagtggaacgccgagtacgacgacatccacctgaagaagaaggcggtggtgaccgagaagtatgaggacgatcgcaggaagtccttcaaaaaaatcggctccttcagcctcgaacagctccaggagtatgccgatgcggatctgtccgtcgtcgagaagctgaaggaaatcatcattcagaaggtcgacgagatctataaagtgtacgggtccagcgagaagctgttcgacgccgactttgtgctcgagaagtccctcaaaaagaatgacgccgtggtggccattatgaaagacctgctcgactccgtgaagtccttcgaaaattacattaaagcgttctttggggaggggaaggaaactaacagggatgagtccttctatggcgactttgtcctcgcgtacgacatcctgctgaaggtcgaccacatttacgacgcgatccgcaactacgtgacacagaagccgtactccaaagacaagttcaagctgtacttccagaacccgcaatttatggggggctgggacaaggataaagagacagactaccgcgcgacaattctccgctatggctccaaatactatctggccatcatggacaagaagtacgcgaagtgcctgcagaagatcgacaaagacgacgtcaatggcaactatgaaaagatcaactacaagctgctgccgggcccgaacaagatgctcccgaaggtgttcttcagcaagaagtggatggcctactacaatccaagcgaggatattcagaaaatctataaaaacgggaccttcaagaagggggacatgtttaacctcaacgactgccacaagctcattgatttcttcaaggatagcatttcccgctacccgaaatggtccaatgcgtacgattttaacttctccgagacagaaaagtacaaagacatcgcgggcttttacagggaggtggaggagcaagggtataaagtttcttttgaatccgcgagcaagaaggaagtcgacaagctcgtcgaggagggcaagctctacatgttccaaatttataacaaggacttttccgacaagagccatgggaccccaaacctccacaccatgtacttcaaactgctctttgacgagaacaaccacgggcaaatcaggctgagcggcggcgccgaattattcatgcgcagggcctccctcaagaaggaagagctggtcgtccatccagccaattccccgatcgcgaacaagaacccggacaatccgaaaaagaccaccaccctgtcctacgacgtctacaaggacaaacgcttcagcgaagaccagtacgaattacacatcccaattgcgattaataagtgcccaaagaatatcttcaaaattaatacagaggtcagggtgctgctcaaacacgacgacaatccgtatgtcatcggcattgacaggggcgagcgcaatctgctctatatcgtggtcgtggatgggaagggcaatattgtggagcagtactccctgaacgagattatcaacaacttcaatgggattaggattaagaccgactatcacagcctgctcgacaagaaagaaaaagagaggtttgaggcccgccaaaactggacctccattgagaatatcaaagaattaaaggccggctatatttcccaagtcgtccacaagatctgcgagctggtggagaaatatgacgccgtgattgcgctcgaagacttaaattctgggttcaagaactcccgcgtgaaggtggaaaaacaggtgtatcagaaattcgagaaaatgctgatcgacaaactcaattatatggtggataagaagtccaacccgtgtgccacagggggcgcgctgaagggctatcagatcaccaacaagttcgagagcttcaagagcatgagcacccagaacgggtttattttctacatcccggcgtggctcacctccaagattgacccgagcaccggcttcgtgaacctcctgaagacaaagtatacctccattgccgacagcaagaagtttatctcctccttcgaccgcattatgtatgtgccggaggaggacctcttcgagttcgccctcgactacaaaaacttcagccgcacagatgcggattacatcaagaagtggaagctgtactcctacgggaacaggatccgcatcttcaggaatccaaaaaaaaataacgtctttgactgggaggaagtgtgcctgacatccgcctacaaggaactgttcaataaatacggcatcaattaccagcagggcgacattcgcgccctcctctgtgagcagtccgacaaagcgttttactccagcttcatggccctcatgtccctgatgctccaaatgaggaatagcatcacagggcgcaccgacgtcgacttcctcatcagcccggtgaagaactctggcggctcaaaaagaaccgccgacggcagcgaattcgagcccaagaagaagaggaaagtcggaagcggagctactaacttcagcctgctgaagcaggctggagacgtggaggagaaccctggacctatggtgagcaagggcgaggagctgttcaccggggtggtgcccatcctggtcgagctggacggcgacgtaaacggccacaagttcagcgtgtccggcgagggcgagggcgatgccacctacggcaagctgaccctgaagttcatctgcaccaccggcaagctgcccgtgccctggcccaccctcgtgaccaccctgacctatggagtgcagtgcttcagccgctaccccgaccacatgaagcagcacgacttcttcaagtccgccatgcccgaaggctacgtccaggagcgcaccatcttcttcaaggacgacggcaactacaagacccgcgccgaggtgaagttcgagggcgacaccctggtgaaccgcatcgagctgaagggcatcgacttcaaggaggacggcaacatcctggggcacaagctggagtacaactacaacagccacaacgtctatatcatggccgacaagcagaagaacggcatcaaggtgaacttcaagatccgccacaacatcgaggacggcagcgtgcagctcgccgaccactaccagcagaacacccccatcggcgacggccccgtgctgctgcccgacaaccactacctgagcacccagtccgccctgagcaaagaccccaacgagaagcgcgatcacatggtcctgctggagttcgtgaccgccgccgggatcactctcggcatggacgagctgtacaagtctggtggttctcccaagaagaagaggaaagtctaaccggtcatcatcaccatcaccattgagtttaaacccgctgatcagcctcgactgtgccttctagttgccagccatctgttgtttgcccctcccccgtgccttccttgaccctggaaggtgccactcccactgtcctttcctaataaaatgaggaaattgcatcgcattgtctgagtaggtgtcattctattctggggggtggggtggggcaggacagcaagggggaggattgggaagacaatagcaggcatgctggggatgcggtgggctctatggcttctgaggcggaaagaaccagctggggctcgataccgtcgacctctagctagagcttggcgtaatcatggtcatagctgtttcctgtgtgaaattgttatccgctcacaattccacacaacatacgagccggaagcataaagtgtaaagcctagggtgcctaatgagtgagctaactcacattaattgcgttgcgctcactgcccgctttccagtcgggaaacctgtcgtgccagctgcattaatgaatcggccaacgcgcggggagaggcggtttgcgtattgggcgctcttccgcttcctcgctcactgactcgctgcgctcggtcgttcggctgcggcgagcggtatcagctcactcaaaggcggtaatacggttatccacagaatcaggggataacgcaggaaagaacatgtgagcaaaaggccagcaaaaggccaggaaccgtaaaaaggccgcgttgctggcgtttttccataggctccgcccccctgacgagcatcacaaaaatcgacgctcaagtcagaggtggcgaaacccgacaggactataaagataccaggcgtttccccctggaagctccctcgtgcgctctcctgttccgaccctgccgcttaccggatacctgtccgcctttctcccttcgggaagcgtggcgctttctcatagctcacgctgtaggtatctcagttcggtgtaggtcgttcgctccaagctgggctgtgtgcacgaaccccccgttcagcccgaccgctgcgccttatccggtaactatcgtcttgagtccaacccggtaagacacgacttatcgccactggcagcagccactggtaacaggattagcagagcgaggtatgtaggcggtgctacagagttcttgaagtggtggcctaactacggctacactagaagaacagtatttggtatctgcgctctgctgaagccagttaccttcggaaaaagagttggtagctcttgatccggcaaacaaaccaccgctggtagcggtggtttttttgtttgcaagcagcagattacgcgcagaaaaaaaggatctcaagaagatcctttgatcttttctacggggtctgacactcagtggaacgaaaactcacgttaagggattttggtcatgagattatcaaaaaggatcttcacctagatccttttaaattaaaaatgaagttttaaatcaatctaaagtatatatgagtaaacttggtctgacagttaccaatgcttaatcagtgaggcacctatctcagcgatctgtctatttcgttcatccatagttgcctgactccccgtcgtgtagataactacgatacgggagggcttaccatctggccccagtgctgcaatgataccgcgagacccacgctcaccggctccagatttatcagcaataaaccagccagccggaagggccgagcgcagaagtggtcctgcaactttatccgcctccatccagtctattaattgttgccgggaagctagagtaagtagttcgccagttaatagtttgcgcaacgttgttgccattgctacaggcatcgtggtgtcacgctcgtcgtttggtatggcttcattcagctccggttcccaacgatcaaggcgagttacatgatcccccatgttgtgcaaaaaagcggttagctccttcggtcctccgatcgttgtcagaagtaagttggccgcagtgttatcactcatggttatggcagcactgcataattctcttactgtcatgccatccgtaagatgcttttctgtgactggtgagtactcaaccaagtcattctgagaatagtgtatgcggcgaccgagttgctcttgcccggcgtcaatacgggataataccgcgccacatagcagaactttaaaagtgctcatcattggaaaacgttcttcggggcgaaaactctcaaggatcttaccgctgttgagatccagttcgatgtaacccactcgtgcacccaactgatcttcagcatcttttactttcaccagcgtttctgggtgagcaaaaacaggaaggcaaaatgccgcaaaaaagggaataagggcgacacggaaatgttgaatactcatactcttcctttttcaatattattgaagcatttatcagggttattgtctcatgagcggatacatatttgaatgtatttagaaaaataaacaaataggggttccgcgcacatttccccgaaaagtgccacctgacgtcgacggatcgggagatcgatctcccgatcccctagggtcgactctcagtacaatctgctctgatgccgcatagttaagccagtatctgctccctgcttgtgtgttggaggtcgctgagtagtgcgcgagcaaaatttaagctacaacaaggcaaggcttgaccgacaattgcatgaagaatctgcttagggttaggcgttttgcgctgcttcgcgatgtacgggccagatatacgcgttgacattgattattgactagttattaatagtaatcaattacggggtcattagttcatagcccatatatggagttccgcgttacataacttacggtaaatggcccgcctggctgaccgcccaacgacccccgcccattgacgtcaataatgacgtatgttcccatagtaacgccaatagggactttccattgacgtcaatgggtggagtatttacggtaaactgcccacttggcagtacatcaagtgtatcatatgccaagtacgccccctattgacgtcaatgacggtaaatggcccgcctggcattatgcccagtacatgaccttatgggactttcctacttggcagtacatctacgtattagtcatcgctattaccatggtgatgcggttttggcagtacatcaatgggcgtggatagcggtttgactcacggggatttccaagtctccaccccattgacgtcaatgggagtttgttttggcaccaaaatcaacgggactttccaaaatgtcgtaacaactccgccccattgacgcaaatgggcggtaggcgtgtacggtgggaggtctatataagcagagctggtttagtgaaccgtcagatccgctagagatccgcggccgctaatacgactcactatagggagagccgccaccatgaaacggacagccgacggaagcgagttcgagtcaccaaagaagaagcggaaagtctccgacgggatcttttacgactcccgcaactatgaggcgcaagagaatgcgatcctcccgaagaacgccgatgcgaacggggcctataatatcgccaggaaagtgctctgggccatcgggcagttcaaaaaggcggaggatgagaagctcgacaaggtgaaaattgccatttccaacaaggagtggctggagtacgcgcagacctccgtgaagcacggctcctctggcagctccggctctagcggctcctctggcagctccggctccaagctggagaagtttacaaactgttacagcctctccaaaaccctcaggtttaaagcgatcccggtgggcaagacccaggagaacatcgacaacaagaggctcctggtggaagacgagaagcgcgccgaagactacaagggcgtgaagaagctgctcgataggtactacctcagctttattaacgacgtgctgcacagcatcaaactcaagaatctcaacaactacatctccctcttccgcaaaaagacccgcaccgagaaggagaacaaggagctggagaacctggagatcaacctccgcaaggaaatcgccaaagcgttcaagggcaatgaagggtacaagagcctcttcaagaaagacatcatcgaaactatcctcccagagtttctcgatgacaaggacgagatcgcgctggtgaactcctttaacgggttcacaaccgcgtttaccggcttctttgataacagggaaaatatgttctccgaggaggccaagtccaccagcatcgccttcaggtgtatcaacgagaacctcacccgctacatttccaatatggacattttcgagaaggtggatgcgatcttcgataagcacgaggtgcaggagatcaaagagaagattctcaattccgattatgacgtcg

SEQ ID NO: 266 - DNA, 8049 bp, synthetic construct
  source 1..8049: mol_type = other DNA
cccaactgatcttcagcatcttttactttcaccagcgtttctgggtgagcaaaaacaggaaggcaaaatgccgcaaaaaagggaataagggcgacacggaaatgttgaatactcatactcttcctttttcaatattattgaagcatttatcagggttattgtctcatgagcggatacatatttgaatgtatttagaaaaataaacaaataggggttccgcgcacatttccccgaaaagtgccacctgacgtcgacggatcgggagatcgatctcccgatcccctagggtcgactctcagtacaatctgctctgatgccgcatagttaagccagtatctgctccctgcttgtgtgttggaggtcgctgagtagtgcgcgagcaaaatttaagctacaacaaggcaaggcttgaccgacaattgcatgaagaatctgcttagggttaggcgttttgcgctgcttcgcgatgtacgggccagatatacgcgttgacattgattattgactagttattaatagtaatcaattacggggtcattagttcatagcccatatatggagttccgcgttacataacttacggtaaatggcccgcctggctgaccgcccaacgacccccgcccattgacgtcaataatgacgtatgttcccatagtaacgccaatagggactttccattgacgtcaatgggtggagtatttacggtaaactgcccacttggcagtacatcaagtgtatcatatgccaagtacgccccctattgacgtcaatgacggtaaatggcccgcctggcattatgcccagtacatgaccttatgggactttcctacttggcagtacatctacgtattagtcatcgctattaccatggtgatgcggttttggcagtacatcaatgggcgtggatagcggtttgactcacggggatttccaagtctccaccccattgacgtcaatgggagtttgttttggcaccaaaatcaacgggactttccaaaatgtcgtaacaactccgccccattgacgcaaatgggcggtaggcgtgtacggtgggaggtctatataagcagagctggtttagtgaaccgtcagatccgctagagatccgcggccgctaatacgactcactatagggagagccgccaccatgaaacggacagccgacggaagcgagttcgagtcaccaaagaagaagcggaaagtcaaagacaagttcaagctgtacttccagaacccgcaatttatggggggctgggacaaggataaagagacagactaccgcgcgacaattctccgctatggctccaaatactatctggccatcatggacaagaagtacgcgaagtgcctgcagaagatcgacaaagacgacgtcaatggcaactatgaaaagatcaactacaagctgctgccgggcccgaacaagatgctcccgaaggtgttcttcagcaagaagtggatggcctactacaatccaagcgaggatattcagaaaatctataaaaacgggaccttcaagaagggggacatgtttaacctcaacgactgccacaagctcattgatttcttcaaggatagcatttcccgctacccgaaatggtccaatgcgtacgattttaacttctccgagacagaaaagtacaaagacatcgcgggcttttacagggaggtggaggagcaagggtataaagtttcttttgaatccgcgagcaagaaggaagtcgacaagctcgtcgaggagggcaagctctacatgttccaaatttataacaaggacttttccgacaagagccatgggaccccaaacctccacaccatgtacttcaaactgctctttgacgagaacaaccacgggcaaatcaggctgagcggcggcgccgaattattcatgcgcagggcctccctcaagaaggaagagctggtcgtccatccagccaattccccgatcgcgaacaagaacccggacaatccgaaaaagaccaccaccctgtcctacgacgtctacaaggacaaacgcttcagcgaagaccagtacgaattacacatcccaattgcgattaataagtgcccaaagaatatcttcaaaattaatacagaggtcagggtgctgctcaaacacgacgacaatccgtatgtcatcggcattgacaggggcgagcgcaatctgctctatatcgtggtcgtggatgggaagggcaatattgtggagcagtactccctgaacgagattatcaacaacttcaatgggattaggattaagaccgactatcacagcctgctcgacaagaaagaaaaagagaggtttgaggcccgccaaaactggacctccattgagaatatcaaagaattaaaggccggctatatttcccaagtcgtccacaagatctgcgagctggtggagaaatatgacgccgtgattgcgctcgaagacttaaattctgggttcaagaactcccgcgtgaaggtggaaaaacaggtgtatcagaaattcgagaaaatgctgatcgacaaactcaattatatggtggataagaagtccaacccgtgtgccacagggggcgcgctgaagggctatcagatcaccaacaagttcgagagcttcaagagcatgagcacccagaacgggtttattttctacatcccggcgtggctcacctccaagattgacccgagcaccggcttcgtgaacctcctgaagacaaagtatacctccattgccgacagcaagaagtttatctcctccttcgaccgcattatgtatgtgccggaggaggacctcttcgagttcgccctcgactacaaaaacttcagccgcacagatgcggattacatcaagaagtggaagctgtactcctacgggaacaggatccgcatcttcaggaatccaaaaaaaaataacgtctttgactgggaggaagtgtgcctgacatccgcctacaaggaactgttcaataaatacggcatcaattaccagcagggcgacattcgcgccctcctctgtgagcagtccgacaaagcgttttactccagcttcatggccctcatgtccctgatgctccaaatgaggaatagcatcacagggcgcaccgacgtcgacttcctcatcagcccggtgaagaactccgacgggatcttttacgactcccgcaactatgaggcgcaagagaatgcgatcctcccgaagaacgccgatgcgaacggggcctataatatcgccaggaaagtgctctgggccatcgggcagttcaaaaaggcggaggatgagaagctcgacaaggtgaaaattgccatttccaacaaggagtggctggagtacgcgcagacctccgtgaagcacggctcctctggcagctccggctctagcggctccaagctggagaagtttacaaactgttacagcctctccaaaaccctcaggtttaaagcgatcccggtgggcaagacccaggagaacatcgacaacaagaggctcctggtggaagacgagaagcgcgccgaagactacaagggcgtgaagaagctgctcgataggtactacctcagctttattaacgacgtgctgcacagcatcaaactcaagaatctcaacaactacatctccctcttccgcaaaaagacccgcaccgagaaggagaacaaggagctggagaacctggagatcaacctccgcaaggaaatcgccaaagcgttcaagggcaatgaagggtacaagagcctcttcaagaaagacatcatcgaaactatcctcccagagtttctcgatgacaaggacgagatcgcgctggtgaactcctttaacgggttcacaaccgcgtttaccggcttctttgataacagggaaaatatgttctccgaggaggccaagtccaccagcatcgccttcaggtgtatcaacgagaacctcacccgctacatttccaatatggacattttcgagaaggtggatgcgatcttcgataagcacgaggtgcaggagatcaaagagaagattctcaattccgattatgacgtcgaggatttcttcgaaggggagttctttaattttgtgctcacacaagagggcattgacgtgtacaacgcgattatcgggggcttcgtcacagagtccggggagaagattaaggggctgaatgagtacatcaatctgtacaatcagaagaccaagcagaaactgccgaaattcaagccgctctacaagcaagtcctgtccgatagggaaagcctctccttctacggcgagggctataccagcgacgaggaggtgctggaagtcttccgcaacacactgaataagaatagcgagattttctcctccatcaagaagctcgagaagctctttaagaactttgacgagtacagctccgccgggattttcgtgaagaacgggccggcgatcagcaccatctccaaggacatctttggcgagtggaacgtcatcagggacaagtggaacgccgagtacgacgacatccacctgaagaagaaggcggtggtgaccgagaagtatgaggacgatcgcaggaagtccttcaaaaaaatcggctccttcagcctcgaacagctccaggagtatgccgatgcggatctgtccgtcgtcgagaagctgaaggaaatcatcattcagaaggtcgacgagatctataaagtgtacgggtccagcgagaagctgttcgacgccgactttgtgctcgagaagtccctcaaaaagaatgacgccgtggtggccattatgaaagacctgctcgactccgtgaagtccttcgaaaattacattaaagcgttctttggggaggggaaggaaactaacagggatgagtccttctatggcgactttgtcctcgcgtacgacatcctgctgaaggtcgaccacatttacgacgcgatccgcaactacgtgacacagaagccgtactcctctggcggctcaaaaagaaccgccgacggcagcgaattcgagcccaagaagaagaggaaagtcggaagcggagctactaacttcagcctgctgaagcaggctggagacgtggaggagaaccctggacctatggtgagcaagggcgaggagctgttcaccggggtggtgcccatcctggtcgagctggacggcgacgtaaacggccacaagttcagcgtgtccggcgagggcgagggcgatgccacctacggcaagctgaccctgaagttcatctgcaccaccggcaagctgcccgtgccctggcccaccctcgtgaccaccctgacctatggagtgcagtgcttcagccgctaccccgaccacatgaagcagcacgacttcttcaagtccgccatgcccgaaggctacgtccaggagcgcaccatcttcttcaaggacgacggcaactacaagacccgcgccgaggtgaagttcgagggcgacaccctggtgaaccgcatcgagctgaagggcatcgacttcaaggaggacggcaacatcctggggcacaagctggagtacaactacaacagccacaacgtctatatcatggccgacaagcagaagaacggcatcaaggtgaacttcaagatccgccacaacatcgaggacggcagcgtgcagctcgccgaccactaccagcagaacacccccatcggcgacggccccgtgctgctgcccgacaaccactacctgagcacccagtccgccctgagcaaagaccccaacgagaagcgcgatcacatggtcctgctggagttcgtgaccgccgccgggatcactctcggcatggacgagctgtacaagtctggtggttctcccaagaagaagaggaaagtctaaccggtcatcatcaccatcaccattgagtttaaacccgctgatcagcctcgactgtgccttctagttgccagccatctgttgtttgcccctcccccgtgccttccttgaccctggaaggtgccactcccactgtcctttcctaataaaatgaggaaattgcatcgcattgtctgagtaggtgtcattctattctggggggtggggtggggcaggacagcaagggggaggattgggaagacaatagcaggcatgctggggatgcggtgggctctatggcttctgaggcggaaagaaccagctggggctcgataccgtcgacctctagctagagcttggcgtaatcatggtcatagctgtttcctgtgtgaaattgttatccgctcacaattccacacaacatacgagccggaagcataaagtgtaaagcctagggtgcctaatgagtgagctaactcacattaattgcgttgcgctcactgcccgctttccagtcgggaaacctgtcgtgccagctgcattaatgaatcggccaacgcgcggggagaggcggtttgcgtattgggcgctcttccgcttcctcgctcactgactcgctgcgctcggtcgttcggctgcggcgagcggtatcagctcactcaaaggcggtaatacggttatccacagaatcaggggataacgcaggaaagaacatgtgagcaaaaggccagcaaaaggccaggaaccgtaaaaaggccgcgttgctggcgtttttccataggctccgcccccctgacgagcatcacaaaaatcgacgctcaagtcagaggtggcgaaacccgacaggactataaagataccaggcgtttccccctggaagctccctcgtgcgctctcctgttccgaccctgccgcttaccggatacctgtccgcctttctcccttcgggaagcgtggcgctttctcatagctcacgctgtaggtatctcagttcggtgtaggtcgttcgctccaagctgggctgtgtgcacgaaccccccgttcagcccgaccgctgcgccttatccggtaactatcgtcttgagtccaacccggtaagacacgacttatcgccactggcagcagccactggtaacaggattagcagagcgaggtatgtaggcggtgctacagagttcttgaagtggtggcctaactacggctacactagaagaacagtatttggtatctgcgctctgctgaagccagttaccttcggaaaaagagttggtagctcttgatccggcaaacaaaccaccgctggtagcggtggtttttttgtttgcaagcagcagattacgcgcagaaaaaaaggatctcaagaagatcctttgatcttttctacggggtctgacactcagtggaacgaaaactcacgttaagggattttggtcatgagattatcaaaaaggatcttcacctagatccttttaaattaaaaatgaagttttaaatcaatctaaagtatatatgagtaaacttggtctgacagttaccaatgcttaatcagtgaggcacctatctcagcgatctgtctatttcgttcatccatagttgcctgactccccgtcgtgtagataactacgatacgggagggcttaccatctggccccagtgctgcaatgataccgcgagacccacgctcaccggctccagatttatcagcaataaaccagccagccggaagggccgagcgcagaagtggtcctgcaactttatccgcctccatccagtctattaattgttgccgggaagctagagtaagtagttcgccagttaatagtttgcgcaacgttgttgccattgctacaggcatcgtggtgtcacgctcgtcgtttggtatggcttcattcagctccggttcccaacgatcaaggcgagttacatgatcccccatgttgtgcaaaaaagcggttagctccttcggtcctccgatcgttgtcagaagtaagttggccgcagtgttatcactcatggttatggcagcactgcataattctcttactgtcatgccatccgtaagatgcttttctgtgactggtgagtactcaaccaagtcattctgagaatagtgtatgcggcgaccgagttgctcttgcccggcgtcaatacgggataataccgcgccacatagcagaactttaaaagtgctcatcattggaaaacgttcttcggggcgaaaactctcaaggatcttaccgctgttgagatccagttcgatgtaacccactcgtgca

SEQ ID NO: 267 - DNA, 8067 bp, synthetic construct
  source 1..8067: mol_type = other DNA
gcccggcgtcaatacgggataataccgcgccacatagcagaactttaaaagtgctcatcattggaaaacgttcttcggggcgaaaactctcaaggatcttaccgctgttgagatccagttcgatgtaacccactcgtgcacccaactgatcttcagcatcttttactttcaccagcgtttctgggtgagcaaaaacaggaaggcaaaatgccgcaaaaaagggaataagggcgacacggaaatgttgaatactcatactcttcctttttcaatattattgaagcatttatcagggttattgtctcatgagcggatacatatttgaatgtatttagaaaaataaacaaataggggttccgcgcacatttccccgaaaagtgccacctgacgtcgacggatcgggagatcgatctcccgatcccctagggtcgactctcagtacaatctgctctgatgccgcatagttaagccagtatctgctccctgcttgtgtgttggaggtcgctgagtagtgcgcgagcaaaatttaagctacaacaaggcaaggcttgaccgacaattgcatgaagaatctgcttagggttaggcgttttgcgctgcttcgcgatgtacgggccagatatacgcgttgacattgattattgactagttattaatagtaatcaattacggggtcattagttcatagcccatatatggagttccgcgttacataacttacggtaaatggcccgcctggctgaccgcccaacgacccccgcccattgacgtcaataatgacgtatgttcccatagtaacgccaatagggactttccattgacgtcaatgggtggagtatttacggtaaactgcccacttggcagtacatcaagtgtatcatatgccaagtacgccccctattgacgtcaatgacggtaaatggcccgcctggcattatgcccagtacatgaccttatgggactttcctacttggcagtacatctacgtattagtcatcgctattaccatggtgatgcggttttggcagtacatcaatgggcgtggatagcggtttgactcacggggatttccaagtctccaccccattgacgtcaatgggagtttgttttggcaccaaaatcaacgggactttccaaaatgtcgtaacaactccgccccattgacgcaaatgggcggtaggcgtgtacggtgggaggtctatataagcagagctggtttagtgaaccgtcagatccgctagagatccgcggccgctaatacgactcactatagggagagccgccaccatgaaacggacagccgacggaagcgagttcgagtcaccaaagaagaagcggaaagtcaaagacaagttcaagctgtacttccagaacccgcaatttatggggggctgggacaaggataaagagacagactaccgcgcgacaattctccgctatggctccaaatactatctggccatcatggacaagaagtacgcgaagtgcctgcagaagatcgacaaagacgacgtcaatggcaactatgaaaagatcaactacaagctgctgccgggcccgaacaagatgctcccgaaggtgttcttcagcaagaagtggatggcctactacaatccaagcgaggatattcagaaaatctataaaaacgggaccttcaagaagggggacatgtttaacctcaacgactgccacaagctcattgatttcttcaaggatagcatttcccgctacccgaaatggtccaatgcgtacgattttaacttctccgagacagaaaagtacaaagacatcgcgggcttttacagggaggtggaggagcaagggtataaagtttcttttgaatccgcgagcaagaaggaagtcgacaagctcgtcgaggagggcaagctctacatgttccaaatttataacaaggacttttccgacaagagccatgggaccccaaacctccacaccatgtacttcaaactgctctttgacgagaacaaccacgggcaaatcaggctgagcggcggcgccgaattattcatgcgcagggcctccctcaagaaggaagagctggtcgtccatccagccaattccccgatcgcgaacaagaacccggacaatccgaaaaagaccaccaccctgtcctacgacgtctacaaggacaaacgcttcagcgaagaccagtacgaattacacatcccaattgcgattaataagtgcccaaagaatatcttcaaaattaatacagaggtcagggtgctgctcaaacacgacgacaatccgtatgtcatcggcattgacaggggcgagcgcaatctgctctatatcgtggtcgtggatgggaagggcaatattgtggagcagtactccctgaacgagattatcaacaacttcaatgggattaggattaagaccgactatcacagcctgctcgacaagaaagaaaaagagaggtttgaggcccgccaaaactggacctccattgagaatatcaaagaattaaaggccggctatatttcccaagtcgtccacaagatctgcgagctggtggagaaatatgacgccgtgattgcgctcgaagacttaaattctgggttcaagaactcccgcgtgaaggtggaaaaacaggtgtatcagaaattcgagaaaatgctgatcgacaaactcaattatatggtggataagaagtccaacccgtgtgccacagggggcgcgctgaagggctatcagatcaccaacaagttcgagagcttcaagagcatgagcacccagaacgggtttattttctacatcccggcgtggctcacctccaagattgacccgagcaccggcttcgtgaacctcctgaagacaaagtatacctccattgccgacagcaagaagtttatctcctccttcgaccgcattatgtatgtgccggaggaggacctcttcgagttcgccctcgactacaaaaacttcagccgcacagatgcggattacatcaagaagtggaagctgtactcctacgggaacaggatccgcatcttcaggaatccaaaaaaaaataacgtctttgactgggaggaagtgtgcctgacatccgcctacaaggaactgttcaataaatacggcatcaattaccagcagggcgacattcgcgccctcctctgtgagcagtccgacaaagcgttttactccagcttcatggccctcatgtccctgatgctccaaatgaggaatagcatcacagggcgcaccgacgtcgacttcctcatcagcccggtgaagaactccgacgggatcttttacgactcccgcaactatgaggcgcaagagaatgcgatcctcccgaagaacgccgatgcgaacggggcctataatatcgccaggaaagtgctctgggccatcgggcagttcaaaaaggcggaggatgagaagctcgacaaggtgaaaattgccatttccaacaaggagtggctggagtacgcgcagacctccgtgaagcacggctcctctggcagctccggctctagcggctcctctggcagctccggctccaagctggagaagtttacaaactgttacagcctctccaaaaccctcaggtttaaagcgatcccggtgggcaagacccaggagaacatcgacaacaagaggctcctggtggaagacgagaagcgcgccgaagactacaagggcgtgaagaagctgctcgataggtactacctcagctttattaacgacgtgctgcacagcatcaaactcaagaatctcaacaactacatctccctcttccgcaaaaagacccgcaccgagaaggagaacaaggagctggagaacctggagatcaacctccgcaaggaaatcgccaaagcgttcaagggcaatgaagggtacaagagcctcttcaagaaagacatcatcgaaactatcctcccagagtttctcgatgacaaggacgagatcgcgctggtgaactcctttaacgggttcacaaccgcgtttaccggcttctttgataacagggaaaatatgttctccgaggaggccaagtccaccagcatcgccttcaggtgtatcaacgagaacctcacccgctacatttccaatatggacattttcgagaaggtggatgcgatcttcgataagcacgaggtgcaggagatcaaagagaagattctcaattccgattatgacgtcgaggatttcttcgaaggggagttctttaattttgtgctcacacaagagggcattgacgtgtacaacgcgattatcgggggcttcgtcacagagtccggggagaagattaaggggctgaatgagtacatcaatctgtacaatcagaagaccaagcagaaactgccgaaattcaagccgctctacaagcaagtcctgtccgatagggaaagcctctccttctacggcgagggctataccagcgacgaggaggtgctggaagtcttccgcaacacactgaataagaatagcgagattttctcctccatcaagaagctcgagaagctctttaagaactttgacgagtacagctccgccgggattttcgtgaagaacgggccggcgatcagcaccatctccaaggacatctttggcgagtggaacgtcatcagggacaagtggaacgccgagtacgacgacatccacctgaagaagaaggcggtggtgaccgagaagtatgaggacgatcgcaggaagtccttcaaaaaaatcggctccttcagcctcgaacagctccaggagtatgccgatgcggatctgtccgtcgtcgagaagctgaaggaaatcatcattcagaaggtcgacgagatctataaagtgtacgggtccagcgagaagctgttcgacgccgactttgtgctcgagaagtccctcaaaaagaatgacgccgtggtggccattatgaaagacctgctcgactccgtgaagtccttcgaaaattacattaaagcgttctttggggaggggaaggaaactaacagggatgagtccttctatggcgactttgtcctcgcgtacgacatcctgctgaaggtcgaccacatttacgacgcgatccgcaactacgtgacacagaagccgtactcctctggcggctcaaaaagaaccgccgacggcagcgaattcgagcccaagaagaagaggaaagtcggaagcggagctactaacttcagcctgctgaagcaggctggagacgtggaggagaaccctggacctatggtgagcaagggcgaggagctgttcaccggggtggtgcccatcctggtcgagctggacggcgacgtaaacggccacaagttcagcgtgtccggcgagggcgagggcgatgccacctacggcaagctgaccctgaagttcatctgcaccaccggcaagctgcccgtgccctggcccaccctcgtgaccaccctgacctatggagtgcagtgcttcagccgctaccccgaccacatgaagcagcacgacttcttcaagtccgccatgcccgaaggctacgtccaggagcgcaccatcttcttcaaggacgacggcaactacaagacccgcgccgaggtgaagttcgagggcgacaccctggtgaaccgcatcgagctgaagggcatcgacttcaaggaggacggcaacatcctggggcacaagctggagtacaactacaacagccacaacgtctatatcatggccgacaagcagaagaacggcatcaaggtgaacttcaagatccgccacaacatcgaggacggcagcgtgcagctcgccgaccactaccagcagaacacccccatcggcgacggccccgtgctgctgcccgacaaccactacctgagcacccagtccgccctgagcaaagaccccaacgagaagcgcgatcacatggtcctgctggagttcgtgaccgccgccgggatcactctcggcatggacgagctgtacaagtctggtggttctcccaagaagaagaggaaagtctaaccggtcatcatcaccatcaccattgagtttaaacccgctgatcagcctcgactgtgccttctagttgccagccatctgttgtttgcccctcccccgtgccttccttgaccctggaaggtgccactcccactgtcctttcctaataaaatgaggaaattgcatcgcattgtctgagtaggtgtcattctattctggggggtggggtggggcaggacagcaagggggaggattgggaagacaatagcaggcatgctggggatgcggtgggctctatggcttctgaggcggaaagaaccagctggggctcgataccgtcgacctctagctagagcttggcgtaatcatggtcatagctgtttcctgtgtgaaattgttatccgctcacaattccacacaacatacgagccggaagcataaagtgtaaagcctagggtgcctaatgagtgagctaactcacattaattgcgttgcgctcactgcccgctttccagtcgggaaacctgtcgtgccagctgcattaatgaatcggccaacgcgcggggagaggcggtttgcgtattgggcgctcttccgcttcctcgctcactgactcgctgcgctcggtcgttcggctgcggcgagcggtatcagctcactcaaaggcggtaatacggttatccacagaatcaggggataacgcaggaaagaacatgtgagcaaaaggccagcaaaaggccaggaaccgtaaaaaggccgcgttgctggcgtttttccataggctccgcccccctgacgagcatcacaaaaatcgacgctcaagtcagaggtggcgaaacccgacaggactataaagataccaggcgtttccccctggaagctccctcgtgcgctctcctgttccgaccctgccgcttaccggatacctgtccgcctttctcccttcgggaagcgtggcgctttctcatagctcacgctgtaggtatctcagttcggtgtaggtcgttcgctccaagctgggctgtgtgcacgaaccccccgttcagcccgaccgctgcgccttatccggtaactatcgtcttgagtccaacccggtaagacacgacttatcgccactggcagcagccactggtaacaggattagcagagcgaggtatgtaggcggtgctacagagttcttgaagtggtggcctaactacggctacactagaagaacagtatttggtatctgcgctctgctgaagccagttaccttcggaaaaagagttggtagctcttgatccggcaaacaaaccaccgctggtagcggtggtttttttgtttgcaagcagcagattacgcgcagaaaaaaaggatctcaagaagatcctttgatcttttctacggggtctgacactcagtggaacgaaaactcacgttaagggattttggtcatgagattatcaaaaaggatcttcacctagatccttttaaattaaaaatgaagttttaaatcaatctaaagtatatatgagtaaacttggtctgacagttaccaatgcttaatcagtgaggcacctatctcagcgatctgtctatttcgttcatccatagttgcctgactccccgtcgtgtagataactacgatacgggagggcttaccatctggccccagtgctgcaatgataccgcgagacccacgctcaccggctccagatttatcagcaataaaccagccagccggaagggccgagcgcagaagtggtcctgcaactttatccgcctccatccagtctattaattgttgccgggaagctagagtaagtagttcgccagttaatagtttgcgcaacgttgttgccattgctacaggcatcgtggtgtcacgctcgtcgtttggtatggcttcattcagctccggttcccaacgatcaaggcgagttacatgatcccccatgttgtgcaaaaaagcggttagctccttcggtcctccgatcgttgtcagaagtaagttggccgcagtgttatcactcatggttatggcagcactgcataattctcttactgtcatgccatccgtaagatgcttttctgtgactggtgagtactcaaccaagtcattctgagaatagtgtatgcggcgaccgagttgctctt

SEQ ID NO: 268 - DNA, 8049 bp, synthetic construct
  source 1..8049: mol_type = other DNA
caatgcttaatcagtgaggcacctatctcagcgatctgtctatttcgttcatccatagttgcctgactccccgtcgtgtagataactacgatacgggagggcttaccatctggccccagtgctgcaatgataccgcgagacccacgctcaccggctccagatttatcagcaataaaccagccagccggaagggccgagcgcagaagtggtcctgcaactttatccgcctccatccagtctattaattgttgccgggaagctagagtaagtagttcgccagttaatagtttgcgcaacgttgttgccattgctacaggcatcgtggtgtcacgctcgtcgtttggtatggcttcattcagctccggttcccaacgatcaaggcgagttacatgatcccccatgttgtgcaaaaaagcggttagctccttcggtcctccgatcgttgtcagaagtaagttggccgcagtgttatcactcatggttatggcagcactgcataattctcttactgtcatgccatccgtaagatgcttttctgtgactggtgagtactcaaccaagtcattctgagaatagtgtatgcggcgaccgagttgctcttgcccggcgtcaatacgggataataccgcgccacatagcagaactttaaaagtgctcatcattggaaaacgttcttcggggcgaaaactctcaaggatcttaccgctgttgagatccagttcgatgtaacccactcgtgcacccaactgatcttcagcatcttttactttcaccagcgtttctgggtgagcaaaaacaggaaggcaaaatgccgcaaaaaagggaataagggcgacacggaaatgttgaatactcatactcttcctttttcaatattattgaagcatttatcagggttattgtctcatgagcggatacatatttgaatgtatttagaaaaataaacaaataggggttccgcgcacatttccccgaaaagtgccacctgacgtcgacggatcgggagatcgatctcccgatcccctagggtcgactctcagtacaatctgctctgatgccgcatagttaagccagtatctgctccctgcttgtgtgttggaggtcgctgagtagtgcgcgagcaaaatttaagctacaacaaggcaaggcttgaccgacaattgcatgaagaatctgcttagggttaggcgttttgcgctgcttcgcgatgtacgggccagatatacgcgttgacattgattattgactagttattaatagtaatcaattacggggtcattagttcatagcccatatatggagttccgcgttacataacttacggtaaatggcccgcctggctgaccgcccaacgacccccgcccattgacgtcaataatgacgtatgttcccatagtaacgccaatagggactttccattgacgtcaatgggtggagtatttacggtaaactgcccacttggcagtacatcaagtgtatcatatgccaagtacgccccctattgacgtcaatgacggtaaatggcccgcctggcattatgcccagtacatgaccttatgggactttcctacttggcagtacatctacgtattagtcatcgctattaccatggtgatgcggttttggcagtacatcaatgggcgtggatagcggtttgactcacggggatttccaagtctccaccccattgacgtcaatgggagtttgttttggcaccaaaatcaacgggactttccaaaatgtcgtaacaactccgccccattgacgcaaatgggcggtaggcgtgtacggtgggaggtctatataagcagagctggtttagtgaaccgtcagatccgctagagatccgcggccgctaatacgactcactatagggagagccgccaccatgaaacggacagccgacggaagcgagttcgagtcaccaaagaagaagcggaaagtcaagtccctcaaaaagaatgacgccgtggtggccattatgaaagacctgctcgactccgtgaagtccttcgaaaattacattaaagcgttctttggggaggggaaggaaactaacagggatgagtccttctatggcgactttgtcctcgcgtacgacatcctgctgaaggtcgaccacatttacgacgcgatccgcaactacgtgacacagaagccgtactccaaagacaagttcaagctgtacttccagaacccgcaatttatggggggctgggacaaggataaagagacagactaccgcgcgacaattctccgctatggctccaaatactatctggccatcatggacaagaagtacgcgaagtgcctgcagaagatcgacaaagacgacgtcaatggcaactatgaaaagatcaactacaagctgctgccgggcccgaacaagatgctcccgaaggtgttcttcagcaagaagtggatggcctactacaatccaagcgaggatattcagaaaatctataaaaacgggaccttcaagaagggggacatgtttaacctcaacgactgccacaagctcattgatttcttcaaggatagcatttcccgctacccgaaatggtccaatgcgtacgattttaacttctccgagacagaaaagtacaaagacatcgcgggcttttacagggaggtggaggagcaagggtataaagtttcttttgaatccgcgagcaagaaggaagtcgacaagctcgtcgaggagggcaagctctacatgttccaaatttataacaaggacttttccgacaagagccatgggaccccaaacctccacaccatgtacttcaaactgctctttgacgagaacaaccacgggcaaatcaggctgagcggcggcgccgaattattcatgcgcagggcctccctcaagaaggaagagctggtcgtccatccagccaattccccgatcgcgaacaagaacccggacaatccgaaaaagaccaccaccctgtcctacgacgtctacaaggacaaacgcttcagcgaagaccagtacgaattacacatcccaattgcgattaataagtgcccaaagaatatcttcaaaattaatacagaggtcagggtgctgctcaaacacgacgacaatccgtatgtcatcggcattgacaggggcgagcgcaatctgctctatatcgtggtcgtggatgggaagggcaatattgtggagcagtactccctgaacgagattatcaacaacttcaatgggattaggattaagaccgactatcacagcctgctcgacaagaaagaaaaagagaggtttgaggcccgccaaaactggacctccattgagaatatcaaagaattaaaggccggctatatttcccaagtcgtccacaagatctgcgagctggtggagaaatatgacgccgtgattgcgctcgaagacttaaattctgggttcaagaactcccgcgtgaaggtggaaaaacaggtgtatcagaaattcgagaaaatgctgatcgacaaactcaattatatggtggataagaagtccaacccgtgtgccacagggggcgcgctgaagggctatcagatcaccaacaagttcgagagcttcaagagcatgagcacccagaacgggtttattttctacatcccggcgtggctcacctccaagattgacccgagcaccggcttcgtgaacctcctgaagacaaagtatacctccattgccgacagcaagaagtttatctcctccttcgaccgcattatgtatgtgccggaggaggacctcttcgagttcgccctcgactacaaaaacttcagccgcacagatgcggattacatcaagaagtggaagctgtactcctacgggaacaggatccgcatcttcaggaatccaaaaaaaaataacgtctttgactgggaggaagtgtgcctgacatccgcctacaaggaactgttcaataaatacggcatcaattaccagcagggcgacattcgcgccctcctctgtgagcagtccgacaaagcgttttactccagcttcatggccctcatgtccctgatgctccaaatgaggaatagcatcacagggcgcaccgacgtcgacttcctcatcagcccggtgaagaactccgacgggatcttttacgactcccgcaactatgaggcgcaagagaatgcgatcctcccgaagaacgccgatgcgaacggggcctataatatcgccaggaaagtgctctgggccatcgggcagttcaaaaaggcggaggatgagaagctcgacaaggtgaaaattgccatttccaacaaggagtggctggagtacgcgcagacctccgtgaagcacggctcctctggcagctccggctctagcggctccaagctggagaagtttacaaactgttacagcctctccaaaaccctcaggtttaaagcgatcccggtgggcaagacccaggagaacatcgacaacaagaggctcctggtggaagacgagaagcgcgccgaagactacaagggcgtgaagaagctgctcgataggtactacctcagctttattaacgacgtgctgcacagcatcaaactcaagaatctcaacaactacatctccctcttccgcaaaaagacccgcaccgagaaggagaacaaggagctggagaacctggagatcaacctccgcaaggaaatcgccaaagcgttcaagggcaatgaagggtacaagagcctcttcaagaaagacatcatcgaaactatcctcccagagtttctcgatgacaaggacgagatcgcgctggtgaactcctttaacgggttcacaaccgcgtttaccggcttctttgataacagggaaaatatgttctccgaggaggccaagtccaccagcatcgccttcaggtgtatcaacgagaacctcacccgctacatttccaatatggacattttcgagaaggtggatgcgatcttcgataagcacgaggtgcaggagatcaaagagaagattctcaattccgattatgacgtcgaggatttcttcgaaggggagttctttaattttgtgctcacacaagagggcattgacgtgtacaacgcgattatcgggggcttcgtcacagagtccggggagaagattaaggggctgaatgagtacatcaatctgtacaatcagaagaccaagcagaaactgccgaaattcaagccgctctacaagcaagtcctgtccgatagggaaagcctctccttctacggcgagggctataccagcgacgaggaggtgctggaagtcttccgcaacacactgaataagaatagcgagattttctcctccatcaagaagctcgagaagctctttaagaactttgacgagtacagctccgccgggattttcgtgaagaacgggccggcgatcagcaccatctccaaggacatctttggcgagtggaacgtcatcagggacaagtggaacgccgagtacgacgacatccacctgaagaagaaggcggtggtgaccgagaagtatgaggacgatcgcaggaagtccttcaaaaaaatcggctccttcagcctcgaacagctccaggagtatgccgatgcggatctgtccgtcgtcgagaagctgaaggaaatcatcattcagaaggtcgacgagatctataaagtgtacgggtccagcgagaagctgttcgacgccgactttgtgctcgagtctggcggctcaaaaagaaccgccgacggcagcgaattcgagcccaagaagaagaggaaagtcggaagcggagctactaacttcagcctgctgaagcaggctggagacgtggaggagaaccctggacctatggtgagcaagggcgaggagctgttcaccggggtggtgcccatcctggtcgagctggacggcgacgtaaacggccacaagttcagcgtgtccggcgagggcgagggcgatgccacctacggcaagctgaccctgaagttcatctgcaccaccggcaagctgcccgtgccctggcccaccctcgtgaccaccctgacctatggagtgcagtgcttcagccgctaccccgaccacatgaagcagcacgacttcttcaagtccgccatgcccgaaggctacgtccaggagcgcaccatcttcttcaaggacgacggcaactacaagacccgcgccgaggtgaagttcgagggcgacaccctggtgaaccgcatcgagctgaagggcatcgacttcaaggaggacggcaacatcctggggcacaagctggagtacaactacaacagccacaacgtctatatcatggccgacaagcagaagaacggcatcaaggtgaacttcaagatccgccacaacatcgaggacggcagcgtgcagctcgccgaccactaccagcagaacacccccatcggcgacggccccgtgctgctgcccgacaaccactacctgagcacccagtccgccctgagcaaagaccccaacgagaagcgcgatcacatggtcctgctggagttcgtgaccgccgccgggatcactctcggcatggacgagctgtacaagtctggtggttctcccaagaagaagaggaaagtctaaccggtcatcatcaccatcaccattgagtttaaacccgctgatcagcctcgactgtgccttctagttgccagccatctgttgtttgcccctcccccgtgccttccttgaccctggaaggtgccactcccactgtcctttcctaataaaatgaggaaattgcatcgcattgtctgagtaggtgtcattctattctggggggtggggtggggcaggacagcaagggggaggattgggaagacaatagcaggcatgctggggatgcggtgggctctatggcttctgaggcggaaagaaccagctggggctcgataccgtcgacctctagctagagcttggcgtaatcatggtcatagctgtttcctgtgtgaaattgttatccgctcacaattccacacaacatacgagccggaagcataaagtgtaaagcctagggtgcctaatgagtgagctaactcacattaattgcgttgcgctcactgcccgctttccagtcgggaaacctgtcgtgccagctgcattaatgaatcggccaacgcgcggggagaggcggtttgcgtattgggcgctcttccgcttcctcgctcactgactcgctgcgctcggtcgttcggctgcggcgagcggtatcagctcactcaaaggcggtaatacggttatccacagaatcaggggataacgcaggaaagaacatgtgagcaaaaggccagcaaaaggccaggaaccgtaaaaaggccgcgttgctggcgtttttccataggctccgcccccctgacgagcatcacaaaaatcgacgctcaagtcagaggtggcgaaacccgacaggactataaagataccaggcgtttccccctggaagctccctcgtgcgctctcctgttccgaccctgccgcttaccggatacctgtccgcctttctcccttcgggaagcgtggcgctttctcatagctcacgctgtaggtatctcagttcggtgtaggtcgttcgctccaagctgggctgtgtgcacgaaccccccgttcagcccgaccgctgcgccttatccggtaactatcgtcttgagtccaacccggtaagacacgacttatcgccactggcagcagccactggtaacaggattagcagagcgaggtatgtaggcggtgctacagagttcttgaagtggtggcctaactacggctacactagaagaacagtatttggtatctgcgctctgctgaagccagttaccttcggaaaaagagttggtagctcttgatccggcaaacaaaccaccgctggtagcggtggtttttttgtttgcaagcagcagattacgcgcagaaaaaaaggatctcaagaagatcctttgatcttttctacggggtctgacactcagtggaacgaaaactcacgttaagggattttggtcatgagattatcaaaaaggatcttcacctagatccttttaaattaaaaatgaagttttaaatcaatctaaagtatatatgagtaaacttggtctgacagttac

SEQ ID NO: 269 - DNA, 8067 bp, synthetic construct
  source 1..8067: mol_type = other DNA
aacgggttcacaaccgcgtttaccggcttctttgataacagggaaaatatgttctccgaggaggccaagtccaccagcatcgccttcaggtgtatcaacgagaacctcacccgctacatttccaatatggacattttcgagaaggtggatgcgatcttcgataagcacgaggtgcaggagatcaaagagaagattctcaattccgattatgacgtcgaggatttcttcgaaggggagttctttaattttgtgctcacacaagagggcattgacgtgtacaacgcgattatcgggggcttcgtcacagagtccggggagaagattaaggggctgaatgagtacatcaatctgtacaatcagaagaccaagcagaaactgccgaaattcaagccgctctacaagcaagtcctgtccgatagggaaagcctctccttctacggcgagggctataccagcgacgaggaggtgctggaagtcttccgcaacacactgaataagaatagcgagattttctcctccatcaagaagctcgagaagctctttaagaactttgacgagtacagctccgccgggattttcgtgaagaacgggccggcgatcagcaccatctccaaggacatctttggcgagtggaacgtcatcagggacaagtggaacgccgagtacgacgacatccacctgaagaagaaggcggtggtgaccgagaagtatgaggacgatcgcaggaagtccttcaaaaaaatcggctccttcagcctcgaacagctccaggagtatgccgatgcggatctgtccgtcgtcgagaagctgaaggaaatcatcattcagaaggtcgacgagatctataaagtgtacgggtccagcgagaagctgttcgacgccgactttgtgctcgagtctggcggctcaaaaagaaccgccgacggcagcgaattcgagcccaagaagaagaggaaagtcggaagcggagctactaacttcagcctgctgaagcaggctggagacgtggaggagaaccctggacctatggtgagcaagggcgaggagctgttcaccggggtggtgcccatcctggtcgagctggacggcgacgtaaacggccacaagttcagcgtgtccggcgagggcgagggcgatgccacctacggcaagctgaccctgaagttcatctgcaccaccggcaagctgcccgtgccctggcccaccctcgtgaccaccctgacctatggagtgcagtgcttcagccgctaccccgaccacatgaagcagcacgacttcttcaagtccgccatgcccgaaggctacgtccaggagcgcaccatcttcttcaaggacgacggcaactacaagacccgcgccgaggtgaagttcgagggcgacaccctggtgaaccgcatcgagctgaagggcatcgacttcaaggaggacggcaacatcctggggcacaagctggagtacaactacaacagccacaacgtctatatcatggccgacaagcagaagaacggcatcaaggtgaacttcaagatccgccacaacatcgaggacggcagcgtgcagctcgccgaccactaccagcagaacacccccatcggcgacggccccgtgctgctgcccgacaaccactacctgagcacccagtccgccctgagcaaagaccccaacgagaagcgcgatcacatggtcctgctggagttcgtgaccgccgccgggatcactctcggcatggacgagctgtacaagtctggtggttctcccaagaagaagaggaaagtctaaccggtcatcatcaccatcaccattgagtttaaacccgctgatcagcctcgactgtgccttctagttgccagccatctgttgtttgcccctcccccgtgccttccttgaccctggaaggtgccactcccactgtcctttcctaataaaatgaggaaattgcatcgcattgtctgagtaggtgtcattctattctggggggtggggtggggcaggacagcaagggggaggattgggaagacaatagcaggcatgctggggatgcggtgggctctatggcttctgaggcggaaagaaccagctggggctcgataccgtcgacctctagctagagcttggcgtaatcatggtcatagctgtttcctgtgtgaaattgttatccgctcacaattccacacaacatacgagccggaagcataaagtgtaaagcctagggtgcctaatgagtgagctaactcacattaattgcgttgcgctcactgcccgctttccagtcgggaaacctgtcgtgccagctgcattaatgaatcggccaacgcgcggggagaggcggtttgcgtattgggcgctcttccgcttcctcgctcactgactcgctgcgctcggtcgttcggctgcggcgagcggtatcagctcactcaaaggcggtaatacggttatccacagaatcaggggataacgcaggaaagaacatgtgagcaaaaggccagcaaaaggccaggaaccgtaaaaaggccgcgttgctggcgtttttccataggctccgcccccctgacgagcatcacaaaaatcgacgctcaagtcagaggtggcgaaacccgacaggactataaagataccaggcgtttccccctggaagctccctcgtgcgctctcctgttccgaccctgccgcttaccggatacctgtccgcctttctcccttcgggaagcgtggcgctttctcatagctcacgctgtaggtatctcagttcggtgtaggtcgttcgctccaagctgggctgtgtgcacgaaccccccgttcagcccgaccgctgcgccttatccggtaactatcgtcttgagtccaacccggtaagacacgacttatcgccactggcagcagccactggtaacaggattagcagagcgaggtatgtaggcggtgctacagagttcttgaagtggtggcctaactacggctacactagaagaacagtatttggtatctgcgctctgctgaagccagttaccttcggaaaaagagttggtagctcttgatccggcaaacaaaccaccgctggtagcggtggtttttttgtttgcaagcagcagattacgcgcagaaaaaaaggatctcaagaagatcctttgatcttttctacggggtctgacactcagtggaacgaaaactcacgttaagggattttggtcatgagattatcaaaaaggatcttcacctagatccttttaaattaaaaatgaagttttaaatcaatctaaagtatatatgagtaaacttggtctgacagttaccaatgcttaatcagtgaggcacctatctcagcgatctgtctatttcgttcatccatagttgcctgactccccgtcgtgtagataactacgatacgggagggcttaccatctggccccagtgctgcaatgataccgcgagacccacgctcaccggctccagatttatcagcaataaaccagccagccggaagggccgagcgcagaagtggtcctgcaactttatccgcctccatccagtctattaattgttgccgggaagctagagtaagtagttcgccagttaatagtttgcgcaacgttgttgccattgctacaggcatcgtggtgtcacgctcgtcgtttggtatggcttcattcagctccggttcccaacgatcaaggcgagttacatgatcccccatgttgtgcaaaaaagcggttagctccttcggtcctccgatcgttgtcagaagtaagttggccgcagtgttatcactcatggttatggcagcactgcataattctcttactgtcatgccatccgtaagatgcttttctgtgactggtgagtactcaaccaagtcattctgagaatagtgtatgcggcgaccgagttgctcttgcccggcgtcaatacgggataataccgcgccacatagcagaactttaaaagtgctcatcattggaaaacgttcttcggggcgaaaactctcaaggatcttaccgctgttgagatccagttcgatgtaacccactcgtgcacccaactgatcttcagcatcttttactttcaccagcgtttctgggtgagcaaaaacaggaaggcaaaatgccgcaaaaaagggaataagggcgacacggaaatgttgaatactcatactcttcctttttcaatattattgaagcatttatcagggttattgtctcatgagcggatacatatttgaatgtatttagaaaaataaacaaataggggttccgcgcacatttccccgaaaagtgccacctgacgtcgacggatcgggagatcgatctcccgatcccctagggtcgactctcagtacaatctgctctgatgccgcatagttaagccagtatctgctccctgcttgtgtgttggaggtcgctgagtagtgcgcgagcaaaatttaagctacaacaaggcaaggcttgaccgacaattgcatgaagaatctgcttagggttaggcgttttgcgctgcttcgcgatgtacgggccagatatacgcgttgacattgattattgactagttattaatagtaatcaattacggggtcattagttcatagcccatatatggagttccgcgttacataacttacggtaaatggcccgcctggctgaccgcccaacgacccccgcccattgacgtcaataatgacgtatgttcccatagtaacgccaatagggactttccattgacgtcaatgggtggagtatttacggtaaactgcccacttggcagtacatcaagtgtatcatatgccaagtacgccccctattgacgtcaatgacggtaaatggcccgcctggcattatgcccagtacatgaccttatgggactttcctacttggcagtacatctacgtattagtcatcgctattaccatggtgatgcggttttggcagtacatcaatgggcgtggatagcggtttgactcacggggatttccaagtctccaccccattgacgtcaatgggagtttgttttggcaccaaaatcaacgggactttccaaaatgtcgtaacaactccgccccattgacgcaaatgggcggtaggcgtgtacggtgggaggtctatataagcagagctggtttagtgaaccgtcagatccgctagagatccgcggccgctaatacgactcactatagggagagccgccaccatgaaacggacagccgacggaagcgagttcgagtcaccaaagaagaagcggaaagtcaagtccctcaaaaagaatgacgccgtggtggccattatgaaagacctgctcgactccgtgaagtccttcgaaaattacattaaagcgttctttggggaggggaaggaaactaacagggatgagtccttctatggcgactttgtcctcgcgtacgacatcctgctgaaggtcgaccacatttacgacgcgatccgcaactacgtgacacagaagccgtactccaaagacaagttcaagctgtacttccagaacccgcaatttatggggggctgggacaaggataaagagacagactaccgcgcgacaattctccgctatggctccaaatactatctggccatcatggacaagaagtacgcgaagtgcctgcagaagatcgacaaagacgacgtcaatggcaactatgaaaagatcaactacaagctgctgccgggcccgaacaagatgctcccgaaggtgttcttcagcaagaagtggatggcctactacaatccaagcgaggatattcagaaaatctataaaaacgggaccttcaagaagggggacatgtttaacctcaacgactgccacaagctcattgatttcttcaaggatagcatttcccgctacccgaaatggtccaatgcgtacgattttaacttctccgagacagaaaagtacaaagacatcgcgggcttttacagggaggtggaggagcaagggtataaagtttcttttgaatccgcgagcaagaaggaagtcgacaagctcgtcgaggagggcaagctctacatgttccaaatttataacaaggacttttccgacaagagccatgggaccccaaacctccacaccatgtacttcaaactgctctttgacgagaacaaccacgggcaaatcaggctgagcggcggcgccgaattattcatgcgcagggcctccctcaagaaggaagagctggtcgtccatccagccaattccccgatcgcgaacaagaacccggacaatccgaaaaagaccaccaccctgtcctacgacgtctacaaggacaaacgcttcagcgaagaccagtacgaattacacatcccaattgcgattaataagtgcccaaagaatatcttcaaaattaatacagaggtcagggtgctgctcaaacacgacgacaatccgtatgtcatcggcattgacaggggcgagcgcaatctgctctatatcgtggtcgtggatgggaagggcaatattgtggagcagtactccctgaacgagattatcaacaacttcaatgggattaggattaagaccgactatcacagcctgctcgacaagaaagaaaaagagaggtttgaggcccgccaaaactggacctccattgagaatatcaaagaattaaaggccggctatatttcccaagtcgtccacaagatctgcgagctggtggagaaatatgacgccgtgattgcgctcgaagacttaaattctgggttcaagaactcccgcgtgaaggtggaaaaacaggtgtatcagaaattcgagaaaatgctgatcgacaaactcaattatatggtggataagaagtccaacccgtgtgccacagggggcgcgctgaagggctatcagatcaccaacaagttcgagagcttcaagagcatgagcacccagaacgggtttattttctacatcccggcgtggctcacctccaagattgacccgagcaccggcttcgtgaacctcctgaagacaaagtatacctccattgccgacagcaagaagtttatctcctccttcgaccgcattatgtatgtgccggaggaggacctcttcgagttcgccctcgactacaaaaacttcagccgcacagatgcggattacatcaagaagtggaagctgtactcctacgggaacaggatccgcatcttcaggaatccaaaaaaaaataacgtctttgactgggaggaagtgtgcctgacatccgcctacaaggaactgttcaataaatacggcatcaattaccagcagggcgacattcgcgccctcctctgtgagcagtccgacaaagcgttttactccagcttcatggccctcatgtccctgatgctccaaatgaggaatagcatcacagggcgcaccgacgtcgacttcctcatcagcccggtgaagaactccgacgggatcttttacgactcccgcaactatgaggcgcaagagaatgcgatcctcccgaagaacgccgatgcgaacggggcctataatatcgccaggaaagtgctctgggccatcgggcagttcaaaaaggcggaggatgagaagctcgacaaggtgaaaattgccatttccaacaaggagtggctggagtacgcgcagacctccgtgaagcacggctcctctggcagctccggctctagcggctcctctggcagctccggctccaagctggagaagtttacaaactgttacagcctctccaaaaccctcaggtttaaagcgatcccggtgggcaagacccaggagaacatcgacaacaagaggctcctggtggaagacgagaagcgcgccgaagactacaagggcgtgaagaagctgctcgataggtactacctcagctttattaacgacgtgctgcacagcatcaaactcaagaatctcaacaactacatctccctcttccgcaaaaagacccgcaccgagaaggagaacaaggagctggagaacctggagatcaacctccgcaaggaaatcgccaaagcgttcaagggcaatgaagggtacaagagcctcttcaagaaagacatcatcgaaactatcctcccagagtttctcgatgacaaggacgagatcgcgctggtgaactccttt

SEQ ID NO: 270 - DNA, 8049 bp, synthetic construct
  source 1..8049: mol_type = other DNA
attgggcgctcttccgcttcctcgctcactgactcgctgcgctcggtcgttcggctgcggcgagcggtatcagctcactcaaaggcggtaatacggttatccacagaatcaggggataacgcaggaaagaacatgtgagcaaaaggccagcaaaaggccaggaaccgtaaaaaggccgcgttgctggcgtttttccataggctccgcccccctgacgagcatcacaaaaatcgacgctcaagtcagaggtggcgaaacccgacaggactataaagataccaggcgtttccccctggaagctccctcgtgcgctctcctgttccgaccctgccgcttaccggatacctgtccgcctttctcccttcgggaagcgtggcgctttctcatagctcacgctgtaggtatctcagttcggtgtaggtcgttcgctccaagctgggctgtgtgcacgaaccccccgttcagcccgaccgctgcgccttatccggtaactatcgtcttgagtccaacccggtaagacacgacttatcgccactggcagcagccactggtaacaggattagcagagcgaggtatgtaggcggtgctacagagttcttgaagtggtggcctaactacggctacactagaagaacagtatttggtatctgcgctctgctgaagccagttaccttcggaaaaagagttggtagctcttgatccggcaaacaaaccaccgctggtagcggtggtttttttgtttgcaagcagcagattacgcgcagaaaaaaaggatctcaagaagatcctttgatcttttctacggggtctgacactcagtggaacgaaaactcacgttaagggattttggtcatgagattatcaaaaaggatcttcacctagatccttttaaattaaaaatgaagttttaaatcaatctaaagtatatatgagtaaacttggtctgacagttaccaatgcttaatcagtgaggcacctatctcagcgatctgtctatttcgttcatccatagttgcctgactccccgtcgtgtagataactacgatacgggagggcttaccatctggccccagtgctgcaatgataccgcgagacccacgctcaccggctccagatttatcagcaataaaccagccagccggaagggccgagcgcagaagtggtcctgcaactttatccgcctccatccagtctattaattgttgccgggaagctagagtaagtagttcgccagttaatagtttgcgcaacgttgttgccattgctacaggcatcgtggtgtcacgctcgtcgtttggtatggcttcattcagctccggttcccaacgatcaaggcgagttacatgatcccccatgttgtgcaaaaaagcggttagctccttcggtcctccgatcgttgtcagaagtaagttggccgcagtgttatcactcatggttatggcagcactgcataattctcttactgtcatgccatccgtaagatgcttttctgtgactggtgagtactcaaccaagtcattctgagaatagtgtatgcggcgaccgagttgctcttgcccggcgtcaatacgggataataccgcgccacatagcagaactttaaaagtgctcatcattggaaaacgttcttcggggcgaaaactctcaaggatcttaccgctgttgagatccagttcgatgtaacccactcgtgcacccaactgatcttcagcatcttttactttcaccagcgtttctgggtgagcaaaaacaggaaggcaaaatgccgcaaaaaagggaataagggcgacacggaaatgttgaatactcatactcttcctttttcaatattattgaagcatttatcagggttattgtctcatgagcggatacatatttgaatgtatttagaaaaataaacaaataggggttccgcgcacatttccccgaaaagtgccacctgacgtcgacggatcgggagatcgatctcccgatcccctagggtcgactctcagtacaatctgctctgatgccgcatagttaagccagtatctgctccctgcttgtgtgttggaggtcgctgagtagtgcgcgagcaaaatttaagctacaacaaggcaaggcttgaccgacaattgcatgaagaatctgcttagggttaggcgttttgcgctgcttcgcgatgtacgggccagatatacgcgttgacattgattattgactagttattaatagtaatcaattacggggtcattagttcatagcccatatatggagttccgcgttacataacttacggtaaatggcccgcctggctgaccgcccaacgacccccgcccattgacgtcaataatgacgtatgttcccatagtaacgccaatagggactttccattgacgtcaatgggtggagtatttacggtaaactgcccacttggcagtacatcaagtgtatcatatgccaagtacgccccctattgacgtcaatgacggtaaatggcccgcctggcattatgcccagtacatgaccttatgggactttcctacttggcagtacatctacgtattagtcatcgctattaccatggtgatgcggttttggcagtacatcaatgggcgtggatagcggtttgactcacggggatttccaagtctccaccccattgacgtcaatgggagtttgttttggcaccaaaatcaacgggactttccaaaatgtcgtaacaactccgccccattgacgcaaatgggcggtaggcgtgtacggtgggaggtctatataagcagagctggtttagtgaaccgtcagatccgctagagatccgcggccgctaatacgactcactatagggagagccgccaccatgaaacggacagccgacggaagcgagttcgagtcaccaaagaagaagcggaaagtctccgacaaagcgttttactccagcttcatggccctcatgtccctgatgctccaaatgaggaatagcatcacagggcgcaccgacgtcgacttcctcatcagcccggtgaagaactccgacgggatcttttacgactcccgcaactatgaggcgcaagagaatgcgatcctcccgaagaacgccgatgcgaacggggcctataatatcgccaggaaagtgctctgggccatcgggcagttcaaaaaggcggaggatgagaagctcgacaaggtgaaaattgccatttccaacaaggagtggctggagtacgcgcagacctccgtgaagcacggctcctctggcagctccggctctagcggctccaagctggagaagtttacaaactgttacagcctctccaaaaccctcaggtttaaagcgatcccggtgggcaagacccaggagaacatcgacaacaagaggctcctggtggaagacgagaagcgcgccgaagactacaagggcgtgaagaagctgctcgataggtactacctcagctttattaacgacgtgctgcacagcatcaaactcaagaatctcaacaactacatctccctcttccgcaaaaagacccgcaccgagaaggagaacaaggagctggagaacctggagatcaacctccgcaaggaaatcgccaaagcgttcaagggcaatgaagggtacaagagcctcttcaagaaagacatcatcgaaactatcctcccagagtttctcgatgacaaggacgagatcgcgctggtgaactcctttaacgggttcacaaccgcgtttaccggcttctttgataacagggaaaatatgttctccgaggaggccaagtccaccagcatcgccttcaggtgtatcaacgagaacctcacccgctacatttccaatatggacattttcgagaaggtggatgcgatcttcgataagcacgaggtgcaggagatcaaagagaagattctcaattccgattatgacgtcgaggatttcttcgaaggggagttctttaattttgtgctcacacaagagggcattgacgtgtacaacgcgattatcgggggcttcgtcacagagtccggggagaagattaaggggctgaatgagtacatcaatctgtacaatcagaagaccaagcagaaactgccgaaattcaagccgctctacaagcaagtcctgtccgatagggaaagcctctccttctacggcgagggctataccagcgacgaggaggtgctggaagtcttccgcaacacactgaataagaatagcgagattttctcctccatcaagaagctcgagaagctctttaagaactttgacgagtacagctccgccgggattttcgtgaagaacgggccggcgatcagcaccatctccaaggacatctttggcgagtggaacgtcatcagggacaagtggaacgccgagtacgacgacatccacctgaagaagaaggcggtggtgaccgagaagtatgaggacgatcgcaggaagtccttcaaaaaaatcggctccttcagcctcgaacagctccaggagtatgccgatgcggatctgtccgtcgtcgagaagctgaaggaaatcatcattcagaaggtcgacgagatctataaagtgtacgggtccagcgagaagctgttcgacgccgactttgtgctcgagaagtccctcaaaaagaatgacgccgtggtggccattatgaaagacctgctcgactccgtgaagtccttcgaaaattacattaaagcgttctttggggaggggaaggaaactaacagggatgagtccttctatggcgactttgtcctcgcgtacgacatcctgctgaaggtcgaccacatttacgacgcgatccgcaactacgtgacacagaagccgtactccaaagacaagttcaagctgtacttccagaacccgcaatttatggggggctgggacaaggataaagagacagactaccgcgcgacaattctccgctatggctccaaatactatctggccatcatggacaagaagtacgcgaagtgcctgcagaagatcgacaaagacgacgtcaatggcaactatgaaaagatcaactacaagctgctgccgggcccgaacaagatgctcccgaaggtgttcttcagcaagaagtggatggcctactacaatccaagcgaggatattcagaaaatctataaaaacgggaccttcaagaagggggacatgtttaacctcaacgactgccacaagctcattgatttcttcaaggatagcatttcccgctacccgaaatggtccaatgcgtacgattttaacttctccgagacagaaaagtacaaagacatcgcgggcttttacagggaggtggaggagcaagggtataaagtttcttttgaatccgcgagcaagaaggaagtcgacaagctcgtcgaggagggcaagctctacatgttccaaatttataacaaggacttttccgacaagagccatgggaccccaaacctccacaccatgtacttcaaactgctctttgacgagaacaaccacgggcaaatcaggctgagcggcggcgccgaattattcatgcgcagggcctccctcaagaaggaagagctggtcgtccatccagccaattccccgatcgcgaacaagaacccggacaatccgaaaaagaccaccaccctgtcctacgacgtctacaaggacaaacgcttcagcgaagaccagtacgaattacacatcccaattgcgattaataagtgcccaaagaatatcttcaaaattaatacagaggtcagggtgctgctcaaacacgacgacaatccgtatgtcatcggcattgacaggggcgagcgcaatctgctctatatcgtggtcgtggatgggaagggcaatattgtggagcagtactccctgaacgagattatcaacaacttcaatgggattaggattaagaccgactatcacagcctgctcgacaagaaagaaaaagagaggtttgaggcccgccaaaactggacctccattgagaatatcaaagaattaaaggccggctatatttcccaagtcgtccacaagatctgcgagctggtggagaaatatgacgccgtgattgcgctcgaagacttaaattctgggttcaagaactcccgcgtgaaggtggaaaaacaggtgtatcagaaattcgagaaaatgctgatcgacaaactcaattatatggtggataagaagtccaacccgtgtgccacagggggcgcgctgaagggctatcagatcaccaacaagttcgagagcttcaagagcatgagcacccagaacgggtttattttctacatcccggcgtggctcacctccaagattgacccgagcaccggcttcgtgaacctcctgaagacaaagtatacctccattgccgacagcaagaagtttatctcctccttcgaccgcattatgtatgtgccggaggaggacctcttcgagttcgccctcgactacaaaaacttcagccgcacagatgcggattacatcaagaagtggaagctgtactcctacgggaacaggatccgcatcttcaggaatccaaaaaaaaataacgtctttgactgggaggaagtgtgcctgacatccgcctacaaggaactgttcaataaatacggcatcaattaccagcagggcgacattcgcgccctcctctgtgagcagtctggcggctcaaaaagaaccgccgacggcagcgaattcgagcccaagaagaagaggaaagtcggaagcggagctactaacttcagcctgctgaagcaggctggagacgtggaggagaaccctggacctatggtgagcaagggcgaggagctgttcaccggggtggtgcccatcctggtcgagctggacggcgacgtaaacggccacaagttcagcgtgtccggcgagggcgagggcgatgccacctacggcaagctgaccctgaagttcatctgcaccaccggcaagctgcccgtgccctggcccaccctcgtgaccaccctgacctatggagtgcagtgcttcagccgctaccccgaccacatgaagcagcacgacttcttcaagtccgccatgcccgaaggctacgtccaggagcgcaccatcttcttcaaggacgacggcaactacaagacccgcgccgaggtgaagttcgagggcgacaccctggtgaaccgcatcgagctgaagggcatcgacttcaaggaggacggcaacatcctggggcacaagctggagtacaactacaacagccacaacgtctatatcatggccgacaagcagaagaacggcatcaaggtgaacttcaagatccgccacaacatcgaggacggcagcgtgcagctcgccgaccactaccagcagaacacccccatcggcgacggccccgtgctgctgcccgacaaccactacctgagcacccagtccgccctgagcaaagaccccaacgagaagcgcgatcacatggtcctgctggagttcgtgaccgccgccgggatcactctcggcatggacgagctgtacaagtctggtggttctcccaagaagaagaggaaagtctaaccggtcatcatcaccatcaccattgagtttaaacccgctgatcagcctcgactgtgccttctagttgccagccatctgttgtttgcccctcccccgtgccttccttgaccctggaaggtgccactcccactgtcctttcctaataaaatgaggaaattgcatcgcattgtctgagtaggtgtcattctattctggggggtggggtggggcaggacagcaagggggaggattgggaagacaatagcaggcatgctggggatgcggtgggctctatggcttctgaggcggaaagaaccagctggggctcgataccgtcgacctctagctagagcttggcgtaatcatggtcatagctgtttcctgtgtgaaattgttatccgctcacaattccacacaacatacgagccggaagcataaagtgtaaagcctagggtgcctaatgagtgagctaactcacattaattgcgttgcgctcactgcccgctttccagtcgggaaacctgtcgtgccagctgcattaatgaatcggccaacgcgcggggagaggcggtttgcgt

SEQ ID NO: 271 - DNA, 8067 bp, synthetic construct
  source 1..8067: mol_type = other DNA
agcatcttttactttcaccagcgtttctgggtgagcaaaaacaggaaggcaaaatgccgcaaaaaagggaataagggcgacacggaaatgttgaatactcatactcttcctttttcaatattattgaagcatttatcagggttattgtctcatgagcggatacatatttgaatgtatttagaaaaataaacaaataggggttccgcgcacatttccccgaaaagtgccacctgacgtcgacggatcgggagatcgatctcccgatcccctagggtcgactctcagtacaatctgctctgatgccgcatagttaagccagtatctgctccctgcttgtgtgttggaggtcgctgagtagtgcgcgagcaaaatttaagctacaacaaggcaaggcttgaccgacaattgcatgaagaatctgcttagggttaggcgttttgcgctgcttcgcgatgtacgggccagatatacgcgttgacattgattattgactagttattaatagtaatcaattacggggtcattagttcatagcccatatatggagttccgcgttacataacttacggtaaatggcccgcctggctgaccgcccaacgacccccgcccattgacgtcaataatgacgtatgttcccatagtaacgccaatagggactttccattgacgtcaatgggtggagtatttacggtaaactgcccacttggcagtacatcaagtgtatcatatgccaagtacgccccctattgacgtcaatgacggtaaatggcccgcctggcattatgcccagtacatgaccttatgggactttcctacttggcagtacatctacgtattagtcatcgctattaccatggtgatgcggttttggcagtacatcaatgggcgtggatagcggtttgactcacggggatttccaagtctccaccccattgacgtcaatgggagtttgttttggcaccaaaatcaacgggactttccaaaatgtcgtaacaactccgccccattgacgcaaatgggcggtaggcgtgtacggtgggaggtctatataagcagagctggtttagtgaaccgtcagatccgctagagatccgcggccgctaatacgactcactatagggagagccgccaccatgaaacggacagccgacggaagcgagttcgagtcaccaaagaagaagcggaaagtctccgacaaagcgttttactccagcttcatggccctcatgtccctgatgctccaaatgaggaatagcatcacagggcgcaccgacgtcgacttcctcatcagcccggtgaagaactccgacgggatcttttacgactcccgcaactatgaggcgcaagagaatgcgatcctcccgaagaacgccgatgcgaacggggcctataatatcgccaggaaagtgctctgggccatcgggcagttcaaaaaggcggaggatgagaagctcgacaaggtgaaaattgccatttccaacaaggagtggctggagtacgcgcagacctccgtgaagcacggctcctctggcagctccggctctagcggctcctctggcagctccggctccaagctggagaagtttacaaactgttacagcctctccaaaaccctcaggtttaaagcgatcccggtgggcaagacccaggagaacatcgacaacaagaggctcctggtggaagacgagaagcgcgccgaagactacaagggcgtgaagaagctgctcgataggtactacctcagctttattaacgacgtgctgcacagcatcaaactcaagaatctcaacaactacatctccctcttccgcaaaaagacccgcaccgagaaggagaacaaggagctggagaacctggagatcaacctccgcaaggaaatcgccaaagcgttcaagggcaatgaagggtacaagagcctcttcaagaaagacatcatcgaaactatcctcccagagtttctcgatgacaaggacgagatcgcgctggtgaactcctttaacgggttcacaaccgcgtttaccggcttctttgataacagggaaaatatgttctccgaggaggccaagtccaccagcatcgccttcaggtgtatcaacgagaacctcacccgctacatttccaatatggacattttcgagaaggtggatgcgatcttcgataagcacgaggtgcaggagatcaaagagaagattctcaattccgattatgacgtcgaggatttcttcgaaggggagttctttaattttgtgctcacacaagagggcattgacgtgtacaacgcgattatcgggggcttcgtcacagagtccggggagaagattaaggggctgaatgagtacatcaatctgtacaatcagaagaccaagcagaaactgccgaaattcaagccgctctacaagcaagtcctgtccgatagggaaagcctctccttctacggcgagggctataccagcgacgaggaggtgctggaagtcttccgcaacacactgaataagaatagcgagattttctcctccatcaagaagctcgagaagctctttaagaactttgacgagtacagctccgccgggattttcgtgaagaacgggccggcgatcagcaccatctccaaggacatctttggcgagtggaacgtcatcagggacaagtggaacgccgagtacgacgacatccacctgaagaagaaggcggtggtgaccgagaagtatgaggacgatcgcaggaagtccttcaaaaaaatcggctccttcagcctcgaacagctccaggagtatgccgatgcggatctgtccgtcgtcgagaagctgaaggaaatcatcattcagaaggtcgacgagatctataaagtgtacgggtccagcgagaagctgttcgacgccgactttgtgctcgagaagtccctcaaaaagaatgacgccgtggtggccattatgaaagacctgctcgactccgtgaagtccttcgaaaattacattaaagcgttctttggggaggggaaggaaactaacagggatgagtccttctatggcgactttgtcctcgcgtacgacatcctgctgaaggtcgaccacatttacgacgcgatccgcaactacgtgacacagaagccgtactccaaagacaagttcaagctgtacttccagaacccgcaatttatggggggctgggacaaggataaagagacagactaccgcgcgacaattctccgctatggctccaaatactatctggccatcatggacaagaagtacgcgaagtgcctgcagaagatcgacaaagacgacgtcaatggcaactatgaaaagatcaactacaagctgctgccgggcccgaacaagatgctcccgaaggtgttcttcagcaagaagtggatggcctactacaatccaagcgaggatattcagaaaatctataaaaacgggaccttcaagaagggggacatgtttaacctcaacgactgccacaagctcattgatttcttcaaggatagcatttcccgctacccgaaatggtccaatgcgtacgattttaacttctccgagacagaaaagtacaaagacatcgcgggcttttacagggaggtggaggagcaagggtataaagtttcttttgaatccgcgagcaagaaggaagtcgacaagctcgtcgaggagggcaagctctacatgttccaaatttataacaaggacttttccgacaagagccatgggaccccaaacctccacaccatgtacttcaaactgctctttgacgagaacaaccacgggcaaatcaggctgagcggcggcgccgaattattcatgcgcagggcctccctcaagaaggaagagctggtcgtccatccagccaattccccgatcgcgaacaagaacccggacaatccgaaaaagaccaccaccctgtcctacgacgtctacaaggacaaacgcttcagcgaagaccagtacgaattacacatcccaattgcgattaataagtgcccaaagaatatcttcaaaattaatacagaggtcagggtgctgctcaaacacgacgacaatccgtatgtcatcggcattgacaggggcgagcgcaatctgctctatatcgtggtcgtggatgggaagggcaatattgtggagcagtactccctgaacgagattatcaacaacttcaatgggattaggattaagaccgactatcacagcctgctcgacaagaaagaaaaagagaggtttgaggcccgccaaaactggacctccattgagaatatcaaagaattaaaggccggctatatttcccaagtcgtccacaagatctgcgagctggtggagaaatatgacgccgtgattgcgctcgaagacttaaattctgggttcaagaactcccgcgtgaaggtggaaaaacaggtgtatcagaaattcgagaaaatgctgatcgacaaactcaattatatggtggataagaagtccaacccgtgtgccacagggggcgcgctgaagggctatcagatcaccaacaagttcgagagcttcaagagcatgagcacccagaacgggtttattttctacatcccggcgtggctcacctccaagattgacccgagcaccggcttcgtgaacctcctgaagacaaagtatacctccattgccgacagcaagaagtttatctcctccttcgaccgcattatgtatgtgccggaggaggacctcttcgagttcgccctcgactacaaaaacttcagccgcacagatgcggattacatcaagaagtggaagctgtactcctacgggaacaggatccgcatcttcaggaatccaaaaaaaaataacgtctttgactgggaggaagtgtgcctgacatccgcctacaaggaactgttcaataaatacggcatcaattaccagcagggcgacattcgcgccctcctctgtgagcagtctggcggctcaaaaagaaccgccgacggcagcgaattcgagcccaagaagaagaggaaagtcggaagcggagctactaacttcagcctgctgaagcaggctggagacgtggaggagaaccctggacctatggtgagcaagggcgaggagctgttcaccggggtggtgcccatcctggtcgagctggacggcgacgtaaacggccacaagttcagcgtgtccggcgagggcgagggcgatgccacctacggcaagctgaccctgaagttcatctgcaccaccggcaagctgcccgtgccctggcccaccctcgtgaccaccctgacctatggagtgcagtgcttcagccgctaccccgaccacatgaagcagcacgacttcttcaagtccgccatgcccgaaggctacgtccaggagcgcaccatcttcttcaaggacgacggcaactacaagacccgcgccgaggtgaagttcgagggcgacaccctggtgaaccgcatcgagctgaagggcatcgacttcaaggaggacggcaacatcctggggcacaagctggagtacaactacaacagccacaacgtctatatcatggccgacaagcagaagaacggcatcaaggtgaacttcaagatccgccacaacatcgaggacggcagcgtgcagctcgccgaccactaccagcagaacacccccatcggcgacggccccgtgctgctgcccgacaaccactacctgagcacccagtccgccctgagcaaagaccccaacgagaagcgcgatcacatggtcctgctggagttcgtgaccgccgccgggatcactctcggcatggacgagctgtacaagtctggtggttctcccaagaagaagaggaaagtctaaccggtcatcatcaccatcaccattgagtttaaacccgctgatcagcctcgactgtgccttctagttgccagccatctgttgtttgcccctcccccgtgccttccttgaccctggaaggtgccactcccactgtcctttcctaataaaatgaggaaattgcatcgcattgtctgagtaggtgtcattctattctggggggtggggtggggcaggacagcaagggggaggattgggaagacaatagcaggcatgctggggatgcggtgggctctatggcttctgaggcggaaagaaccagctggggctcgataccgtcgacctctagctagagcttggcgtaatcatggtcatagctgtttcctgtgtgaaattgttatccgctcacaattccacacaacatacgagccggaagcataaagtgtaaagcctagggtgcctaatgagtgagctaactcacattaattgcgttgcgctcactgcccgctttccagtcgggaaacctgtcgtgccagctgcattaatgaatcggccaacgcgcggggagaggcggtttgcgtattgggcgctcttccgcttcctcgctcactgactcgctgcgctcggtcgttcggctgcggcgagcggtatcagctcactcaaaggcggtaatacggttatccacagaatcaggggataacgcaggaaagaacatgtgagcaaaaggccagcaaaaggccaggaaccgtaaaaaggccgcgttgctggcgtttttccataggctccgcccccctgacgagcatcacaaaaatcgacgctcaagtcagaggtggcgaaacccgacaggactataaagataccaggcgtttccccctggaagctccctcgtgcgctctcctgttccgaccctgccgcttaccggatacctgtccgcctttctcccttcgggaagcgtggcgctttctcatagctcacgctgtaggtatctcagttcggtgtaggtcgttcgctccaagctgggctgtgtgcacgaaccccccgttcagcccgaccgctgcgccttatccggtaactatcgtcttgagtccaacccggtaagacacgacttatcgccactggcagcagccactggtaacaggattagcagagcgaggtatgtaggcggtgctacagagttcttgaagtggtggcctaactacggctacactagaagaacagtatttggtatctgcgctctgctgaagccagttaccttcggaaaaagagttggtagctcttgatccggcaaacaaaccaccgctggtagcggtggtttttttgtttgcaagcagcagattacgcgcagaaaaaaaggatctcaagaagatcctttgatcttttctacggggtctgacactcagtggaacgaaaactcacgttaagggattttggtcatgagattatcaaaaaggatcttcacctagatccttttaaattaaaaatgaagttttaaatcaatctaaagtatatatgagtaaacttggtctgacagttaccaatgcttaatcagtgaggcacctatctcagcgatctgtctatttcgttcatccatagttgcctgactccccgtcgtgtagataactacgatacgggagggcttaccatctggccccagtgctgcaatgataccgcgagacccacgctcaccggctccagatttatcagcaataaaccagccagccggaagggccgagcgcagaagtggtcctgcaactttatccgcctccatccagtctattaattgttgccgggaagctagagtaagtagttcgccagttaatagtttgcgcaacgttgttgccattgctacaggcatcgtggtgtcacgctcgtcgtttggtatggcttcattcagctccggttcccaacgatcaaggcgagttacatgatcccccatgttgtgcaaaaaagcggttagctccttcggtcctccgatcgttgtcagaagtaagttggccgcagtgttatcactcatggttatggcagcactgcataattctcttactgtcatgccatccgtaagatgcttttctgtgactggtgagtactcaaccaagtcattctgagaatagtgtatgcggcgaccgagttgctcttgcccggcgtcaatacgggataataccgcgccacatagcagaactttaaaagtgctcatcattggaaaacgttcttcggggcgaaaactctcaaggatcttaccgctgttgagatccagttcgatgtaacccactcgtgcacccaactgatcttc

SEQ ID NO: 272 - DNA, 5000 bp, Homo sapiens
  source 1..5000: mol_type = genomic DNA
taaaaacagtgcccagagaacgaggattgttggctgctccaccccagggggccccttgcacaggaggtgccatctctgcctcccaaagctctaagagccactgtcccaagcctataccccatcccacaactgcagcctcatcactgtcctgtcttccagccggcaaagcctgcgaccccgcagccaggcagttcaacaccctcatcccctggtgcctgccccacaccgggaaccggcacaaccactgggctggcctctatggaaggctcgagtgggacggcttcttcagcacaaccgtcaccaaccccgagcccatgggcaagcaggtaggtggggagggggcatccgagggcctgggtcaggccctgtacttggcggcctaactaggtggaagtgtgggtttagccaagtgggggacagcaccccaggaccccaggcacctggcctctgcctcctgcccctccacgtccacgggacaagctcataggccaaggccatggccgtatgctgtcacagtgccatttccctccctgtccccgacggtgacccggcctgggtgctactgccctcgcccaccgcgcctctttcccccagggccgcgtgctccacccagagcagcaccgtgtggtgagcgtgcgggagtgtgcccgctcccagggcttccctgacacctaccggctcttcggcaacatcctggacaagcaccggcaggtcagtggggcggcgcccgctgggtctggacaggaaggaggcttctgtgcctgtcaccaggtggggctggggccagcgcagtcacttccgggaggacgcctgctggctgccgggtagccccatcactctcagtgggaagacggcccacaggagggacagtgctgagacatccgagtcaggctgcgtccctatgctggttccttactgtttgtttttgaggcagagattgagccagaaggacagtccgtcgcgctaaaggagcaggctaaaacccatggtggcgacagctcactcgctgtaggttcaaatgaactagcaccttaattcctacctgcttctcaggtgtcgggttggcttaacaagttagtctatgagttagtctcagttaagtgtattttcatcatagggcacgcgcattgcttaaaaaccagtgtccacggttcttgtgaaaaccacatttcacccctccccccgaatctggttctcgggaagcagccactctctcttttttttttttttttttgagatggagctttgttctttcgcccaggctggagtgaagtggcgtgatctcagctcaccgcaacttccacccccctggttttaagtgattctcctgcctcagcctcttgagtagctgggattacagtcatgtgctaccacacccggctaatttttgtatttttagtagagatggggtttcaccatgttggccaggctggtcccgaactcttgacctcaggtgatccgcctgcctcggcctcccaaagtgctgggattacaggcatgagccactgcgccggccagggaagcagccactcttaactgggagcgaaacgtgtctaggtggcccatttgtcttttttttttttttttctgagacagggtctcactctgtcccctaggctggagtgcagtgacatgatctctgcccactgcaacctccacctccagggttcaagtgattctcctgcctcagcctcctgaggtgctgggattacaggcatgtgccaccatgcccagctaattagtttttgtacttttagtagagacggggtttcaccatgttggcgaggctgctctcgaactcctggcctcaactaatccacctgccttggcctcccaaagtgctgggattacaggcgtgagccactgctcccagccccacgtgtctttgtctcaagtctttctgaagctcttcaaaggcccagtgacttgtggctgtggggcgggatgatgggccagttggagggtccaaggatcttgtgctggaagggttttgggcccatgtgagcaggaccagaacccttccccaaggggtgcaatgcccaggttgtcctccatctgagcaggggctggcagtacacctgcccccgggccttgggcctgggtgtccacatcaggcattgcccttctcccctcctgcaggtgggcaatgccgtgccaccgcccctggccaaagccattggcttggagatcaagctttgtatgttggccaaagcccgagagagtgcctcaggtatggtggggtgggccaggcttcctctggggcctgactgccctctgggggtacatgtgggggcagttgctggccaccgttttgggctctgggactcaggcgggtcacctacccacgttcgtggccccatctttctcaaggggctgctgtgaggattgagtgagttgcacgtgtcaagtgcttagagcaggcgtgctgcacacagcaggcctttggtcaggttggctgctgggctggccctggggccgtttccctcactcctgctcggtgaatttggctcagcaggcacctgcctcagctgctcacttgagcctctgggtctagaaccctctggggaccgtttgaggagtgttcagtctccgtgaacgttcccttagcactctgccacttattgggtcagctgttaacatcagtacgttaatgtttcctgatggtccatgtctgttactcgcctgtcaagtggcgtgacaccgggcgtgttccccagagtgacttttccttttatttcccttcagctaaaataaaggaggaggaagctgctaaggactagttctgccctcccgtcacccctgtttctggcaccaggaatccccaacatgcactgatgttgtgtttttaacatgtcaatctgtccgttcacatgtgtggtacatggtgtttgtggccttggctgacatgaagctgttgtgtgaggttcgcttatcaactaatgatttagtgatcaaattgtgcagtactttgtgcattctggattttaaaagttttttattatgcattatatcaaatctaccactgtatgagtggaaattaagactttatgtagtttttatatgttgtaatatttcttcaaataaatctctcctataaaccaccctgggtgggtattcgtgatttgcacgggacttctggctgaggtcagacaggaacaagctcttccatgctgaaggcgacccacgtggagtttgaagctagcacgtttgaagctagacactccgtgtgtctgtctgtgtttgttcagaactgagtcacgtgagttgatccccatgacatgcaaatggaacttgctagtgtagcttccaggaaagccttttaaaggaagtcttggctggccttccccgtggctggtaggccttctttggtctgaagtgggttgtgatgcctggcagtggagcagccatcctgtgaccatgaggcagagctctgtgctgcaactggtggaataaggagagagaagtcaccactgagctgcccttggagccccggccaccccatccccaagcaaaacctctttagttgggttttttttctttccaaagaatttttttttttttttgagacagtcttgctctgttgctcaggctgtagtgcagtggggcagtctccgttcaatgcagcctctgcctcctgggttcaagaaattctgcctcagcctcccgagtagctgggattgtaggcgcccatcaccacgcccagctaatttttgtatttttagtagagacgatgtttcaccatgttggccaggctggtcttgaaatcctgacatgatccgcccacctggacctcccaaagtgctgggttacaggtgtgatccactgcacccagcctcccattagcttttttttttttttttttgagacagtttcgttcttgttgcccaggctggagtgcggtggcacgatctctgctcactgcaacctccgcctcccaggttcaagtgattttcctgcctcagcctcccaagtagctgggattacaggcatgcgccatcacacccaactaattttgtatttttagtagagacggggtttctccatgttggtcagggtggtctcaaactcccgacctcaggttatccgcctgcctcggcctcccaaagtgctgggattataggtgtgagccaccatgcctggccagcattttttaatagtgacataacacttctgtgtgtcctttggccactggatgtaccgtttctctgtgatggccacatgactgtctttgctgggagctccctgggcatttgggatgactgcccctgctcagtcatcctggcttatcatgtctgtgccatacagagacctcccatttttaggaagtcaatttatatttgtcactcttagttttttgtagcctgtttatttttgagacggattctcactctgtcgcccaggctggagtgcagtggtgtgatctctgctcaccacaacctccgcctcccgggtttaagcaattctcctgcctcagcctcccaagtagcagggattgagtagctgggattacaggcgcctgccagtacatctggccaatttttgttaatttagtagagacagggttttgccatgttggccaggatggtcttgaactcctgacctcaagtgatcctcccaaagtgctggcattacaagcatgagtcaccgtgcccggcctttgtagcctatttagaaacgcctttcctccccccagcaagagatcttaaacatgtatcttcttccacatttctgacattcccattttaacacatgaatcacttttgtaaggactaaaaatggggatctcagcttattttttgaataagactgatagcaaatgcacacagcaaagtacaacagctcagcttgacatatggtaaagttcccccatccgagatttttttttaaatatactttctgctgctattttaagctaaaaaattcattttaaagtatataatgagtataatgagttttctttttctggattccaaggcaccttgatcaagacaactgaatct

SEQ ID NO: 273 - DNA, 5000 bp, Homo sapiens
  source 1..5000: mol_type = genomic DNA
cctgtcagtttctatctagtctctcatagcaaaattcttaaaattttcaaaatatataaaatctgctttgcattataattaagtttttgtatccctccccaccctgcctcaagaatataggttgaaatgctaggcttttctttctttagagggggaaacttcatagacattttatttaatgaaaatagactaatctgaaatatgtaggagtttatacgttactatgctcaaggaagaatttaaaatcaagatttaaacagataagtagaaaggtatgaagctaaagttaatctgcataattcttgccatacactgtcatccccattctgaatcaaagcttttttggattttttccacctccttaaataggcctggttctttcaactcagatacctgcaaaaaaaattaaggattcctgtagccttgaaggctcctctgaacactcagctttgaactttcaactgaaaagttggtttcttttcctttttttttccattttcctttttttttttttttgagatggagtcttgctgtgtcacccaggcaggagtgcagtggcccgatctcagctcactgtaaccttcacctcccgggttcaagctattctcctgccttaacctcccgattagctaggatcacaggtgtgcaccgccatgcccagctaatttttttgtttgtttgtttagtagagacagagttttgccatattggccaggctggtctggaactcctgaccccaggtaatccacccgcctggcctcagccccacaaagtgctgggattacaggcataagccactgcctccggcctgaaaagtcagtaattaaagagaccttcctatcccctaagacttggtgaccccactcaatttcatcctactatcacatttgaggttattcatttaatgtctctcttaaatggtacaagatgaacttctccactcatgctaggactgcatttattttactactaaatctgtagcacctcatactatgtatcataataggtgttaaatataagaataaataaatgaattagtgatgcctgtacatttgctaaaggcaggctgcacacttggttctaagtttgtagtagccaagaaaaagaattttaagattcatagtatccttaggataaaataaaataacgatttcaggaccaagtaagagtttgagataactaataaaaatcaaataatagccgggcgcggtggcacacgcctctaatcccagcactttgggaggccgaggcgggaggatcacttgaggtcagaagttcgagaccagcctgaccaataaggtgaaatcccatctctactaaaaatacaaaaattggccgcgcctgggcgacagaatgagactccgtttcaaaataaataaataaatgcataaatctgaattaacagcatgcacatcactgctttactttctaaaaggtgtaggaatgcttattttaataaatgaaaaatgactcttcccctcttttaaatttgtttctcttcccctttttgttaaagtacaaaacaaaacaccttcccccacttttcgaatagttttggctgtgtctttaggactggaaggaaattcagctcaaatgaattactatattatgaacttaagtaagaattgttgtgcattttgtacagaatgcaactcctaggagttgacaaatgtttgttaagtgcatcagtgagcgacataggaccttctcctccctactctcttgtcacggtttttatttaatcaaacatttattattgttcgatgctcttaaatgccatttccttcagctgattatttgtatgacagaagagtcaattaagctattttgtcctaaaaattacgaaaacgaaatgtacaattgtgaagtaaaattttgttcctttgcaaattttaataaattattgaagtttattttttgtttcaaataatctgggcttcagttctaataatggaaggacaatgtgaaggcccagaattcagcatagcgcctggcattaataggaggtcagtacatttttagtacatgtttctcaaatagatcttaaaatttcatttaagagcgtttcctcacgtcacagtatgtctctggcgttacttaattttgaaaaacctcaacacagattctagttttaggcaaagctcagaaaatttctacttaaggatatttccaaagcgaaaggaagcgcggagacgttcatgactggcatcatctcgcacgtggttccggaaattctcggtaggatgccctacatctgctctccctccactaagaagaacctctttgtgtggcgaaagtaaaagtattagggcttttaagttgcccagagtcaaggaacacggataaagacgctgggagattgacatgcatttcgaccaatagcattgcagagaggcgtatcatttcgcggatgttccaatcagtacgcagagagtcgccgtctccaaggtgaaagcggaagtagggccttcgcgcacctcatggaatcccttctgcagcacctggatcgcttttccgagcttctggcggtctcaagcactacctacgtcagcacctgggaccccgccaccgtgcgccgggccttgcagtgggcgcgctacctgcgccacatccatcggcgctttggtcggcatggccccattcgcacggctctggagcggcggctgcacaaccagtggaggcaagagggcggctttgggcggggtccagttccgggattagcgaacttccaggccctcggtcactgtgacgtcctgctctctctgcgcctgctggagaaccgggccctcggggatgcagctcgttaccacctggtgcagcaactctttcccggcccgggcgtccgggacgccgatgaggagacactccaagagagcctggcccgccttgcccgccggcggtctgcggtgcacatgctgcgcttcaatggctatagagagaacccaaatctccaggaggactctctgatgaagacccaggcggagctgctgctggagcgtctgcaggaggtggggaaggccgaagcggagcgtcccgccaggtttctcagcagcctgtgggagcgcttgcctcagaacaacttcctgaaggtgatagcggtggcgctgttgcagccgcctttgtctcgtcggccccaagaagagttggaacccggcatccacaaatcacctggagaggggagccaagtgctagtccactggcttctggggaattcggaagtctttgctgccttttgtcgcgccctcccagccgggcttttgactttagtgactagccgccacccagcgctgtctcctgtctatctgggtctgctaacagactggggtcaacgtttgcactatgaccttcagaaaggcatttgggttggaactgagtcccaagatgtgccctgggaggagttgcacaataggtttcaaagcctctgtcaggcccctccacctctgaaagataaagttctaactgccctggagacctgtaaagcgcaggatggagattttgaagtacctggtcttagcatctggacagacctcttattagctcttcgtagtggtgcatttaggaaaagacaagttttgggtctcagcgcaggcctcagttctgtataggcaatgctgtgttattacttgaatatagaatatatagtttacaaaatgaaaattacaatgttctcaccaaatatatgccttcgtgtgtccaaagtataattattttagatgctaattttgaatagtttattaaacagttataaatatgcaaagtagctggcatgtagtgtcacggattttctggatagaggaagtgattggaagtactccacttaaagccatggaattagcaatagtttgctttttaatagaaggcccatttgtaagaatgttgaaaatatgtgtaccgtttaaagaaaaagcagctttaaagtgacaaacaaaataccctttttcttttagtatggtttatttttctaggttttctgtccctccctcagtagtgaagagttttctttattcctggcagtgtcaggaatattggtttgaaaagctgttggcctatctggagtttggccttgttaacctagtattctaaccagttaaccagccttagtatgcattaaaattgtattgttcagaaagtttgtttctcattttctgcaaattcttactttgaaaatgaatcaccacatagtatgtccctttaaagcattgacgcacagacaaatgtttaaagcacagtaaatacgaatatatgcctttggatattaaattaatgcttgatgataaaagaatcaaacttttttttttttgagatggagtctcgctctgtcacccagactggagtgcagtggtgtgatcactgctcagtgcaacctctgcctcccaggatcaagcaattctgactcagcctcccaagtagctgggattacaggcgcaggccaccatgcccggctaattttttgtatttttagtagagacggggtttcaccatgctggccaggctggtctcaaacacctgaccttgtgatccgtccgccttggcctcccaaagtgctgggattacaggcgtgagccaccgcgcctggccaaaacaacattttaagtagaagatccaggttttagtgcagcttctgccgttaactaggttaataaatcacaaccttggggccacagttgccttatatgtaaatgaagtgtttagaataaaatagttaaatttccttatttttcccttggtggctgccctgtggaaacagtttagaatatttgttttgtgtgtaggaacctagttgtgttagtttacctgggtgttccacagctgatagtgattgccttgaataaattcaagggcaatttattcatttttactagggagatagacctttacagcaatcaagatatttttgtccatatccaggttagctggtaagaggatttttttggagaaaaaaatgatatttagaaagttaatttctaattccggaatggaataaaaacaatatgagtagt

SEQ ID NO: 274 - DNA, 5000 bp, Homo sapiens
  source 1..5000: mol_type = genomic DNA
ctcctgacttcatgatccgcctgcctcggcctcccaaagtgctgagattacaagcgtgagccaccgcgcccggcctgacccttctttcttataccagtgttttgtatatcatttagtgctctctctaattccgtctctgtgtccatgtttaattgctttagttcacatagttaatatcatacaggtttttaacaactttctctcactgattttattgttagttgctttctagtcttctaccttctatactacttgagtttttgtgaacgatttgatcatgtcactctcctgtttaaaacttttttttttttgagactaagtgtcgctctgtcgcccaggctggagtgcaatggcgcgatctcagctcactgcaacctctgcctcccgggttcaagcgattctcctacctcatcctcccgcatagctgggattacagacgcgcaccaccacacccggctaatttttgtatttttagtagagacggtttcaccatgttggccaggctggtctcgaactcctcacctcaggtgatctgcctgccttggccttccaaagtgctgggattatagggatgagccaccgcacctggccctgtttaaaacttttagtatcttccaatcacaagcatacccatacatggtgctgtaatttgcttagaacctgctttcttttatacttccattccactgtagtaatctgtattaatatatttttttcctttaagctctgttggattgataatctctttctttttaaggtttatttcatctctaccaaagcctccttaactcctcaaattccccaatccacctctataattccatatatttttgtctgtactcctgcttagactttgtcttatcgattgttgtttatctatttgcatgcatttccttctagacaaggaccctggggcagttctgcttgactagtgagaaatatttactaaatattaggatgactggggtcacttcatttttctgtgtcccacaagagtgagttttttttatctacaaccctctttcccatatttatactagatgtccccctactcaaagacaagcagagaagttggtcttatgctcttcagttcatttatatcgggaaaggaggcagaattaatcagcgtggtgaggagactttgaaatgatgtcaaatggggaacaataggaggaactaggatatttagccaaaagtaaaggaaaatcaggtgggatatgataccactttccaaatatttgaaaggctgtcatgtagaaaaattatagactaattgttattattagtttgtcttcagagggcagctataggatgaataggtagcagtttgggtctcaacattaggaagagctttctgaacatgaggtcgggaatttttcatgagtgaagctgtgaaaagaggcagaatgactagtggtttaaagtgctctaaagtagattttttaacttggacagcattggactagatagctatgctgaagaatctgaagttttcctgatttagttctaagttccatgaccatgaatttcataaaaatatttattgttttgggttaagacaatcttgtatacattcagcagtaattaagcacttttgatatgctaagtacttcctgtatgccagctcttgggcatttggaagtcagtagtaggcttttactgtcaagtagttcatatttataagtgtaaagattttgagtttttcttctttttaatttttgagaaccagtgaataatttgttttttttattctcaagattaacaattcctaaaaatcagttttgagatttacttcctatcttaatccatttagcctgctataaaaaatactttaggctgggtaatttataagcaatagaaatgtattacagttctggagactgggaattccaagatcatggcaccagcagatgcagtgtctggtgagggcctattccttatagctgcttctctgtgtcagaacatgctggaagggccaaaagtttccatcaagcctcttttataaaggcactaatttcattcatgagggtggagccctcataacctgatcacctcccaaagtccccacctcttaatattacttcattgagattagatttcaacgtaggaattttggtgggacacatacattcagaccatagcacttcccttccaaatactaaaattgtttttctctcttctttatttccagcaatgtctcaggctgtgcagacaaacggaactcaaccattaagcaaaacatgggaactcagtttatatgagttacaacgaacacctcaggtaatgactaagatgactgccaaggggcatatgagacgtgtaaactgggatacatttttagaacatgaaaacttaaatagaacatagagtaataataaatttatattcaagcattcctgacttctgtatgttggctaacactttattcattgattgaacaaataatctgaatactctatacaagcttttgtggtaggtactgggtgaacagtggtgaataaaacagatgtagcaccaaccatggactttacagacattgaaaaagtacatatctataaaattcacatgtgagaagttgtagaaagttgggcaagtcctccttgctgtaataagtactgataaggcaccaaggaagactgttttgagatgatggcagactaggggaggagcaggtttgaaggcaacaaacatgcttaacactggattaattttgagattcctatacaacaggcaggcagagatgccaactatagatgatttttatattagtctgaactaaatacaaaattttagggattgacagcacattttaagcaataagaatggttaaactcatccagagagatgagcagaggacctataacttcatccagagctgtttcaacatttagaaattaggtaatggacaaggagccagtgaaggagactgagaagaacatccagagaaaaggaaggaaaaacaggagattgagagagaggggggatttaaaagctaaaggaagccttaccaacatggagaaaccccgtctctactgaaaatacaaaattagccaggcatggtggcacgtgcctgtagttgcagctacttgggaggctgaggcaggagaatcacttgaacctgggaggcggtggttgcagtgagccgagattgcgccattgcactccagcctgggcgacaagaacgaaactccgtctcaaaaaaaaaaaaagctaaaggaagtatttcaaggaggatgtagttaaagtgtttaacactagtgacaggcttaataagatgaaggttagacaagtgtaaattagacttaacaatacagttggccctccacatacatggggttctgcatctgtggattcaagcaaccacaactgaaaaaatccaggaagaaaaattttcacaaagttccaaaaaccaaaatttgaattttccatgtgctaataagtactatgttgaatccatgcaagtgaggtgctgtatgggcattgtattaagtgttaaagtaatttagagatgatttaaagcagcatgcccagggaccagtttcatccatgtgctaataagtactatgttgaatccatgcaaatgaggtgctgaatgggcattgtattaagtattaaagtaatttagagatgatttaaagcagcagtccccagggaccagtttcatggatgatagtgtttccatggattggaggtgggtgggtgggtgggggatggtttcaggatgaaactgcaccacctcagatcatcaggcattagattataataaggagcatgcagtctagatccgttgcatgtgcagttctcaatagggttcggactcttacgagagtctaatgccaccactgatctgacaggaggcagagcttaggcagtaatgcttacttgcctgctgctcacctcctgctgtgtggtctggttcctaacaagccaatacctgtccatggcctgaggttcgggacccctgatttaaagtatgtgggagaatatgcctaagttatatgcaaacatcatgccatttttttataagggacttgagcatccaaggattttgatatctgtggaagttcctggagccaatcccccatggataccaagggtcgaccgtatatacttggtgaccttgacaagagcacgttcacctgagtagattgtacaagtttgagggttgattggaatcatggtgcattctcatcattggttcatgtgatgaatcaaggatatgataattatatatatatggcccagtaaggggagggtagaagtgacaaaagatgaataggcagttcttcagagaaattcagctatgcaggggagcagagaaatggagcaaaaactggagaccaatgtgaaattgagttttcaattgtgtttataagatggagatagaggccgggcgtggtggctcagacatgtaatcccagcactttggaaggccgaggccggtggatcacctgaggtcaggagtttgcggccagcctggccaacatggtgaaaccctgtctctactaaaagtacaaaaaattagccaggcctggtggtgcacacctgtaatcccagctactcgggaggctttttttttgagacagagtatcgctctgtcacctaggctggcatgcagtggcgtgatcgcggctcactgcaacctctacctcccagattcaaatgattctcctgcttcagcctcccaagtagctgggattacaggcgtgtgccaccatgcccggctaatttttgtatttttagtagagacagggtttcaccatgttggtcaggctggtctcgaacttctgaccttgtgatccacccgcctcggcctcccgaagtgctggaattacaggtgtgagccatcgtgcctggccgaggctggtgaaatttttagttacaccaaggtggttttccctttttcttttcccctacagtgctacacatctgcacaggtacagccctggaggagaacatagatggttgaatttatccagggttgggattttgttaggcat

SEQ ID NO: 275 - DNA, 23 bp, synthetic construct
  source 1..23: mol_type = other DNA
gctcagcaggcacctgcctcagc

SEQ ID NO: 276 - DNA, 23 bp, synthetic construct
  source 1..23: mol_type = other DNA
gcggatgttccaatcagtacgca

SEQ ID NO: 277 - DNA, 23 bp, synthetic construct
  source 1..23: mol_type = other DNA
tatgagttacaacgaacacctca

SEQ ID NO: 278 - DNA, 2898 bp, synthetic construct
  source 1..2898: mol_type = other DNA
gctagcgagggcctatttcccatgattccttcatatttgcatatacgatacaaggctgttagagagataattggaattaatttgactgtaaacacaaagatattagtacaaaatacgtgacgtagaaagtaataatttcttgggtagtttgcagttttaaaattatgttttaaaatggactatcatatgcttaccgtaacttgaaagtatttcgatttcttggctttatatatcttgtggaaaggacgaaacaccgaatttctactaagtgtagatgctcagcaggcacctgcctcagctttttttgaattctgatgcggtattttctccttacgcatctgtgcggtatttcacaccgcatacgtcaaagcaaccatagtacgcgccctgtagcggcgcattaagcgcggcgggtgtggtggttacgcgcagcgtgaccgctacacttgccagcgccttagcgcccgctcctttcgctttcttcccttcctttctcgccacgttcgccggctttccccgtcaagctctaaatcgggggctccctttagggttccgatttagtgctttacggcacctcgaccccaaaaaacttgatttgggtgatggttcacgtagtgggccatcgccctgatagacggtttttcgccctttgacgttggagtccacgttctttaatagtggactcttgttccaaactggaacaacactcaactctatctcgggctattcttttgatttataagggattttgccgatttcggtctattggttaaaaaatgagctgatttaacaaaaatttaacgcgaattttaacaaaatattaacgtttacaattttatggtgcactctcagtacaatctgctctgatgccgcatagttaagccagccccgacacccgccaacacccgctgacgcgccctgacgggcttgtctgctcccggcatccgcttacagacaagctgtgaccgtctccgggagctgcatgtgtcagaggttttcaccgtcatcaccgaaacgcgcgagacgaaagggcctcgtgatacgcctatttttataggttaatgtcatgataataatggtttcttagacgtcaggtggcacttttcggggaaatgtgcgcggaacccctatttgtttatttttctaaatacattcaaatatgtatccgctcatgagacaataaccctgataaatgcttcaataatattgaaaaaggaagagtatgagtattcaacatttccgtgtcgcccttattcccttttttgcggcattttgccttcctgtttttgctcacccagaaacgctggtgaaagtaaaagatgctgaagatcagttgggtgcacgagtgggttacatcgaactggatctcaacagcggtaagatccttgagagttttcgccccgaagaacgttttccaatgatgagcacttttaaagttctgctatgtggcgcggtattatcccgtattgacgccgggcaagagcaactcggtcgccgcatacactattctcagaatgacttggttgagtactcaccagtcacagaaaagcatcttacggatggcatgacagtaagagaattatgcagtgctgccataaccatgagtgataacactgcggccaacttacttctgacaacgatcggaggaccgaaggagctaaccgcttttttgcacaacatgggggatcatgtaactcgccttgatcgttgggaaccggagctgaatgaagccataccaaacgacgagcgtgacaccacgatgcctgtagcaatggcaacaacgttgcgcaaactattaactggcgaactacttactctagcttcccggcaacaattaatagactggatggaggcggataaagttgcaggaccacttctgcgctcggcccttccggctggctggtttattgctgataaatctggagccggtgagcgtggaagccgcggtatcattgcagcactggggccagatggtaagccctcccgtatcgtagttatctacacgacggggagtcaggcaactatggatgaacgaaatagacagatcgctgagataggtgcctcactgattaagcattggtaactgtcagaccaagtttactcatatatactttagattgatttaaaacttcatttttaatttaaaaggatctaggtgaagatcctttttgataatctcatgaccaaaatcccttaacgtgagttttcgttccactgagcgtcagaccccgtagaaaagatcaaaggatcttcttgagatcctttttttctgcgcgtaatctgctgcttgcaaacaaaaaaaccaccgctaccagcggtggtttgtttgccggatcaagagctaccaactctttttccgaaggtaactggcttcagcagagcgcagataccaaatactgttcttctagtgtagccgtagttaggccaccacttcaagaactctgtagcaccgcctacatacctcgctctgctaatcctgttaccagtggctgctgccagtggcgataagtcgtgtcttaccgggttggactcaagacgatagttaccggataaggcgcagcggtcgggctgaacggggggttcgtgcacacagcccagcttggagcgaacgacctacaccgaactgagatacctacagcgtgagctatgagaaagcgccacgcttcccgaagggagaaaggcggacaggtatccggtaagcggcagggtcggaacaggagagcgcacgagggagcttccagggggaaacgcctggtatctttatagtcctgtcgggtttcgccacctctgacttgagcgtcgatttttgtgatgctcgtcaggggggcggagcctatggaaaaacgccagcaacgcggcctttttacggttcctggccttttgctggccttttgctca

SEQ ID NO: 279 - DNA, 2898 bp, synthetic construct
  source 1..2898: mol_type = other DNA
gctagcgagggcctatttcccatgattccttcatatttgcatatacgatacaaggctgttagagagataattggaattaatttgactgtaaacacaaagatattagtacaaaatacgtgacgtagaaagtaataatttcttgggtagtttgcagttttaaaattatgttttaaaatggactatcatatgcttaccgtaacttgaaagtatttcgatttcttggctttatatatcttgtggaaaggacgaaacaccgaatttctactaagtgtagatgcggatgttccaatcagtacgcatttttttgaattctgatgcggtattttctccttacgcatctgtgcggtatttcacaccgcatacgtcaaagcaaccatagtacgcgccctgtagcggcgcattaagcgcggcgggtgtggtggttacgcgcagcgtgaccgctacacttgccagcgccttagcgcccgctcctttcgctttcttcccttcctttctcgccacgttcgccggctttccccgtcaagctctaaatcgggggctccctttagggttccgatttagtgctttacggcacctcgaccccaaaaaacttgatttgggtgatggttcacgtagtgggccatcgccctgatagacggtttttcgccctttgacgttggagtccacgttctttaatagtggactcttgttccaaactggaacaacactcaactctatctcgggctattcttttgatttataagggattttgccgatttcggtctattggttaaaaaatgagctgatttaacaaaaatttaacgcgaattttaacaaaatattaacgtttacaattttatggtgcactctcagtacaatctgctctgatgccgcatagttaagccagccccgacacccgccaacacccgctgacgcgccctgacgggcttgtctgctcccggcatccgcttacagacaagctgtgaccgtctccgggagctgcatgtgtcagaggttttcaccgtcatcaccgaaacgcgcgagacgaaagggcctcgtgatacgcctatttttataggttaatgtcatgataataatggtttcttagacgtcaggtggcacttttcggggaaatgtgcgcggaacccctatttgtttatttttctaaatacattcaaatatgtatccgctcatgagacaataaccctgataaatgcttcaataatattgaaaaaggaagagtatgagtattcaacatttccgtgtcgcccttattcccttttttgcggcattttgccttcctgtttttgctcacccagaaacgctggtgaaagtaaaagatgctgaagatcagttgggtgcacgagtgggttacatcgaactggatctcaacagcggtaagatccttgagagttttcgccccgaagaacgttttccaatgatgagcacttttaaagttctgctatgtggcgcggtattatcccgtattgacgccgggcaagagcaactcggtcgccgcatacactattctcagaatgacttggttgagtactcaccagtcacagaaaagcatcttacggatggcatgacagtaagagaattatgcagtgctgccataaccatgagtgataacactgcggccaacttacttctgacaacgatcggaggaccgaaggagctaaccgcttttttgcacaacatgggggatcatgtaactcgccttgatcgttgggaaccggagctgaatgaagccataccaaacgacgagcgtgacaccacgatgcctgtagcaatggcaacaacgttgcgcaaactattaactggcgaactacttactctagcttcccggcaacaattaatagactggatggaggcggataaagttgcaggaccacttctgcgctcggcccttccggctggctggtttattgctgataaatctggagccggtgagcgtggaagccgcggtatcattgcagcactggggccagatggtaagccctcccgtatcgtagttatctacacgacggggagtcaggcaactatggatgaacgaaatagacagatcgctgagataggtgcctcactgattaagcattggtaactgtcagaccaagtttactcatatatactttagattgatttaaaacttcatttttaatttaaaaggatctaggtgaagatcctttttgataatctcatgaccaaaatcccttaacgtgagttttcgttccactgagcgtcagaccccgtagaaaagatcaaaggatcttcttgagatcctttttttctgcgcgtaatctgctgcttgcaaacaaaaaaaccaccgctaccagcggtggtttgtttgccggatcaagagctaccaactctttttccgaaggtaactggcttcagcagagcgcagataccaaatactgttcttctagtgtagccgtagttaggccaccacttcaagaactctgtagcaccgcctacatacctcgctctgctaatcctgttaccagtggctgctgccagtggcgataagtcgtgtcttaccgggttggactcaagacgatagttaccggataaggcgcagcggtcgggctgaacggggggttcgtgcacacagcccagcttggagcgaacgacctacaccgaactgagatacctacagcgtgagctatgagaaagcgccacgcttcccgaagggagaaaggcggacaggtatccggtaagcggcagggtcggaacaggagagcgcacgagggagcttccagggggaaacgcctggtatctttatagtcctgtcgggtttcgccacctctgacttgagcgtcgatttttgtgatgctcgtcaggggggcggagcctatggaaaaacgccagcaacgcggcctttttacggttcctggccttttgctggccttttgctca

SEQ ID NO: 280 - DNA, 2898 bp, synthetic construct
  source 1..2898: mol_type = other DNA
gctagcgagggcctatttcccatgattccttcatatttgcatatacgatacaaggctgttagagagataattggaattaatttgactgtaaacacaaagatattagtacaaaatacgtgacgtagaaagtaataatttcttgggtagtttgcagttttaaaattatgttttaaaatggactatcatatgcttaccgtaacttgaaagtatttcgatttcttggctttatatatcttgtggaaaggacgaaacaccgaatttctactaagtgtagattatgagttacaacgaacacctcatttttttgaattctgatgcggtattttctccttacgcatctgtgcggtatttcacaccgcatacgtcaaagcaaccatagtacgcgccctgtagcggcgcattaagcgcggcgggtgtggtggttacgcgcagcgtgaccgctacacttgccagcgccttagcgcccgctcctttcgctttcttcccttcctttctcgccacgttcgccggctttccccgtcaagctctaaatcgggggctccctttagggttccgatttagtgctttacggcacctcgaccccaaaaaacttgatttgggtgatggttcacgtagtgggccatcgccctgatagacggtttttcgccctttgacgttggagtccacgttctttaatagtggactcttgttccaaactggaacaacactcaactctatctcgggctattcttttgatttataagggattttgccgatttcggtctattggttaaaaaatgagctgatttaacaaaaatttaacgcgaattttaacaaaatattaacgtttacaattttatggtgcactctcagtacaatctgctctgatgccgcatagttaagccagccccgacacccgccaacacccgctgacgcgccctgacgggcttgtctgctcccggcatccgcttacagacaagctgtgaccgtctccgggagctgcatgtgtcagaggttttcaccgtcatcaccgaaacgcgcgagacgaaagggcctcgtgatacgcctatttttataggttaatgtcatgataataatggtttcttagacgtcaggtggcacttttcggggaaatgtgcgcggaacccctatttgtttatttttctaaatacattcaaatatgtatccgctcatgagacaataaccctgataaatgcttcaataatattgaaaaaggaagagtatgagtattcaacatttccgtgtcgcccttattcccttttttgcggcattttgccttcctgtttttgctcacccagaaacgctggtgaaagtaaaagatgctgaagatcagttgggtgcacgagtgggttacatcgaactggatctcaacagcggtaagatccttgagagttttcgccccgaagaacgttttccaatgatgagcacttttaaagttctgctatgtggcgcggtattatcccgtattgacgccgggcaagagcaactcggtcgccgcatacactattctcagaatgacttggttgagtactcaccagtcacagaaaagcatcttacggatggcatgacagtaagagaattatgcagtgctgccataaccatgagtgataacactgcggccaacttacttctgacaacgatcggaggaccgaaggagctaaccgcttttttgcacaacatgggggatcatgtaactcgccttgatcgttgggaaccggagctgaatgaagccataccaaacgacgagcgtgacaccacgatgcctgtagcaatggcaacaacgttgcgcaaactattaactggcgaactacttactctagcttcccggcaacaattaatagactggatggaggcggataaagttgcaggaccacttctgcgctcggcccttccggctggctggtttattgctgataaatctggagccggtgagcgtggaagccgcggtatcattgcagcactggggccagatggtaagccctcccgtatcgtagttatctacacgacggggagtcaggcaactatggatgaacgaaatagacagatcgctgagataggtgcctcactgattaagcattggtaactgtcagaccaagtttactcatatatactttagattgatttaaaacttcatttttaatttaaaaggatctaggtgaagatcctttttgataatctcatgaccaaaatcccttaacgtgagttttcgttccactgagcgtcagaccccgtagaaaagatcaaaggatcttcttgagatcctttttttctgcgcgtaatctgctgcttgcaaacaaaaaaaccaccgctaccagcggtggtttgtttgccggatcaagagctaccaactctttttccgaaggtaactggcttcagcagagcgcagataccaaatactgttcttctagtgtagccgtagttaggccaccacttcaagaactctgtagcaccgcctacatacctcgctctgctaatcctgttaccagtggctgctgccagtggcgataagtcgtgtcttaccgggttggactcaagacgatagttaccggataaggcgcagcggtcgggctgaacggggggttcgtgcacacagcccagcttggagcgaacgacctacaccgaactgagatacctacagcgtgagctatgagaaagcgccacgcttcccgaagggagaaaggcggacaggtatccggtaagcggcagggtcggaacaggagagcgcacgagggagcttccagggggaaacgcctggtatctttatagtcctgtcgggtttcgccacctctgacttgagcgtcgatttttgtgatgctcgtcaggggggcggagcctatggaaaaacgccagcaacgcggcctttttacggttcctggccttttgctggccttttgctca

SEQ ID NO: 281 - protein, 1736 aa, synthetic construct
MKRTADGSEFESPKKKRKVMEASPASGPRHLMDPHIFTSNFNNGIGRHKTYLCYEVERLDNGTSVKMDQHRGFLHNQAKNLLCGFYGRHAELRFLDLVPSLQLDPAQIYRVTWFISWSPCFSWGCAGEVRAFLQENTHVRLRIFAARIYDYDPLYKEALQMLRDAGAQVSIMTYDEFKHCWDTFVDHQGCPFQPWDGLDEHSQALSGRLRAILQNQGNSGSETPGTSESATPESMSKLEKFTNCYSLSKTLRFKAIPVGKTQENIDNKRLLVEDEKRAEDYKGVKKLLDRYYLSFINDVLHSIKLKNLNNYISLFRKKTRTEKENKELENLEINLRKEIAKAFKGNEGYKSLFKKDIIETILPEFLDDKDEIALVNSFNGFTTAFTGFFDNRENMFSEEAKSTSIAFRCINENLTRYISNMDIFEKVDAIFDKHEVQEIKEKILNSDYDVEDFFEGEFFNFVLTQEGIDVYNAIIGGFVTESGEKIKGLNEYINLYNQKTKQKLPKFKPLYKQVLSDRESLSFYGGSSGENQTTQKGQKNSRERMKRIEEGIKELGSQILKEHPVENTQLQNEKLYLYYLQNGRDMYVDQELDINRLSDYDVDHIVPQSFLKDDSIDNKVLTRSDKNRGKSDNVPSEEVVKKMKNYWRQLLNAKLITQRKFDNLTKAERGGLSGSEGYTSDEEVLEVFRNTLNKNSEIFSSIKKLEKLFKNFDEYSSAGIFVKNGPAISTISKDIFGEWNVIRDKWNAEYDDIHLKKKAVVTEKYEDDRRKSFKKIGSFSLEQLQEYADADLSVVEKLKEIIIQKVDEIYKVYGSSEKLFDADFVLEKSLKKNDAVVAIMKDLLDSVKSFENYIKAFFGEGKETNRDESFYGDFVLAYDILLKVDHIYDAIRNYVTQKPYSKDKFKLYFQNPQFMGGWDKDKETDYRATILRYGSKYYLAIMDKKYAKCLQKIDKDDVNGNYEKINYKLLPGPNKMLPKVFFSKKWMAYYNPSEDIQKIYKNGTFKKGDMFNLNDCHKLIDFFKDSISRYPKWSNAYDFNFSETEKYKDIAGFYREVEEQGYKVSFESASKKEVDKLVEEGKLYMFQIYNKDFSDKSHGTPNLHTMYFKLLFDENNHGQIRLSGGAELFMRRASLKKEELVVHPANSPIANKNPDNPKKTTTLSYDVYKDKRFSEDQYELHIPIAINKCPKNIFKINTEVRVLLKHDDNPYVIGIARGERNLLYIVVVDGKGNIVEQYSLNEIINNFNGIRIKTDYHSLLDKKEKERFEARQNWTSIENIKELKAGYISQVVHKICELVEKYDAVIALEDLNSGFKNSRVKVEKQVYQKFEKMLIDKLNYMVDKKSNPCATGGALKGYQITNKFESFKSMSTQNGFIFYIPAWLTSKIDPSTGFVNLLKTKYTSIADSKKFISSFDRIMYVPEEDLFEFALDYKNFSRTDADYIKKWKLYSYGNRIRIFRNPKKNNVFDWEEVCLTSAYKELFNKYGINYQQGDIRALLCEQSDKAFYSSFMALMSLMLQMRNSITGRTDVDFLISPVKNSDGIFYDSRNYEAQENAILPKNADANGAYNIARKVLWAIGQFKKAEDEKLDKVKIAISNKEWLEYAQTSVKHGSPKKKRKVSGGSTNLSDIIEKETGKQLVIQESILMLPEEVEEVIGNKPESDILVHTAYDESTDENVMLLTSDAPEYKPWALVIQDSNGENKIKMLTKYDSGGSKRTADGSEFEPKKKRKVGSG

SEQ ID NO: 282 - protein, 1616 aa, synthetic construct
MKRTADGSEFESPKKKRKVSEVEFSHEYWMRHALTLAKRARDEREVPVGAVLVLNNRVIGEGWNRAIGLHDPTAHAEIMALRQGGLVMQNYRLIDATLYVTFEPCVMCAGAMIHSRIGRVVFGVRNSKRGAAGSLMNVLNYPGMNHRVEITEGILADECAALLCDFYRMPRQVFNAQKKAQSSINSGGSSGGSSGSETPGTSESATPESSGGSSGGSSKLEKFTNCYSLSKTLRFKAIPVGKTQENIDNKRLLVEDEKRAEDYKGVKKLLDRYYLSFINDVLHSIKLKNLNNYISLFRKKTRTEKENKELENLEINLRKEIAKAFKGNEGYKSLFKKDIIETILPEFLDDKDEIALVNSFNGFTTAFTGFFDNRENMFSEEAKSTSIAFRCINENLTRYISNMDIFEKVDAIFDKHEVQEIKEKILNSDYDVEDFFEGEFFNFVLTQEGIDVYNAIIGGFVTESGEKIKGLNEYINLYNQKTKQKLPKFKPLYKQVLSDRESLSFYGEGSSGENQTTQKGQKNSRERMKRIEEGIKELGSQILKEHPVENTQLQNEKLYLYYLQNGRDMYVDQELDINRLSDYDVDHIVPQSFLKDDSIDNKVLTRSDKNRGKSDNVPSEEVVKKMKNYWRQLLNAKLITQRKFDNLTKAERGGLSGYTSDEEVLEVFRNTLNKNSEIFSSIKKLEKLFKNFDEYSSAGIFVKNGPAISTISKDIFGEWNVIRDKWNAEYDDIHLKKKAVVTEKYEDDRRKSFKKIGSFSLEQLQEYADADLSVVEKLKEIIIQKVDEIYKVYGSSEKLFDADFVLEKSLKKNDAVVAIMKDLLDSVKSFENYIKAFFGEGKETNRDESFYGDFVLAYDILLKVDHIYDAIRNYVTQKPYSKDKFKLYFQNPQFMGGWDKDKETDYRATILRYGSKYYLAIMDKKYAKCLQKIDKDDVNGNYEKINYKLLPGPNKMLPKVFFSKKWMAYYNPSEDIQKIYKNGTFKKGDMFNLNDCHKLIDFFKDSISRYPKWSNAYDFNFSETEKYKDIAGFYREVEEQGYKVSFESASKKEVDKLVEEGKLYMFQIYNKDFSDKSHGTPNLHTMYFKLLFDENNHGQIRLSGGAELFMRRASLKKEELVVHPANSPIANKNPDNPKKTTTLSYDVYKDKRFSEDQYELHIPIAINKCPKNIFKINTEVRVLLKHDDNPYVIGIARGERNLLYIVVVDGKGNIVEQYSLNEIINNFNGIRIKTDYHSLLDKKEKERFEARQNWTSIENIKELKAGYISQVVHKICELVEKYDAVIALEDLNSGFKNSRVKVEKQVYQKFEKMLIDKLNYMVDKKSNPCATGGALKGYQITNKFESFKSMSTQNGFIFYIPAWLTSKIDPSTGFVNLLKTKYTSIADSKKFISSFDRIMYVPEEDLFEFALDYKNFSRTDADYIKKWKLYSYGNRIRIFRNPKKNNVFDWEEVCLTSAYKELFNKYGINYQQGDIRALLCEQSDKAFYSSFMALMSLMLQMRNSITGRTDVDFLISPVKNSDGIFYDSRNYEAQENAILPKNADANGAYNIARKVLWAIGQFKKAEDEKLDKVKIAISNKEWLEYAQTSVKHSGGSKRTADGSEFEPKKKRKVGSG

SEQ ID NO: 283 - protein, 1616 aa, synthetic construct
MKRTADGSEFESPKKKRKVSEVEFSHEYWMRHALTLAKRARDEREVPVGAVLVLNNRVIGEGWNRAIGLHDPTAHAEIMALRQGGLVMQNYRLIDATLYVTFEPCVMCAGAMIHSRIGRVVFGVRNSKRGAAGSLMNVLNYPGMNHRVEITEGILADECAALLCDFYRMPRQVFNAQKKAQSSINSGGSSGGSSGSETPGTSESATPESSGGSSGGSSKLEKFTNCYSLSKTLRFKAIPVGKTQENIDNKRLLVEDEKRAEDYKGVKKLLDRYYLSFINDVLHSIKLKNLNNYISLFRKKTRTEKENKELENLEINLRKEIAKAFKGNEGYKSLFKKDIIETILPEFLDDKDEIALVNSFNGFTTAFTGFFDNRENMFSEEAKSTSIAFRCINENLTRYISNMDIFEKVDAIFDKHEVQEIKEKILNSDYDVEDFFEGEFFNFVLTQEGIDVYNAIIGGFVTESGEKIKGLNEYINLYNQKTKQKLPKFKPLYKQVLSDRESLSFYGGSSGENQTTQKGQKNSRERMKRIEEGIKELGSQILKEHPVENTQLQNEKLYLYYLQNGRDMYVDQELDINRLSDYDVDHIVPQSFLKDDSIDNKVLTRSDKNRGKSDNVPSEEVVKKMKNYWRQLLNAKLITQRKFDNLTKAERGGLSEGYTSDEEVLEVFRNTLNKNSEIFSSIKKLEKLFKNFDEYSSAGIFVKNGPAISTISKDIFGEWNVIRDKWNAEYDDIHLKKKAVVTEKYEDDRRKSFKKIGSFSLEQLQEYADADLSVVEKLKEIIIQKVDEIYKVYGSSEKLFDADFVLEKSLKKNDAVVAIMKDLLDSVKSFENYIKAFFGEGKETNRDESFYGDFVLAYDILLKVDHIYDAIRNYVTQKPYSKDKFKLYFQNPQFMGGWDKDKETDYRATILRYGSKYYLAIMDKKYAKCLQKIDKDDVNGNYEKINYKLLPGPNKMLPKVFFSKKWMAYYNPSEDIQKIYKNGTFKKGDMFNLNDCHKLIDFFKDSISRYPKWSNAYDFNFSETEKYKDIAGFYREVEEQGYKVSFESASKKEVDKLVEEGKLYMFQIYNKDFSDKSHGTPNLHTMYFKLLFDENNHGQIRLSGGAELFMRRASLKKEELVVHPANSPIANKNPDNPKKTTTLSYDVYKDKRFSEDQYELHIPIAINKCPKNIFKINTEVRVLLKHDDNPYVIGIARGERNLLYIVVVDGKGNIVEQYSLNEIINNFNGIRIKTDYHSLLDKKEKERFEARQNWTSIENIKELKAGYISQVVHKICELVEKYDAVIALEDLNSGFKNSRVKVEKQVYQKFEKMLIDKLNYMVDKKSNPCATGGALKGYQITNKFESFKSMSTQNGFIFYIPAWLTSKIDPSTGFVNLLKTKYTSIADSKKFISSFDRIMYVPEEDLFEFALDYKNFSRTDADYIKKWKLYSYGNRIRIFRNPKKNNVFDWEEVCLTSAYKELFNKYGINYQQGDIRALLCEQSDKAFYSSFMALMSLMLQMRNSITGRTDVDFLISPVKNSDGIFYDSRNYEAQENAILPKNADANGAYNIARKVLWAIGQFKKAEDEKLDKVKIAISNKEWLEYAQTSVKHSGGSKRTADGSEFEPKKKRKVGSG

SEQ ID NO: 284 - protein, 1618 aa, synthetic construct
MKRTADGSEFESPKKKRKVSEVEFSHEYWMRHALTLAKRARDEREVPVGAVLVLNNRVIGEGWNRAIGLHDPTAHAEIMALRQGGLVMQNYRLIDATLYVTFEPCVMCAGAMIHSRIGRVVFGVRNSKRGAAGSLMNVLNYPGMNHRVEITEGILADECAALLCDFYRMPRQVFNAQKKAQSSINSGGSSGGSSGSETPGTSESATPESSGGSSGGSSKLEKFTNCYSLSKTLRFKAIPVGKTQENIDNKRLLVEDEKRAEDYKGVKKLLDRYYLSFINDVLHSIKLKNLNNYISLFRKKTRTEKENKELENLEINLRKEIAKAFKGNEGYKSLFKKDIIETILPEFLDDKDEIALVNSFNGFTTAFTGFFDNRENMFSEEAKSTSIAFRCINENLTRYISNMDIFEKVDAIFDKHEVQEIKEKILNSDYDVEDFFEGEFFNFVLTQEGIDVYNAIIGGFVTESGEKIKGLNEYINLYNQKTKQKLPKFKPLYKQVLSDRESLSFYGGSSGENQTTQKGQKNSRERMKRIEEGIKELGSQILKEHPVENTQLQNEKLYLYYLQNGRDMYVDQELDINRLSDYDVDHIVPQSFLKDDSIDNKVLTRSDKNRGKSDNVPSEEVVKKMKNYWRQLLNAKLITQRKFDNLTKAERGGLSGSEGYTSDEEVLEVFRNTLNKNSEIFSSIKKLEKLFKNFDEYSSAGIFVKNGPAISTISKDIFGEWNVIRDKWNAEYDDIHLKKKAVVTEKYEDDRRKSFKKIGSFSLEQLQEYADADLSVVEKLKEIIIQKVDEIYKVYGSSEKLFDADFVLEKSLKKNDAVVAIMKDLLDSVKSFENYIKAFFGEGKETNRDESFYGDFVLAYDILLKVDHIYDAIRNYVTQKPYSKDKFKLYFQNPQFMGGWDKDKETDYRATILRYGSKYYLAIMDKKYAKCLQKIDKDDVNGNYEKINYKLLPGPNKMLPKVFFSKKWMAYYNPSEDIQKIYKNGTFKKGDMFNLNDCHKLIDFFKDSISRYPKWSNAYDFNFSETEKYKDIAGFYREVEEQGYKVSFESASKKEVDKLVEEGKLYMFQIYNKDFSDKSHGTPNLHTMYFKLLFDENNHGQIRLSGGAELFMRRASLKKEELVVHPANSPIANKNPDNPKKTTTLSYDVYKDKRFSEDQYELHIPIAINKCPKNIFKINTEVRVLLKHDDNPYVIGIARGERNLLYIVVVDGKGNIVEQYSLNEIINNFNGIRIKTDYHSLLDKKEKERFEARQNWTSIENIKELKAGYISQVVHKICELVEKYDAVIALEDLNSGFKNSRVKVEKQVYQKFEKMLIDKLNYMVDKKSNPCATGGALKGYQITNKFESFKSMSTQNGFIFYIPAWLTSKIDPSTGFVNLLKTKYTSIADSKKFISSFDRIMYVPEEDLFEFALDYKNFSRTDADYIKKWKLYSYGNRIRIFRNPKKNNVFDWEEVCLTSAYKELFNKYGINYQQGDIRALLCEQSDKAFYSSFMALMSLMLQMRNSITGRTDVDFLISPVKNSDGIFYDSRNYEAQENAILPKNADANGAYNIARKVLWAIGQFKKAEDEKLDKVKIAISNKEWLEYAQTSVKHSGGSKRTADGSEFEPKKKRKVGSG

SEQ ID NO: 285 - DNA, 8256 bp, synthetic construct
  source 1..8256: mol_type = other DNA
gacattgattattgactagttattaatagtaatcaattacggggtcattagttcatagcccatatatggagttccgcgttacataacttacggtaaatggcccgcctggctgaccgcccaacgacccccgcccattgacgtcaataatgacgtatgttcccatagtaacgccaatagggactttccattgacgtcaatgggtggagtatttacggtaaactgcccacttggcagtacatcaagtgtatcatatgccaagtacgccccctattgacgtcaatgacggtaaatggcccgcctggcattatgcccagtacatgaccttatgggactttcctacttggcagtacatctacgtattagtcatcgctattaccatggtgatgcggttttggcagtacatcaatgggcgtggatagcggtttgactcacggggatttccaagtctccaccccattgacgtcaatgggagtttgttttggcaccaaaatcaacgggactttccaaaatgtcgtaacaactccgccccattgacgcaaatgggcggtaggcgtgtacggtgggaggtctatataagcagagctggtttagtgaaccgtcagatccgctagagatccgcggccgctaatacgactcactatagggagagccgccaccatgaaacggacagccgacggaagcgagttcgagtcaccaaagaagaagcggaaagtcactcagtttgagggattcacaaatctttaccaagtgtctaagactttgaggttcgagcttattccacaaggaaagacattgaagcacattcaagaacagggttttattgaggaagataaggctaggaatgatcattataaggaacttaagcctattattgatagaatctataagacctacgcagatcaatgtttgcagcttgttcaacttgattgggagaacttgtctgctgcaattgattcatacaggaaggaaaagacagaggaaaccagaaacgctcttattgaggaacaagctacttacaggaatgcaattcacgattatttcattggaagaaccgataacttgactgatgctattaataagagacatgcagaaatctataagggtctttttaaggctgagctttttaacggaaaggtgttgaagcagcttggtacagttactacaaccgagcacgaaaacgcacttttgaggtcttttgataagttcactacatacttctcaggattctacagaaacaggaagaatgtgttctctgctgaggatatttcaaccgcaatcccacatagaatcgttcaagataacttccctaagttcaaggaaaactgccacatttttacaaggcttatcaccgctgtgccatctttgagagaacatttcgaaaacgttaagaaggcaatcggtatctttgtgtctacttcaatcgaggaagttttctcttttcctttctacaaccaacttttgacccaaactcagattgatctttacaaccagcttttgggaggtatttcaagggaggctggaaccgaaaagattaagggtttgaacgaggttttgaatcttgcaatccaaaagaatgatgaaactgctcatattattgcatcacttccacacaggtttattcctcttttcaagcagattttgtctgatagaaacactctttcttttattcttgaggagtttaagtctgatgaggaagtgattcaatcattttgcaagtataagacacttttgagaaacgagaatgttcttgagactgctgaagcattgttcaacgaacttaattctattgatttgacccatattttcatttcacacaagaagttggagactatttcttctgctttgtgcgatcactgggatacattgaggaatgcactttacgagagaaggatttctgaattgactggaaagattacaaagtctgctaaggaaaaggttcaaagatcacttaagcatgaggatattaacttgcaggaaattatttctgctgcaggaaaggagctttcagaggcttttaagcaaaagacttctgagattttgtcacatgcacacgctgcattggatcagccacttcctaccactttgaagaagcaagaggaaaaggaaattcttaagtctcagttggattcacttttgggactttatcatcttttggattggttcgctgtggatgagtctaacgaggttgatccagagttttcagcaaggcttacaggtattaagttggagatggaaccttctttgtcattttacaacaaggctagaaactacgcaacaaagaagccatattctgtggagaagtttaagttgaacttccaaatgcctaccttggctaggggatgggatgtgaatagagaaaagaacaatggtgcaatccttttcgttaagaacggattgtactaccttggtattatgccaaagcagaagggaagatacaaggctttgtcttttgagcctactgaaaagacatcagaaggtttcgataagatgtactacgattacttcccagatgctgcaaagatgattcctaagtgttctactcaacttaaggctgttactgcacatttccagacacacacaaccccaatccttttgtcaaacaatttcatcgagcctcttgaaatcacaaaggaaatctatgatttgaacaatccagagaaggaacctaagaagttccaaaccgcttatgctaagaaaactggagatcagaagggttatagggaagctctttgcaagtggattgattttaccagagatttcttgtctaagtacactaagactacatcaattgatctttcttctcttagaccatcttctcaatacaaggatcttggagagtattacgctgaattgaaccctcttttgtaccacatttcttttcaaagaatcgctgagaaggaaattatggatgcagtggagactggaaagttgtatctttttcaaatctataacaaggatttcgcaaagggacatcatggaaagccaaatttgcataccctttactggactggacttttctctcctgagaacttggctaagacatctattaagttgaatggtcaggcagaattgttttataggccaaagtctaggatgaagaggatggctcatagacttggagaaaagatgcttaacaagaagttgaaggatcaaaagaccccaattcctgatactctttaccaggagttgtatgattacgttaatcataggctttctcacgatttgtcagatgaagctagagcacttttgcctaacgtgatcacaaaggaagtttctcacgaaattattaaggatagaaggttcacctctgataagtttttctttcatgtgccaatcactttgaactaccaagctgcaaattctccttcaaagtttaaccagagggttaatgcttatcttaaggagcatccagaaacccctattattggaattgatagaggtgagaggaacttgatctatatcacagtgattgattctaccggaaagattcttgagcaaagatcattgaataccattcaacagttcgattatcaaaagaagttggataacagagagaaggaaagggttgctgctagacaagcatggtctgttgtgggaactattaaggatcttaagcagggttacttgtcacaagtgattcatgagattgttgatttgatgattcactatcaggcagttgtggttttggaaaaccttaatttcggattcaagtctaagaggactggtattgctgagaaggcagtgtaccaacagttcgaaaagatgcttatcgataagttgaactgtttggttcttaaggattacccagctgagaaagtgggaggtgttcttaacccttatcagttgacagatcaattcacttcttttgctaagatgggaacacaatcaggttttcttttctatgttccagcaccttacacatctaagattgatccattgaccggatttgttgatccattcgtttggaaaactattaagaaccatgagtcaagaaagcacttccttgaaggatttgatttcttgcattacgatgttaagactggagatttcatcttgcacttcaagatgaacaggaatctttcttttcaaagaggattgccaggtttcatgcctgcttgggatattgtttttgagaagaacgaaactcagttcgatgctaagggaacaccattcattgcaggaaagagaattgtgcctgttattgagaatcacagattcactggtagatatagggatctttacccagctaacgaattgattgcacttttggaggaaaagggaattgtttttagggatggttctaacattcttcctaagttgcttgagaatgatgattcacatgctattgatactatggtggcacttattaggtctgttttgcaaatgagaaactcaaatgctgcaacaggagaggattacattaactctccagtgagggatttgaatggtgtttgctttgattcaagattccaaaacccagaatggcctatggatgctgatgcaaacggagcttatcatattgcacttaagggtcagcttttgcttaatcacttgaaggagtctaaggatttgaagttgcagaacggtatttcaaatcaagattggcttgcttacattcaggaattgagaaactctggcggctcaaaaagaaccgccgacggcagcgaattcgagcccaagaagaagaggaaagtcggaagcggagctactaacttcagcctgctgaagcaggctggagacgtggaggagaaccctggacctatggtgagcaagggcgaggagctgttcaccggggtggtgcccatcctggtcgagctggacggcgacgtaaacggccacaagttcagcgtgtccggcgagggcgagggcgatgccacctacggcaagctgaccctgaagttcatctgcaccaccggcaagctgcccgtgccctggcccaccctcgtgaccaccctgacctatggagtgcagtgcttcagccgctaccccgaccacatgaagcagcacgacttcttcaagtccgccatgcccgaaggctacgtccaggagcgcaccatcttcttcaaggacgacggcaactacaagacccgcgccgaggtgaagttcgagggcgacaccctggtgaaccgcatcgagctgaagggcatcgacttcaaggaggacggcaacatcctggggcacaagctggagtacaactacaacagccacaacgtctatatcatggccgacaagcagaagaacggcatcaaggtgaacttcaagatccgccacaacatcgaggacggcagcgtgcagctcgccgaccactaccagcagaacacccccatcggcgacggccccgtgctgctgcccgacaaccactacctgagcacccagtccgccctgagcaaagaccccaacgagaagcgcgatcacatggtcctgctggagttcgtgaccgccgccgggatcactctcggcatggacgagctgtacaagtctggtggttctcccaagaagaagaggaaagtctaaccggtcatcatcaccatcaccattgagtttaaacccgctgatcagcctcgactgtgccttctagttgccagccatctgttgtttgcccctcccccgtgccttccttgaccctggaaggtgccactcccactgtcctttcctaataaaatgaggaaattgcatcgcattgtctgagtaggtgtcattctattctggggggtggggtggggcaggacagcaagggggaggattgggaagacaatagcaggcatgctggggatgcggtgggctctatggcttctgaggcggaaagaaccagctggggctcgataccgtcgacctctagctagagcttggcgtaatcatggtcatagctgtttcctgtgtgaaattgttatccgctcacaattccacacaacatacgagccggaagcataaagtgtaaagcctagggtgcctaatgagtgagctaactcacattaattgcgttgcgctcactgcccgctttccagtcgggaaacctgtcgtgccagctgcattaatgaatcggccaacgcgcggggagaggcggtttgcgtattgggcgctcttccgcttcctcgctcactgactcgctgcgctcggtcgttcggctgcggcgagcggtatcagctcactcaaaggcggtaatacggttatccacagaatcaggggataacgcaggaaagaacatgtgagcaaaaggccagcaaaaggccaggaaccgtaaaaaggccgcgttgctggcgtttttccataggctccgcccccctgacgagcatcacaaaaatcgacgctcaagtcagaggtggcgaaacccgacaggactataaagataccaggcgtttccccctggaagctccctcgtgcgctctcctgttccgaccctgccgcttaccggatacctgtccgcctttctcccttcgggaagcgtggcgctttctcatagctcacgctgtaggtatctcagttcggtgtaggtcgttcgctccaagctgggctgtgtgcacgaaccccccgttcagcccgaccgctgcgccttatccggtaactatcgtcttgagtccaacccggtaagacacgacttatcgccactggcagcagccactggtaacaggattagcagagcgaggtatgtaggcggtgctacagagttcttgaagtggtggcctaactacggctacactagaagaacagtatttggtatctgcgctctgctgaagccagttaccttcggaaaaagagttggtagctcttgatccggcaaacaaaccaccgctggtagcggtggtttttttgtttgcaagcagcagattacgcgcagaaaaaaaggatctcaagaagatcctttgatcttttctacggggtctgacactcagtggaacgaaaactcacgttaagggattttggtcatgagattatcaaaaaggatcttcacctagatccttttaaattaaaaatgaagttttaaatcaatctaaagtatatatgagtaaacttggtctgacagttaccaatgcttaatcagtgaggcacctatctcagcgatctgtctatttcgttcatccatagttgcctgactccccgtcgtgtagataactacgatacgggagggcttaccatctggccccagtgctgcaatgataccgcgagacccacgctcaccggctccagatttatcagcaataaaccagccagccggaagggccgagcgcagaagtggtcctgcaactttatccgcctccatccagtctattaattgttgccgggaagctagagtaagtagttcgccagttaatagtttgcgcaacgttgttgccattgctacaggcatcgtggtgtcacgctcgtcgtttggtatggcttcattcagctccggttcccaacgatcaaggcgagttacatgatcccccatgttgtgcaaaaaagcggttagctccttcggtcctccgatcgttgtcagaagtaagttggccgcagtgttatcactcatggttatggcagcactgcataattctcttactgtcatgccatccgtaagatgcttttctgtgactggtgagtactcaaccaagtcattctgagaatagtgtatgcggcgaccgagttgctcttgcccggcgtcaatacgggataataccgcgccacatagcagaactttaaaagtgctcatcattggaaaacgttcttcggggcgaaaactctcaaggatcttaccgctgttgagatccagttcgatgtaacccactcgtgcacccaactgatcttcagcatcttttactttcaccagcgtttctgggtgagcaaaaacaggaaggcaaaatgccgcaaaaaagggaataagggcgacacggaaatgttgaatactcatactcttcctttttcaatattattgaagcatttatcagggttattgtctcatgagcggatacatatttgaatgtatttagaaaaataaacaaataggggttccgcgcacatttccccgaaaagtgccacctgacgtcgacggatcgggagatcgatctcccgatcccctagggtcgactctcagtacaatctgctctgatgccgcatagttaagccagtatctgctccctgcttgtgtgttggaggtcgctgagtagtgcgcgagcaaaatttaagctacaacaaggcaaggcttgaccgacaattgcatgaagaatctgcttagggttaggcgttttgcgctgcttcgcgatgtacgggccagatatacgcgtt

SEQ ID NO: 286 - DNA, 8286 bp, synthetic construct
  source 1..8286: mol_type = other DNA
gacattgattattgactagttattaatagtaatcaattacggggtcattagttcatagcccatatatggagttccgcgttacataacttacggtaaatggcccgcctggctgaccgcccaacgacccccgcccattgacgtcaataatgacgtatgttcccatagtaacgccaatagggactttccattgacgtcaatgggtggagtatttacggtaaactgcccacttggcagtacatcaagtgtatcatatgccaagtacgccccctattgacgtcaatgacggtaaatggcccgcctggcattatgcccagtacatgaccttatgggactttcctacttggcagtacatctacgtattagtcatcgctattaccatggtgatgcggttttggcagtacatcaatgggcgtggatagcggtttgactcacggggatttccaagtctccaccccattgacgtcaatgggagtttgttttggcaccaaaatcaacgggactttccaaaatgtcgtaacaactccgccccattgacgcaaatgggcggtaggcgtgtacggtgggaggtctatataagcagagctggtttagtgaaccgtcagatccgctagagatccgcggccgctaatacgactcactatagggagagccgccaccatgaaacggacagccgacggaagcgagttcgagtcaccaaagaagaagcggaaagtcacagaggaaaccagaaacgctcttattgaggaacaagctacttacaggaatgcaattcacgattatttcattggaagaaccgataacttgactgatgctattaataagagacatgcagaaatctataagggtctttttaaggctgagctttttaacggaaaggtgttgaagcagcttggtacagttactacaaccgagcacgaaaacgcacttttgaggtcttttgataagttcactacatacttctcaggattctacagaaacaggaagaatgtgttctctgctgaggatatttcaaccgcaatcccacatagaatcgttcaagataacttccctaagttcaaggaaaactgccacatttttacaaggcttatcaccgctgtgccatctttgagagaacatttcgaaaacgttaagaaggcaatcggtatctttgtgtctacttcaatcgaggaagttttctcttttcctttctacaaccaacttttgacccaaactcagattgatctttacaaccagcttttgggaggtatttcaagggaggctggaaccgaaaagattaagggtttgaacgaggttttgaatcttgcaatccaaaagaatgatgaaactgctcatattattgcatcacttccacacaggtttattcctcttttcaagcagattttgtctgatagaaacactctttcttttattcttgaggagtttaagtctgatgaggaagtgattcaatcattttgcaagtataagacacttttgagaaacgagaatgttcttgagactgctgaagcattgttcaacgaacttaattctattgatttgacccatattttcatttcacacaagaagttggagactatttcttctgctttgtgcgatcactgggatacattgaggaatgcactttacgagagaaggatttctgaattgactggaaagattacaaagtctgctaaggaaaaggttcaaagatcacttaagcatgaggatattaacttgcaggaaattatttctgctgcaggaaaggagctttcagaggcttttaagcaaaagacttctgagattttgtcacatgcacacgctgcattggatcagccacttcctaccactttgaagaagcaagaggaaaaggaaattcttaagtctcagttggattcacttttgggactttatcatcttttggattggttcgctgtggatgagtctaacgaggttgatccagagttttcagcaaggcttacaggtattaagttggagatggaaccttctttgtcattttacaacaaggctagaaactacgcaacaaagaagccatattctgtggagaagtttaagttgaacttccaaatgcctaccttggctaggggatgggatgtgaatagagaaaagaacaatggtgcaatccttttcgttaagaacggattgtactaccttggtattatgccaaagcagaagggaagatacaaggctttgtcttttgagcctactgaaaagacatcagaaggtttcgataagatgtactacgattacttcccagatgctgcaaagatgattcctaagtgttctactcaacttaaggctgttactgcacatttccagacacacacaaccccaatccttttgtcaaacaatttcatcgagcctcttgaaatcacaaaggaaatctatgatttgaacaatccagagaaggaacctaagaagttccaaaccgcttatgctaagaaaactggagatcagaagggttatagggaagctctttgcaagtggattgattttaccagagatttcttgtctaagtacactaagactacatcaattgatctttcttctcttagaccatcttctcaatacaaggatcttggagagtattacgctgaattgaaccctcttttgtaccacatttcttttcaaagaatcgctgagaaggaaattatggatgcagtggagactggaaagttgtatctttttcaaatctataacaaggatttcgcaaagggacatcatggaaagccaaatttgcataccctttactggactggacttttctctcctgagaacttggctaagacatctattaagttgaatggtcaggcagaattgttttataggccaaagtctaggatgaagaggatggctcatagacttggagaaaagatgcttaacaagaagttgaaggatcaaaagaccccaattcctgatactctttaccaggagttgtatgattacgttaatcataggctttctcacgatttgtcagatgaagctagagcacttttgcctaacgtgatcacaaaggaagtttctcacgaaattattaaggatagaaggttcacctctgataagtttttctttcatgtgccaatcactttgaactaccaagctgcaaattctccttcaaagtttaaccagagggttaatgcttatcttaaggagcatccagaaacccctattattggaattgatagaggtgagaggaacttgatctatatcacagtgattgattctaccggaaagattcttgagcaaagatcattgaataccattcaacagttcgattatcaaaagaagttggataacagagagaaggaaagggttgctgctagacaagcatggtctgttgtgggaactattaaggatcttaagcagggttacttgtcacaagtgattcatgagattgttgatttgatgattcactatcaggcagttgtggttttggaaaaccttaatttcggattcaagtctaagaggactggtattgctgagaaggcagtgtaccaacagttcgaaaagatgcttatcgataagttgaactgtttggttcttaaggattacccagctgagaaagtgggaggtgttcttaacccttatcagttgacagatcaattcacttcttttgctaagatgggaacacaatcaggttttcttttctatgttccagcaccttacacatctaagattgatccattgaccggatttgttgatccattcgtttggaaaactattaagaaccatgagtcaagaaagcacttccttgaaggatttgatttcttgcattacgatgttaagactggagatttcatcttgcacttcaagatgaacaggaatctttcttttcaaagaggattgccaggtttcatgcctgcttgggatattgtttttgagaagaacgaaactcagttcgatgctaagggaacaccattcattgcaggaaagagaattgtgcctgttattgagaatcacagattcactggtagatatagggatctttacccagctaacgaattgattgcacttttggaggaaaagggaattgtttttagggatggttctaacattcttcctaagttgcttgagaatgatgattcacatgctattgatactatggtggcacttattaggtctgttttgcaaatgagaaactcaaatgctgcaacaggagaggattacattaactctccagtgagggatttgaatggtgtttgctttgattcaagattccaaaacccagaatggcctatggatgctgatgcaaacggagcttatcatattgcacttaagggtcagcttttgcttaatcacttgaaggagtctaaggatttgaagttgcagaacggtatttcaaatcaagattggcttgcttacattcaggaattgagaaacggctcctctggcagctccggctctagcggcactcagtttgagggattcacaaatctttaccaagtgtctaagactttgaggttcgagcttattccacaaggaaagacattgaagcacattcaagaacagggttttattgaggaagataaggctaggaatgatcattataaggaacttaagcctattattgatagaatctataagacctacgcagatcaatgtttgcagcttgttcaacttgattgggagaacttgtctgctgcaattgattcatacaggaaggaaaagtctggcggctcaaaaagaaccgccgacggcagcgaattcgagcccaagaagaagaggaaagtcggaagcggagctactaacttcagcctgctgaagcaggctggagacgtggaggagaaccctggacctatggtgagcaagggcgaggagctgttcaccggggtggtgcccatcctggtcgagctggacggcgacgtaaacggccacaagttcagcgtgtccggcgagggcgagggcgatgccacctacggcaagctgaccctgaagttcatctgcaccaccggcaagctgcccgtgccctggcccaccctcgtgaccaccctgacctatggagtgcagtgcttcagccgctaccccgaccacatgaagcagcacgacttcttcaagtccgccatgcccgaaggctacgtccaggagcgcaccatcttcttcaaggacgacggcaactacaagacccgcgccgaggtgaagttcgagggcgacaccctggtgaaccgcatcgagctgaagggcatcgacttcaaggaggacggcaacatcctggggcacaagctggagtacaactacaacagccacaacgtctatatcatggccgacaagcagaagaacggcatcaaggtgaacttcaagatccgccacaacatcgaggacggcagcgtgcagctcgccgaccactaccagcagaacacccccatcggcgacggccccgtgctgctgcccgacaaccactacctgagcacccagtccgccctgagcaaagaccccaacgagaagcgcgatcacatggtcctgctggagttcgtgaccgccgccgggatcactctcggcatggacgagctgtacaagtctggtggttctcccaagaagaagaggaaagtctaaccggtcatcatcaccatcaccattgagtttaaacccgctgatcagcctcgactgtgccttctagttgccagccatctgttgtttgcccctcccccgtgccttccttgaccctggaaggtgccactcccactgtcctttcctaataaaatgaggaaattgcatcgcattgtctgagtaggtgtcattctattctggggggtggggtggggcaggacagcaagggggaggattgggaagacaatagcaggcatgctggggatgcggtgggctctatggcttctgaggcggaaagaaccagctggggctcgataccgtcgacctctagctagagcttggcgtaatcatggtcatagctgtttcctgtgtgaaattgttatccgctcacaattccacacaacatacgagccggaagcataaagtgtaaagcctagggtgcctaatgagtgagctaactcacattaattgcgttgcgctcactgcccgctttccagtcgggaaacctgtcgtgccagctgcattaatgaatcggccaacgcgcggggagaggcggtttgcgtattgggcgctcttccgcttcctcgctcactgactcgctgcgctcggtcgttcggctgcggcgagcggtatcagctcactcaaaggcggtaatacggttatccacagaatcaggggataacgcaggaaagaacatgtgagcaaaaggccagcaaaaggccaggaaccgtaaaaaggccgcgttgctggcgtttttccataggctccgcccccctgacgagcatcacaaaaatcgacgctcaagtcagaggtggcgaaacccgacaggactataaagataccaggcgtttccccctggaagctccctcgtgcgctctcctgttccgaccctgccgcttaccggatacctgtccgcctttctcccttcgggaagcgtggcgctttctcatagctcacgctgtaggtatctcagttcggtgtaggtcgttcgctccaagctgggctgtgtgcacgaaccccccgttcagcccgaccgctgcgccttatccggtaactatcgtcttgagtccaacccggtaagacacgacttatcgccactggcagcagccactggtaacaggattagcagagcgaggtatgtaggcggtgctacagagttcttgaagtggtggcctaactacggctacactagaagaacagtatttggtatctgcgctctgctgaagccagttaccttcggaaaaagagttggtagctcttgatccggcaaacaaaccaccgctggtagcggtggtttttttgtttgcaagcagcagattacgcgcagaaaaaaaggatctcaagaagatcctttgatcttttctacggggtctgacactcagtggaacgaaaactcacgttaagggattttggtcatgagattatcaaaaaggatcttcacctagatccttttaaattaaaaatgaagttttaaatcaatctaaagtatatatgagtaaacttggtctgacagttaccaatgcttaatcagtgaggcacctatctcagcgatctgtctatttcgttcatccatagttgcctgactccccgtcgtgtagataactacgatacgggagggcttaccatctggccccagtgctgcaatgataccgcgagacccacgctcaccggctccagatttatcagcaataaaccagccagccggaagggccgagcgcagaagtggtcctgcaactttatccgcctccatccagtctattaattgttgccgggaagctagagtaagtagttcgccagttaatagtttgcgcaacgttgttgccattgctacaggcatcgtggtgtcacgctcgtcgtttggtatggcttcattcagctccggttcccaacgatcaaggcgagttacatgatcccccatgttgtgcaaaaaagcggttagctccttcggtcctccgatcgttgtcagaagtaagttggccgcagtgttatcactcatggttatggcagcactgcataattctcttactgtcatgccatccgtaagatgcttttctgtgactggtgagtactcaaccaagtcattctgagaatagtgtatgcggcgaccgagttgctcttgcccggcgtcaatacgggataataccgcgccacatagcagaactttaaaagtgctcatcattggaaaacgttcttcggggcgaaaactctcaaggatcttaccgctgttgagatccagttcgatgtaacccactcgtgcacccaactgatcttcagcatcttttactttcaccagcgtttctgggtgagcaaaaacaggaaggcaaaatgccgcaaaaaagggaataagggcgacacggaaatgttgaatactcatactcttcctttttcaatattattgaagcatttatcagggttattgtctcatgagcggatacatatttgaatgtatttagaaaaataaacaaataggggttccgcgcacatttccccgaaaagtgccacctgacgtcgacggatcgggagatcgatctcccgatcccctagggtcgactctcagtacaatctgctctgatgccgcatagttaagccagtatctgctccctgcttgtgtgttggaggtcgctgagtagtgcgcgagcaaaatttaagctacaacaaggcaaggcttgaccgacaattgcatgaagaatctgcttagggttaggcgttttgcgctgcttcgcgatgtacgggccagatatacgcgtt

SEQ ID NO: 287 - DNA, 8304 bp, synthetic construct
  source 1..8304: mol_type = other DNA
gacattgattattgactagttattaatagtaatcaattacggggtcattagttcatagcccatatatggagttccgcgttacataacttacggtaaatggcccgcctggctgaccgcccaacgacccccgcccattgacgtcaataatgacgtatgttcccatagtaacgccaatagggactttccattgacgtcaatgggtggagtatttacggtaaactgcccacttggcagtacatcaagtgtatcatatgccaagtacgccccctattgacgtcaatgacggtaaatggcccgcctggcattatgcccagtacatgaccttatgggactttcctacttggcagtacatctacgtattagtcatcgctattaccatggtgatgcggttttggcagtacatcaatgggcgtggatagcggtttgactcacggggatttccaagtctccaccccattgacgtcaatgggagtttgttttggcaccaaaatcaacgggactttccaaaatgtcgtaacaactccgccccattgacgcaaatgggcggtaggcgtgtacggtgggaggtctatataagcagagctggtttagtgaaccgtcagatccgctagagatccgcggccgctaatacgactcactatagggagagccgccaccatgaaacggacagccgacggaagcgagttcgagtcaccaaagaagaagcggaaagtcacagaggaaaccagaaacgctcttattgaggaacaagctacttacaggaatgcaattcacgattatttcattggaagaaccgataacttgactgatgctattaataagagacatgcagaaatctataagggtctttttaaggctgagctttttaacggaaaggtgttgaagcagcttggtacagttactacaaccgagcacgaaaacgcacttttgaggtcttttgataagttcactacatacttctcaggattctacagaaacaggaagaatgtgttctctgctgaggatatttcaaccgcaatcccacatagaatcgttcaagataacttccctaagttcaaggaaaactgccacatttttacaaggcttatcaccgctgtgccatctttgagagaacatttcgaaaacgttaagaaggcaatcggtatctttgtgtctacttcaatcgaggaagttttctcttttcctttctacaaccaacttttgacccaaactcagattgatctttacaaccagcttttgggaggtatttcaagggaggctggaaccgaaaagattaagggtttgaacgaggttttgaatcttgcaatccaaaagaatgatgaaactgctcatattattgcatcacttccacacaggtttattcctcttttcaagcagattttgtctgatagaaacactctttcttttattcttgaggagtttaagtctgatgaggaagtgattcaatcattttgcaagtataagacacttttgagaaacgagaatgttcttgagactgctgaagcattgttcaacgaacttaattctattgatttgacccatattttcatttcacacaagaagttggagactatttcttctgctttgtgcgatcactgggatacattgaggaatgcactttacgagagaaggatttctgaattgactggaaagattacaaagtctgctaaggaaaaggttcaaagatcacttaagcatgaggatattaacttgcaggaaattatttctgctgcaggaaaggagctttcagaggcttttaagcaaaagacttctgagattttgtcacatgcacacgctgcattggatcagccacttcctaccactttgaagaagcaagaggaaaaggaaattcttaagtctcagttggattcacttttgggactttatcatcttttggattggttcgctgtggatgagtctaacgaggttgatccagagttttcagcaaggcttacaggtattaagttggagatggaaccttctttgtcattttacaacaaggctagaaactacgcaacaaagaagccatattctgtggagaagtttaagttgaacttccaaatgcctaccttggctaggggatgggatgtgaatagagaaaagaacaatggtgcaatccttttcgttaagaacggattgtactaccttggtattatgccaaagcagaagggaagatacaaggctttgtcttttgagcctactgaaaagacatcagaaggtttcgataagatgtactacgattacttcccagatgctgcaaagatgattcctaagtgttctactcaacttaaggctgttactgcacatttccagacacacacaaccccaatccttttgtcaaacaatttcatcgagcctcttgaaatcacaaaggaaatctatgatttgaacaatccagagaaggaacctaagaagttccaaaccgcttatgctaagaaaactggagatcagaagggttatagggaagctctttgcaagtggattgattttaccagagatttcttgtctaagtacactaagactacatcaattgatctttcttctcttagaccatcttctcaatacaaggatcttggagagtattacgctgaattgaaccctcttttgtaccacatttcttttcaaagaatcgctgagaaggaaattatggatgcagtggagactggaaagttgtatctttttcaaatctataacaaggatttcgcaaagggacatcatggaaagccaaatttgcataccctttactggactggacttttctctcctgagaacttggctaagacatctattaagttgaatggtcaggcagaattgttttataggccaaagtctaggatgaagaggatggctcatagacttggagaaaagatgcttaacaagaagttgaaggatcaaaagaccccaattcctgatactctttaccaggagttgtatgattacgttaatcataggctttctcacgatttgtcagatgaagctagagcacttttgcctaacgtgatcacaaaggaagtttctcacgaaattattaaggatagaaggttcacctctgataagtttttctttcatgtgccaatcactttgaactaccaagctgcaaattctccttcaaagtttaaccagagggttaatgcttatcttaaggagcatccagaaacccctattattggaattgatagaggtgagaggaacttgatctatatcacagtgattgattctaccggaaagattcttgagcaaagatcattgaataccattcaacagttcgattatcaaaagaagttggataacagagagaaggaaagggttgctgctagacaagcatggtctgttgtgggaactattaaggatcttaagcagggttacttgtcacaagtgattcatgagattgttgatttgatgattcactatcaggcagttgtggttttggaaaaccttaatttcggattcaagtctaagaggactggtattgctgagaaggcagtgtaccaacagttcgaaaagatgcttatcgataagttgaactgtttggttcttaaggattacccagctgagaaagtgggaggtgttcttaacccttatcagttgacagatcaattcacttcttttgctaagatgggaacacaatcaggttttcttttctatgttccagcaccttacacatctaagattgatccattgaccggatttgttgatccattcgtttggaaaactattaagaaccatgagtcaagaaagcacttccttgaaggatttgatttcttgcattacgatgttaagactggagatttcatcttgcacttcaagatgaacaggaatctttcttttcaaagaggattgccaggtttcatgcctgcttgggatattgtttttgagaagaacgaaactcagttcgatgctaagggaacaccattcattgcaggaaagagaattgtgcctgttattgagaatcacagattcactggtagatatagggatctttacccagctaacgaattgattgcacttttggaggaaaagggaattgtttttagggatggttctaacattcttcctaagttgcttgagaatgatgattcacatgctattgatactatggtggcacttattaggtctgttttgcaaatgagaaactcaaatgctgcaacaggagaggattacattaactctccagtgagggatttgaatggtgtttgctttgattcaagattccaaaacccagaatggcctatggatgctgatgcaaacggagcttatcatattgcacttaagggtcagcttttgcttaatcacttgaaggagtctaaggatttgaagttgcagaacggtatttcaaatcaagattggcttgcttacattcaggaattgagaaacggctcctctggcagctccggctctagcggctcctctggcagctccggcactcagtttgagggattcacaaatctttaccaagtgtctaagactttgaggttcgagcttattccacaaggaaagacattgaagcacattcaagaacagggttttattgaggaagataaggctaggaatgatcattataaggaacttaagcctattattgatagaatctataagacctacgcagatcaatgtttgcagcttgttcaacttgattgggagaacttgtctgctgcaattgattcatacaggaaggaaaagtctggcggctcaaaaagaaccgccgacggcagcgaattcgagcccaagaagaagaggaaagtcggaagcggagctactaacttcagcctgctgaagcaggctggagacgtggaggagaaccctggacctatggtgagcaagggcgaggagctgttcaccggggtggtgcccatcctggtcgagctggacggcgacgtaaacggccacaagttcagcgtgtccggcgagggcgagggcgatgccacctacggcaagctgaccctgaagttcatctgcaccaccggcaagctgcccgtgccctggcccaccctcgtgaccaccctgacctatggagtgcagtgcttcagccgctaccccgaccacatgaagcagcacgacttcttcaagtccgccatgcccgaaggctacgtccaggagcgcaccatcttcttcaaggacgacggcaactacaagacccgcgccgaggtgaagttcgagggcgacaccctggtgaaccgcatcgagctgaagggcatcgacttcaaggaggacggcaacatcctggggcacaagctggagtacaactacaacagccacaacgtctatatcatggccgacaagcagaagaacggcatcaaggtgaacttcaagatccgccacaacatcgaggacggcagcgtgcagctcgccgaccactaccagcagaacacccccatcggcgacggccccgtgctgctgcccgacaaccactacctgagcacccagtccgccctgagcaaagaccccaacgagaagcgcgatcacatggtcctgctggagttcgtgaccgccgccgggatcactctcggcatggacgagctgtacaagtctggtggttctcccaagaagaagaggaaagtctaaccggtcatcatcaccatcaccattgagtttaaacccgctgatcagcctcgactgtgccttctagttgccagccatctgttgtttgcccctcccccgtgccttccttgaccctggaaggtgccactcccactgtcctttcctaataaaatgaggaaattgcatcgcattgtctgagtaggtgtcattctattctggggggtggggtggggcaggacagcaagggggaggattgggaagacaatagcaggcatgctggggatgcggtgggctctatggcttctgaggcggaaagaaccagctggggctcgataccgtcgacctctagctagagcttggcgtaatcatggtcatagctgtttcctgtgtgaaattgttatccgctcacaattccacacaacatacgagccggaagcataaagtgtaaagcctagggtgcctaatgagtgagctaactcacattaattgcgttgcgctcactgcccgctttccagtcgggaaacctgtcgtgccagctgcattaatgaatcggccaacgcgcggggagaggcggtttgcgtattgggcgctcttccgcttcctcgctcactgactcgctgcgctcggtcgttcggctgcggcgagcggtatcagctcactcaaaggcggtaatacggttatccacagaatcaggggataacgcaggaaagaacatgtgagcaaaaggccagcaaaaggccaggaaccgtaaaaaggccgcgttgctggcgtttttccataggctccgcccccctgacgagcatcacaaaaatcgacgctcaagtcagaggtggcgaaacccgacaggactataaagataccaggcgtttccccctggaagctccctcgtgcgctctcctgttccgaccctgccgcttaccggatacctgtccgcctttctcccttcgggaagcgtggcgctttctcatagctcacgctgtaggtatctcagttcggtgtaggtcgttcgctccaagctgggctgtgtgcacgaaccccccgttcagcccgaccgctgcgccttatccggtaactatcgtcttgagtccaacccggtaagacacgacttatcgccactggcagcagccactggtaacaggattagcagagcgaggtatgtaggcggtgctacagagttcttgaagtggtggcctaactacggctacactagaagaacagtatttggtatctgcgctctgctgaagccagttaccttcggaaaaagagttggtagctcttgatccggcaaacaaaccaccgctggtagcggtggtttttttgtttgcaagcagcagattacgcgcagaaaaaaaggatctcaagaagatcctttgatcttttctacggggtctgacactcagtggaacgaaaactcacgttaagggattttggtcatgagattatcaaaaaggatcttcacctagatccttttaaattaaaaatgaagttttaaatcaatctaaagtatatatgagtaaacttggtctgacagttaccaatgcttaatcagtgaggcacctatctcagcgatctgtctatttcgttcatccatagttgcctgactccccgtcgtgtagataactacgatacgggagggcttaccatctggccccagtgctgcaatgataccgcgagacccacgctcaccggctccagatttatcagcaataaaccagccagccggaagggccgagcgcagaagtggtcctgcaactttatccgcctccatccagtctattaattgttgccgggaagctagagtaagtagttcgccagttaatagtttgcgcaacgttgttgccattgctacaggcatcgtggtgtcacgctcgtcgtttggtatggcttcattcagctccggttcccaacgatcaaggcgagttacatgatcccccatgttgtgcaaaaaagcggttagctccttcggtcctccgatcgttgtcagaagtaagttggccgcagtgttatcactcatggttatggcagcactgcataattctcttactgtcatgccatccgtaagatgcttttctgtgactggtgagtactcaaccaagtcattctgagaatagtgtatgcggcgaccgagttgctcttgcccggcgtcaatacgggataataccgcgccacatagcagaactttaaaagtgctcatcattggaaaacgttcttcggggcgaaaactctcaaggatcttaccgctgttgagatccagttcgatgtaacccactcgtgcacccaactgatcttcagcatcttttactttcaccagcgtttctgggtgagcaaaaacaggaaggcaaaatgccgcaaaaaagggaataagggcgacacggaaatgttgaatactcatactcttcctttttcaatattattgaagcatttatcagggttattgtctcatgagcggatacatatttgaatgtatttagaaaaataaacaaataggggttccgcgcacatttccccgaaaagtgccacctgacgtcgacggatcgggagatcgatctcccgatcccctagggtcgactctcagtacaatctgctctgatgccgcatagttaagccagtatctgctccctgcttgtgtgttggaggtcgctgagtagtgcgcgagcaaaatttaagctacaacaaggcaaggcttgaccgacaattgcatgaagaatctgcttagggttaggcgttttgcgctgcttcgcgatgtacgggccagatatacgcgtt

SEQ ID NO: 288 - DNA, 8286 bp, synthetic construct
  source 1..8286: mol_type = other DNA
gacattgattattgactagttattaatagtaatcaattacggggtcattagttcatagcccatatatggagttccgcgttacataacttacggtaaatggcccgcctggctgaccgcccaacgacccccgcccattgacgtcaataatgacgtatgttcccatagtaacgccaatagggactttccattgacgtcaatgggtggagtatttacggtaaactgcccacttggcagtacatcaagtgtatcatatgccaagtacgccccctattgacgtcaatgacggtaaatggcccgcctggcattatgcccagtacatgaccttatgggactttcctacttggcagtacatctacgtattagtcatcgctattaccatggtgatgcggttttggcagtacatcaatgggcgtggatagcggtttgactcacggggatttccaagtctccaccccattgacgtcaatgggagtttgttttggcaccaaaatcaacgggactttccaaaatgtcgtaacaactccgccccattgacgcaaatgggcggtaggcgtgtacggtgggaggtctatataagcagagctggtttagtgaaccgtcagatccgctagagatccgcggccgctaatacgactcactatagggagagccgccaccatgaaacggacagccgacggaagcgagttcgagtcaccaaagaagaagcggaaagtcgagtttaagtctgatgaggaagtgattcaatcattttgcaagtataagacacttttgagaaacgagaatgttcttgagactgctgaagcattgttcaacgaacttaattctattgatttgacccatattttcatttcacacaagaagttggagactatttcttctgctttgtgcgatcactgggatacattgaggaatgcactttacgagagaaggatttctgaattgactggaaagattacaaagtctgctaaggaaaaggttcaaagatcacttaagcatgaggatattaacttgcaggaaattatttctgctgcaggaaaggagctttcagaggcttttaagcaaaagacttctgagattttgtcacatgcacacgctgcattggatcagccacttcctaccactttgaagaagcaagaggaaaaggaaattcttaagtctcagttggattcacttttgggactttatcatcttttggattggttcgctgtggatgagtctaacgaggttgatccagagttttcagcaaggcttacaggtattaagttggagatggaaccttctttgtcattttacaacaaggctagaaactacgcaacaaagaagccatattctgtggagaagtttaagttgaacttccaaatgcctaccttggctaggggatgggatgtgaatagagaaaagaacaatggtgcaatccttttcgttaagaacggattgtactaccttggtattatgccaaagcagaagggaagatacaaggctttgtcttttgagcctactgaaaagacatcagaaggtttcgataagatgtactacgattacttcccagatgctgcaaagatgattcctaagtgttctactcaacttaaggctgttactgcacatttccagacacacacaaccccaatccttttgtcaaacaatttcatcgagcctcttgaaatcacaaaggaaatctatgatttgaacaatccagagaaggaacctaagaagttccaaaccgcttatgctaagaaaactggagatcagaagggttatagggaagctctttgcaagtggattgattttaccagagatttcttgtctaagtacactaagactacatcaattgatctttcttctcttagaccatcttctcaatacaaggatcttggagagtattacgctgaattgaaccctcttttgtaccacatttcttttcaaagaatcgctgagaaggaaattatggatgcagtggagactggaaagttgtatctttttcaaatctataacaaggatttcgcaaagggacatcatggaaagccaaatttgcataccctttactggactggacttttctctcctgagaacttggctaagacatctattaagttgaatggtcaggcagaattgttttataggccaaagtctaggatgaagaggatggctcatagacttggagaaaagatgcttaacaagaagttgaaggatcaaaagaccccaattcctgatactctttaccaggagttgtatgattacgttaatcataggctttctcacgatttgtcagatgaagctagagcacttttgcctaacgtgatcacaaaggaagtttctcacgaaattattaaggatagaaggttcacctctgataagtttttctttcatgtgccaatcactttgaactaccaagctgcaaattctccttcaaagtttaaccagagggttaatgcttatcttaaggagcatccagaaacccctattattggaattgatagaggtgagaggaacttgatctatatcacagtgattgattctaccggaaagattcttgagcaaagatcattgaataccattcaacagttcgattatcaaaagaagttggataacagagagaaggaaagggttgctgctagacaagcatggtctgttgtgggaactattaaggatcttaagcagggttacttgtcacaagtgattcatgagattgttgatttgatgattcactatcaggcagttgtggttttggaaaaccttaatttcggattcaagtctaagaggactggtattgctgagaaggcagtgtaccaacagttcgaaaagatgcttatcgataagttgaactgtttggttcttaaggattacccagctgagaaagtgggaggtgttcttaacccttatcagttgacagatcaattcacttcttttgctaagatgggaacacaatcaggttttcttttctatgttccagcaccttacacatctaagattgatccattgaccggatttgttgatccattcgtttggaaaactattaagaaccatgagtcaagaaagcacttccttgaaggatttgatttcttgcattacgatgttaagactggagatttcatcttgcacttcaagatgaacaggaatctttcttttcaaagaggattgccaggtttcatgcctgcttgggatattgtttttgagaagaacgaaactcagttcgatgctaagggaacaccattcattgcaggaaagagaattgtgcctgttattgagaatcacagattcactggtagatatagggatctttacccagctaacgaattgattgcacttttggaggaaaagggaattgtttttagggatggttctaacattcttcctaagttgcttgagaatgatgattcacatgctattgatactatggtggcacttattaggtctgttttgcaaatgagaaactcaaatgctgcaacaggagaggattacattaactctccagtgagggatttgaatggtgtttgctttgattcaagattccaaaacccagaatggcctatggatgctgatgcaaacggagcttatcatattgcacttaagggtcagcttttgcttaatcacttgaaggagtctaaggatttgaagttgcagaacggtatttcaaatcaagattggcttgcttacattcaggaattgagaaacggctcctctggcagctccggctctagcggcactcagtttgagggattcacaaatctttaccaagtgtctaagactttgaggttcgagcttattccacaaggaaagacattgaagcacattcaagaacagggttttattgaggaagataaggctaggaatgatcattataaggaacttaagcctattattgatagaatctataagacctacgcagatcaatgtttgcagcttgttcaacttgattgggagaacttgtctgctgcaattgattcatacaggaaggaaaagacagaggaaaccagaaacgctcttattgaggaacaagctacttacaggaatgcaattcacgattatttcattggaagaaccgataacttgactgatgctattaataagagacatgcagaaatctataagggtctttttaaggctgagctttttaacggaaaggtgttgaagcagcttggtacagttactacaaccgagcacgaaaacgcacttttgaggtcttttgataagttcactacatacttctcaggattctacagaaacaggaagaatgtgttctctgctgaggatatttcaaccgcaatcccacatagaatcgttcaagataacttccctaagttcaaggaaaactgccacatttttacaaggcttatcaccgctgtgccatctttgagagaacatttcgaaaacgttaagaaggcaatcggtatctttgtgtctacttcaatcgaggaagttttctcttttcctttctacaaccaacttttgacccaaactcagattgatctttacaaccagcttttgggaggtatttcaagggaggctggaaccgaaaagattaagggtttgaacgaggttttgaatcttgcaatccaaaagaatgatgaaactgctcatattattgcatcacttccacacaggtttattcctcttttcaagcagattttgtctgatagaaacactctttcttttattcttgagtctggcggctcaaaaagaaccgccgacggcagcgaattcgagcccaagaagaagaggaaagtcggaagcggagctactaacttcagcctgctgaagcaggctggagacgtggaggagaaccctggacctatggtgagcaagggcgaggagctgttcaccggggtggtgcccatcctggtcgagctggacggcgacgtaaacggccacaagttcagcgtgtccggcgagggcgagggcgatgccacctacggcaagctgaccctgaagttcatctgcaccaccggcaagctgcccgtgccctggcccaccctcgtgaccaccctgacctatggagtgcagtgcttcagccgctaccccgaccacatgaagcagcacgacttcttcaagtccgccatgcccgaaggctacgtccaggagcgcaccatcttcttcaaggacgacggcaactacaagacccgcgccgaggtgaagttcgagggcgacaccctggtgaaccgcatcgagctgaagggcatcgacttcaaggaggacggcaacatcctggggcacaagctggagtacaactacaacagccacaacgtctatatcatggccgacaagcagaagaacggcatcaaggtgaacttcaagatccgccacaacatcgaggacggcagcgtgcagctcgccgaccactaccagcagaacacccccatcggcgacggccccgtgctgctgcccgacaaccactacctgagcacccagtccgccctgagcaaagaccccaacgagaagcgcgatcacatggtcctgctggagttcgtgaccgccgccgggatcactctcggcatggacgagctgtacaagtctggtggttctcccaagaagaagaggaaagtctaaccggtcatcatcaccatcaccattgagtttaaacccgctgatcagcctcgactgtgccttctagttgccagccatctgttgtttgcccctcccccgtgccttccttgaccctggaaggtgccactcccactgtcctttcctaataaaatgaggaaattgcatcgcattgtctgagtaggtgtcattctattctggggggtggggtggggcaggacagcaagggggaggattgggaagacaatagcaggcatgctggggatgcggtgggctctatggcttctgaggcggaaagaaccagctggggctcgataccgtcgacctctagctagagcttggcgtaatcatggtcatagctgtttcctgtgtgaaattgttatccgctcacaattccacacaacatacgagccggaagcataaagtgtaaagcctagggtgcctaatgagtgagctaactcacattaattgcgttgcgctcactgcccgctttccagtcgggaaacctgtcgtgccagctgcattaatgaatcggccaacgcgcggggagaggcggtttgcgtattgggcgctcttccgcttcctcgctcactgactcgctgcgctcggtcgttcggctgcggcgagcggtatcagctcactcaaaggcggtaatacggttatccacagaatcaggggataacgcaggaaagaacatgtgagcaaaaggccagcaaaaggccaggaaccgtaaaaaggccgcgttgctggcgtttttccataggctccgcccccctgacgagcatcacaaaaatcgacgctcaagtcagaggtggcgaaacccgacaggactataaagataccaggcgtttccccctggaagctccctcgtgcgctctcctgttccgaccctgccgcttaccggatacctgtccgcctttctcccttcgggaagcgtggcgctttctcatagctcacgctgtaggtatctcagttcggtgtaggtcgttcgctccaagctgggctgtgtgcacgaaccccccgttcagcccgaccgctgcgccttatccggtaactatcgtcttgagtccaacccggtaagacacgacttatcgccactggcagcagccactggtaacaggattagcagagcgaggtatgtaggcggtgctacagagttcttgaagtggtggcctaactacggctacactagaagaacagtatttggtatctgcgctctgctgaagccagttaccttcggaaaaagagttggtagctcttgatccggcaaacaaaccaccgctggtagcggtggtttttttgtttgcaagcagcagattacgcgcagaaaaaaaggatctcaagaagatcctttgatcttttctacggggtctgacactcagtggaacgaaaactcacgttaagggattttggtcatgagattatcaaaaaggatcttcacctagatccttttaaattaaaaatgaagttttaaatcaatctaaagtatatatgagtaaacttggtctgacagttaccaatgcttaatcagtgaggcacctatctcagcgatctgtctatttcgttcatccatagttgcctgactccccgtcgtgtagataactacgatacgggagggcttaccatctggccccagtgctgcaatgataccgcgagacccacgctcaccggctccagatttatcagcaataaaccagccagccggaagggccgagcgcagaagtggtcctgcaactttatccgcctccatccagtctattaattgttgccgggaagctagagtaagtagttcgccagttaatagtttgcgcaacgttgttgccattgctacaggcatcgtggtgtcacgctcgtcgtttggtatggcttcattcagctccggttcccaacgatcaaggcgagttacatgatcccccatgttgtgcaaaaaagcggttagctccttcggtcctccgatcgttgtcagaagtaagttggccgcagtgttatcactcatggttatggcagcactgcataattctcttactgtcatgccatccgtaagatgcttttctgtgactggtgagtactcaaccaagtcattctgagaatagtgtatgcggcgaccgagttgctcttgcccggcgtcaatacgggataataccgcgccacatagcagaactttaaaagtgctcatcattggaaaacgttcttcggggcgaaaactctcaaggatcttaccgctgttgagatccagttcgatgtaacccactcgtgcacccaactgatcttcagcatcttttactttcaccagcgtttctgggtgagcaaaaacaggaaggcaaaatgccgcaaaaaagggaataagggcgacacggaaatgttgaatactcatactcttcctttttcaatattattgaagcatttatcagggttattgtctcatgagcggatacatatttgaatgtatttagaaaaataaacaaataggggttccgcgcacatttccccgaaaagtgccacctgacgtcgacggatcgggagatcgatctcccgatcccctagggtcgactctcagtacaatctgctctgatgccgcatagttaagccagtatctgctccctgcttgtgtgttggaggtcgctgagtagtgcgcgagcaaaatttaagctacaacaaggcaaggcttgaccgacaattgcatgaagaatctgcttagggttaggcgttttgcgctgcttcgcgatgtacgggccagatatacgcgtt

SEQ ID NO: 289 - DNA, 8304 bp, synthetic construct
  source 1..8304: mol_type = other DNA
gacattgattattgactagttattaatagtaatcaattacggggtcattagttcatagcccatatatggagttccgcgttacataacttacggtaaatggcccgcctggctgaccgcccaacgacccccgcccattgacgtcaataatgacgtatgttcccatagtaacgccaatagggactttccattgacgtcaatgggtggagtatttacggtaaactgcccacttggcagtacatcaagtgtatcatatgccaagtacgccccctattgacgtcaatgacggtaaatggcccgcctggcattatgcccagtacatgaccttatgggactttcctacttggcagtacatctacgtattagtcatcgctattaccatggtgatgcggttttggcagtacatcaatgggcgtggatagcggtttgactcacggggatttccaagtctccaccccattgacgtcaatgggagtttgttttggcaccaaaatcaacgggactttccaaaatgtcgtaacaactccgccccattgacgcaaatgggcggtaggcgtgtacggtgggaggtctatataagcagagctggtttagtgaaccgtcagatccgctagagatccgcggccgctaatacgactcactatagggagagccgccaccatgaaacggacagccgacggaagcgagttcgagtcaccaaagaagaagcggaaagtcgagtttaagtctgatgaggaagtgattcaatcattttgcaagtataagacacttttgagaaacgagaatgttcttgagactgctgaagcattgttcaacgaacttaattctattgatttgacccatattttcatttcacacaagaagttggagactatttcttctgctttgtgcgatcactgggatacattgaggaatgcactttacgagagaaggatttctgaattgactggaaagattacaaagtctgctaaggaaaaggttcaaagatcacttaagcatgaggatattaacttgcaggaaattatttctgctgcaggaaaggagctttcagaggcttttaagcaaaagacttctgagattttgtcacatgcacacgctgcattggatcagccacttcctaccactttgaagaagcaagaggaaaaggaaattcttaagtctcagttggattcacttttgggactttatcatcttttggattggttcgctgtggatgagtctaacgaggttgatccagagttttcagcaaggcttacaggtattaagttggagatggaaccttctttgtcattttacaacaaggctagaaactacgcaacaaagaagccatattctgtggagaagtttaagttgaacttccaaatgcctaccttggctaggggatgggatgtgaatagagaaaagaacaatggtgcaatccttttcgttaagaacggattgtactaccttggtattatgccaaagcagaagggaagatacaaggctttgtcttttgagcctactgaaaagacatcagaaggtttcgataagatgtactacgattacttcccagatgctgcaaagatgattcctaagtgttctactcaacttaaggctgttactgcacatttccagacacacacaaccccaatccttttgtcaaacaatttcatcgagcctcttgaaatcacaaaggaaatctatgatttgaacaatccagagaaggaacctaagaagttccaaaccgcttatgctaagaaaactggagatcagaagggttatagggaagctctttgcaagtggattgattttaccagagatttcttgtctaagtacactaagactacatcaattgatctttcttctcttagaccatcttctcaatacaaggatcttggagagtattacgctgaattgaaccctcttttgtaccacatttcttttcaaagaatcgctgagaaggaaattatggatgcagtggagactggaaagttgtatctttttcaaatctataacaaggatttcgcaaagggacatcatggaaagccaaatttgcataccctttactggactggacttttctctcctgagaacttggctaagacatctattaagttgaatggtcaggcagaattgttttataggccaaagtctaggatgaagaggatggctcatagacttggagaaaagatgcttaacaagaagttgaaggatcaaaagaccccaattcctgatactctttaccaggagttgtatgattacgttaatcataggctttctcacgatttgtcagatgaagctagagcacttttgcctaacgtgatcacaaaggaagtttctcacgaaattattaaggatagaaggttcacctctgataagtttttctttcatgtgccaatcactttgaactaccaagctgcaaattctccttcaaagtttaaccagagggttaatgcttatcttaaggagcatccagaaacccctattattggaattgatagaggtgagaggaacttgatctatatcacagtgattgattctaccggaaagattcttgagcaaagatcattgaataccattcaacagttcgattatcaaaagaagttggataacagagagaaggaaagggttgctgctagacaagcatggtctgttgtgggaactattaaggatcttaagcagggttacttgtcacaagtgattcatgagattgttgatttgatgattcactatcaggcagttgtggttttggaaaaccttaatttcggattcaagtctaagaggactggtattgctgagaaggcagtgtaccaacagttcgaaaagatgcttatcgataagttgaactgtttggttcttaaggattacccagctgagaaagtgggaggtgttcttaacccttatcagttgacagatcaattcacttcttttgctaagatgggaacacaatcaggttttcttttctatgttccagcaccttacacatctaagattgatccattgaccggatttgttgatccattcgtttggaaaactattaagaaccatgagtcaagaaagcacttccttgaaggatttgatttcttgcattacgatgttaagactggagatttcatcttgcacttcaagatgaacaggaatctttcttttcaaagaggattgccaggtttcatgcctgcttgggatattgtttttgagaagaacgaaactcagttcgatgctaagggaacaccattcattgcaggaaagagaattgtgcctgttattgagaatcacagattcactggtagatatagggatctttacccagctaacgaattgattgcacttttggaggaaaagggaattgtttttagggatggttctaacattcttcctaagttgcttgagaatgatgattcacatgctattgatactatggtggcacttattaggtctgttttgcaaatgagaaactcaaatgctgcaacaggagaggattacattaactctccagtgagggatttgaatggtgtttgctttgattcaagattccaaaacccagaatggcctatggatgctgatgcaaacggagcttatcatattgcacttaagggtcagcttttgcttaatcacttgaaggagtctaaggatttgaagttgcagaacggtatttcaaatcaagattggcttgcttacattcaggaattgagaaacggctcctctggcagctccggctctagcggctcctctggcagctccggcactcagtttgagggattcacaaatctttaccaagtgtctaagactttgaggttcgagcttattccacaaggaaagacattgaagcacattcaagaacagggttttattgaggaagataaggctaggaatgatcattataaggaacttaagcctattattgatagaatctataagacctacgcagatcaatgtttgcagcttgttcaacttgattgggagaacttgtctgctgcaattgattcatacaggaaggaaaagacagaggaaaccagaaacgctcttattgaggaacaagctacttacaggaatgcaattcacgattatttcattggaagaaccgataacttgactgatgctattaataagagacatgcagaaatctataagggtctttttaaggctgagctttttaacggaaaggtgttgaagcagcttggtacagttactacaaccgagcacgaaaacgcacttttgaggtcttttgataagttcactacatacttctcaggattctacagaaacaggaagaatgtgttctctgctgaggatatttcaaccgcaatcccacatagaatcgttcaagataacttccctaagttcaaggaaaactgccacatttttacaaggcttatcaccgctgtgccatctttgagagaacatttcgaaaacgttaagaaggcaatcggtatctttgtgtctacttcaatcgaggaagttttctcttttcctttctacaaccaacttttgacccaaactcagattgatctttacaaccagcttttgggaggtatttcaagggaggctggaaccgaaaagattaagggtttgaacgaggttttgaatcttgcaatccaaaagaatgatgaaactgctcatattattgcatcacttccacacaggtttattcctcttttcaagcagattttgtctgatagaaacactctttcttttattcttgagtctggcggctcaaaaagaaccgccgacggcagcgaattcgagcccaagaagaagaggaaagtcggaagcggagctactaacttcagcctgctgaagcaggctggagacgtggaggagaaccctggacctatggtgagcaagggcgaggagctgttcaccggggtggtgcccatcctggtcgagctggacggcgacgtaaacggccacaagttcagcgtgtccggcgagggcgagggcgatgccacctacggcaagctgaccctgaagttcatctgcaccaccggcaagctgcccgtgccctggcccaccctcgtgaccaccctgacctatggagtgcagtgcttcagccgctaccccgaccacatgaagcagcacgacttcttcaagtccgccatgcccgaaggctacgtccaggagcgcaccatcttcttcaaggacgacggcaactacaagacccgcgccgaggtgaagttcgagggcgacaccctggtgaaccgcatcgagctgaagggcatcgacttcaaggaggacggcaacatcctggggcacaagctggagtacaactacaacagccacaacgtctatatcatggccgacaagcagaagaacggcatcaaggtgaacttcaagatccgccacaacatcgaggacggcagcgtgcagctcgccgaccactaccagcagaacacccccatcggcgacggccccgtgctgctgcccgacaaccactacctgagcacccagtccgccctgagcaaagaccccaacgagaagcgcgatcacatggtcctgctggagttcgtgaccgccgccgggatcactctcggcatggacgagctgtacaagtctggtggttctcccaagaagaagaggaaagtctaaccggtcatcatcaccatcaccattgagtttaaacccgctgatcagcctcgactgtgccttctagttgccagccatctgttgtttgcccctcccccgtgccttccttgaccctggaaggtgccactcccactgtcctttcctaataaaatgaggaaattgcatcgcattgtctgagtaggtgtcattctattctggggggtggggtggggcaggacagcaagggggaggattgggaagacaatagcaggcatgctggggatgcggtgggctctatggcttctgaggcggaaagaaccagctggggctcgataccgtcgacctctagctagagcttggcgtaatcatggtcatagctgtttcctgtgtgaaattgttatccgctcacaattccacacaacatacgagccggaagcataaagtgtaaagcctagggtgcctaatgagtgagctaactcacattaattgcgttgcgctcactgcccgctttccagtcgggaaacctgtcgtgccagctgcattaatgaatcggccaacgcgcggggagaggcggtttgcgtattgggcgctcttccgcttcctcgctcactgactcgctgcgctcggtcgttcggctgcggcgagcggtatcagctcactcaaaggcggtaatacggttatccacagaatcaggggataacgcaggaaagaacatgtgagcaaaaggccagcaaaaggccaggaaccgtaaaaaggccgcgttgctggcgtttttccataggctccgcccccctgacgagcatcacaaaaatcgacgctcaagtcagaggtggcgaaacccgacaggactataaagataccaggcgtttccccctggaagctccctcgtgcgctctcctgttccgaccctgccgcttaccggatacctgtccgcctttctcccttcgggaagcgtggcgctttctcatagctcacgctgtaggtatctcagttcggtgtaggtcgttcgctccaagctgggctgtgtgcacgaaccccccgttcagcccgaccgctgcgccttatccggtaactatcgtcttgagtccaacccggtaagacacgacttatcgccactggcagcagccactggtaacaggattagcagagcgaggtatgtaggcggtgctacagagttcttgaagtggtggcctaactacggctacactagaagaacagtatttggtatctgcgctctgctgaagccagttaccttcggaaaaagagttggtagctcttgatccggcaaacaaaccaccgctggtagcggtggtttttttgtttgcaagcagcagattacgcgcagaaaaaaaggatctcaagaagatcctttgatcttttctacggggtctgacactcagtggaacgaaaactcacgttaagggattttggtcatgagattatcaaaaaggatcttcacctagatccttttaaattaaaaatgaagttttaaatcaatctaaagtatatatgagtaaacttggtctgacagttaccaatgcttaatcagtgaggcacctatctcagcgatctgtctatttcgttcatccatagttgcctgactccccgtcgtgtagataactacgatacgggagggcttaccatctggccccagtgctgcaatgataccgcgagacccacgctcaccggctccagatttatcagcaataaaccagccagccggaagggccgagcgcagaagtggtcctgcaactttatccgcctccatccagtctattaattgttgccgggaagctagagtaagtagttcgccagttaatagtttgcgcaacgttgttgccattgctacaggcatcgtggtgtcacgctcgtcgtttggtatggcttcattcagctccggttcccaacgatcaaggcgagttacatgatcccccatgttgtgcaaaaaagcggttagctccttcggtcctccgatcgttgtcagaagtaagttggccgcagtgttatcactcatggttatggcagcactgcataattctcttactgtcatgccatccgtaagatgcttttctgtgactggtgagtactcaaccaagtcattctgagaatagtgtatgcggcgaccgagttgctcttgcccggcgtcaatacgggataataccgcgccacatagcagaactttaaaagtgctcatcattggaaaacgttcttcggggcgaaaactctcaaggatcttaccgctgttgagatccagttcgatgtaacccactcgtgcacccaactgatcttcagcatcttttactttcaccagcgtttctgggtgagcaaaaacaggaaggcaaaatgccgcaaaaaagggaataagggcgacacggaaatgttgaatactcatactcttcctttttcaatattattgaagcatttatcagggttattgtctcatgagcggatacatatttgaatgtatttagaaaaataaacaaataggggttccgcgcacatttccccgaaaagtgccacctgacgtcgacggatcgggagatcgatctcccgatcccctagggtcgactctcagtacaatctgctctgatgccgcatagttaagccagtatctgctccctgcttgtgtgttggaggtcgctgagtagtgcgcgagcaaaatttaagctacaacaaggcaaggcttgaccgacaattgcatgaagaatctgcttagggttaggcgttttgcgctgcttcgcgatgtacgggccagatatacgcgtt

SEQ ID NO: 290 - DNA, 8286 bp, synthetic construct
  source 1..8286: mol_type = other DNA
gacattgattattgactagttattaatagtaatcaattacggggtcattagttcatagcccatatatggagttccgcgttacataacttacggtaaatggcccgcctggctgaccgcccaacgacccccgcccattgacgtcaataatgacgtatgttcccatagtaacgccaatagggactttccattgacgtcaatgggtggagtatttacggtaaactgcccacttggcagtacatcaagtgtatcatatgccaagtacgccccctattgacgtcaatgacggtaaatggcccgcctggcattatgcccagtacatgaccttatgggactttcctacttggcagtacatctacgtattagtcatcgctattaccatggtgatgcggttttggcagtacatcaatgggcgtggatagcggtttgactcacggggatttccaagtctccaccccattgacgtcaatgggagtttgttttggcaccaaaatcaacgggactttccaaaatgtcgtaacaactccgccccattgacgcaaatgggcggtaggcgtgtacggtgggaggtctatataagcagagctggtttagtgaaccgtcagatccgctagagatccgcggccgctaatacgactcactatagggagagccgccaccatgaaacggacagccgacggaagcgagttcgagtcaccaaagaagaagcggaaagtcaatggtgtttgctttgattcaagattccaaaacccagaatggcctatggatgctgatgcaaacggagcttatcatattgcacttaagggtcagcttttgcttaatcacttgaaggagtctaaggatttgaagttgcagaacggtatttcaaatcaagattggcttgcttacattcaggaattgagaaacggctcctctggcagctccggctctagcggcactcagtttgagggattcacaaatctttaccaagtgtctaagactttgaggttcgagcttattccacaaggaaagacattgaagcacattcaagaacagggttttattgaggaagataaggctaggaatgatcattataaggaacttaagcctattattgatagaatctataagacctacgcagatcaatgtttgcagcttgttcaacttgattgggagaacttgtctgctgcaattgattcatacaggaaggaaaagacagaggaaaccagaaacgctcttattgaggaacaagctacttacaggaatgcaattcacgattatttcattggaagaaccgataacttgactgatgctattaataagagacatgcagaaatctataagggtctttttaaggctgagctttttaacggaaaggtgttgaagcagcttggtacagttactacaaccgagcacgaaaacgcacttttgaggtcttttgataagttcactacatacttctcaggattctacagaaacaggaagaatgtgttctctgctgaggatatttcaaccgcaatcccacatagaatcgttcaagataacttccctaagttcaaggaaaactgccacatttttacaaggcttatcaccgctgtgccatctttgagagaacatttcgaaaacgttaagaaggcaatcggtatctttgtgtctacttcaatcgaggaagttttctcttttcctttctacaaccaacttttgacccaaactcagattgatctttacaaccagcttttgggaggtatttcaagggaggctggaaccgaaaagattaagggtttgaacgaggttttgaatcttgcaatccaaaagaatgatgaaactgctcatattattgcatcacttccacacaggtttattcctcttttcaagcagattttgtctgatagaaacactctttcttttattcttgaggagtttaagtctgatgaggaagtgattcaatcattttgcaagtataagacacttttgagaaacgagaatgttcttgagactgctgaagcattgttcaacgaacttaattctattgatttgacccatattttcatttcacacaagaagttggagactatttcttctgctttgtgcgatcactgggatacattgaggaatgcactttacgagagaaggatttctgaattgactggaaagattacaaagtctgctaaggaaaaggttcaaagatcacttaagcatgaggatattaacttgcaggaaattatttctgctgcaggaaaggagctttcagaggcttttaagcaaaagacttctgagattttgtcacatgcacacgctgcattggatcagccacttcctaccactttgaagaagcaagaggaaaaggaaattcttaagtctcagttggattcacttttgggactttatcatcttttggattggttcgctgtggatgagtctaacgaggttgatccagagttttcagcaaggcttacaggtattaagttggagatggaaccttctttgtcattttacaacaaggctagaaactacgcaacaaagaagccatattctgtggagaagtttaagttgaacttccaaatgcctaccttggctaggggatgggatgtgaatagagaaaagaacaatggtgcaatccttttcgttaagaacggattgtactaccttggtattatgccaaagcagaagggaagatacaaggctttgtcttttgagcctactgaaaagacatcagaaggtttcgataagatgtactacgattacttcccagatgctgcaaagatgattcctaagtgttctactcaacttaaggctgttactgcacatttccagacacacacaaccccaatccttttgtcaaacaatttcatcgagcctcttgaaatcacaaaggaaatctatgatttgaacaatccagagaaggaacctaagaagttccaaaccgcttatgctaagaaaactggagatcagaagggttatagggaagctctttgcaagtggattgattttaccagagatttcttgtctaagtacactaagactacatcaattgatctttcttctcttagaccatcttctcaatacaaggatcttggagagtattacgctgaattgaaccctcttttgtaccacatttcttttcaaagaatcgctgagaaggaaattatggatgcagtggagactggaaagttgtatctttttcaaatctataacaaggatttcgcaaagggacatcatggaaagccaaatttgcataccctttactggactggacttttctctcctgagaacttggctaagacatctattaagttgaatggtcaggcagaattgttttataggccaaagtctaggatgaagaggatggctcatagacttggagaaaagatgcttaacaagaagttgaaggatcaaaagaccccaattcctgatactctttaccaggagttgtatgattacgttaatcataggctttctcacgatttgtcagatgaagctagagcacttttgcctaacgtgatcacaaaggaagtttctcacgaaattattaaggatagaaggttcacctctgataagtttttctttcatgtgccaatcactttgaactaccaagctgcaaattctccttcaaagtttaaccagagggttaatgcttatcttaaggagcatccagaaacccctattattggaattgatagaggtgagaggaacttgatctatatcacagtgattgattctaccggaaagattcttgagcaaagatcattgaataccattcaacagttcgattatcaaaagaagttggataacagagagaaggaaagggttgctgctagacaagcatggtctgttgtgggaactattaaggatcttaagcagggttacttgtcacaagtgattcatgagattgttgatttgatgattcactatcaggcagttgtggttttggaaaaccttaatttcggattcaagtctaagaggactggtattgctgagaaggcagtgtaccaacagttcgaaaagatgcttatcgataagttgaactgtttggttcttaaggattacccagctgagaaagtgggaggtgttcttaacccttatcagttgacagatcaattcacttcttttgctaagatgggaacacaatcaggttttcttttctatgttccagcaccttacacatctaagattgatccattgaccggatttgttgatccattcgtttggaaaactattaagaaccatgagtcaagaaagcacttccttgaaggatttgatttcttgcattacgatgttaagactggagatttcatcttgcacttcaagatgaacaggaatctttcttttcaaagaggattgccaggtttcatgcctgcttgggatattgtttttgagaagaacgaaactcagttcgatgctaagggaacaccattcattgcaggaaagagaattgtgcctgttattgagaatcacagattcactggtagatatagggatctttacccagctaacgaattgattgcacttttggaggaaaagggaattgtttttagggatggttctaacattcttcctaagttgcttgagaatgatgattcacatgctattgatactatggtggcacttattaggtctgttttgcaaatgagaaactcaaatgctgcaacaggagaggattacattaactctccagtgagggatttgtctggcggctcaaaaagaaccgccgacggcagcgaattcgagcccaagaagaagaggaaagtcggaagcggagctactaacttcagcctgctgaagcaggctggagacgtggaggagaaccctggacctatggtgagcaagggcgaggagctgttcaccggggtggtgcccatcctggtcgagctggacggcgacgtaaacggccacaagttcagcgtgtccggcgagggcgagggcgatgccacctacggcaagctgaccctgaagttcatctgcaccaccggcaagctgcccgtgccctggcccaccctcgtgaccaccctgacctatggagtgcagtgcttcagccgctaccccgaccacatgaagcagcacgacttcttcaagtccgccatgcccgaaggctacgtccaggagcgcaccatcttcttcaaggacgacggcaactacaagacccgcgccgaggtgaagttcgagggcgacaccctggtgaaccgcatcgagctgaagggcatcgacttcaaggaggacggcaacatcctggggcacaagctggagtacaactacaacagccacaacgtctatatcatggccgacaagcagaagaacggcatcaaggtgaacttcaagatccgccacaacatcgaggacggcagcgtgcagctcgccgaccactaccagcagaacacccccatcggcgacggccccgtgctgctgcccgacaaccactacctgagcacccagtccgccctgagcaaagaccccaacgagaagcgcgatcacatggtcctgctggagttcgtgaccgccgccgggatcactctcggcatggacgagctgtacaagtctggtggttctcccaagaagaagaggaaagtctaaccggtcatcatcaccatcaccattgagtttaaacccgctgatcagcctcgactgtgccttctagttgccagccatctgttgtttgcccctcccccgtgccttccttgaccctggaaggtgccactcccactgtcctttcctaataaaatgaggaaattgcatcgcattgtctgagtaggtgtcattctattctggggggtggggtggggcaggacagcaagggggaggattgggaagacaatagcaggcatgctggggatgcggtgggctctatggcttctgaggcggaaagaaccagctggggctcgataccgtcgacctctagctagagcttggcgtaatcatggtcatagctgtttcctgtgtgaaattgttatccgctcacaattccacacaacatacgagccggaagcataaagtgtaaagcctagggtgcctaatgagtgagctaactcacattaattgcgttgcgctcactgcccgctttccagtcgggaaacctgtcgtgccagctgcattaatgaatcggccaacgcgcggggagaggcggtttgcgtattgggcgctcttccgcttcctcgctcactgactcgctgcgctcggtcgttcggctgcggcgagcggtatcagctcactcaaaggcggtaatacggttatccacagaatcaggggataacgcaggaaagaacatgtgagcaaaaggccagcaaaaggccaggaaccgtaaaaaggccgcgttgctggcgtttttccataggctccgcccccctgacgagcatcacaaaaatcgacgctcaagtcagaggtggcgaaacccgacaggactataaagataccaggcgtttccccctggaagctccctcgtgcgctctcctgttccgaccctgccgcttaccggatacctgtccgcctttctcccttcgggaagcgtggcgctttctcatagctcacgctgtaggtatctcagttcggtgtaggtcgttcgctccaagctgggctgtgtgcacgaaccccccgttcagcccgaccgctgcgccttatccggtaactatcgtcttgagtccaacccggtaagacacgacttatcgccactggcagcagccactggtaacaggattagcagagcgaggtatgtaggcggtgctacagagttcttgaagtggtggcctaactacggctacactagaagaacagtatttggtatctgcgctctgctgaagccagttaccttcggaaaaagagttggtagctcttgatccggcaaacaaaccaccgctggtagcggtggtttttttgtttgcaagcagcagattacgcgcagaaaaaaaggatctcaagaagatcctttgatcttttctacggggtctgacactcagtggaacgaaaactcacgttaagggattttggtcatgagattatcaaaaaggatcttcacctagatccttttaaattaaaaatgaagttttaaatcaatctaaagtatatatgagtaaacttggtctgacagttaccaatgcttaatcagtgaggcacctatctcagcgatctgtctatttcgttcatccatagttgcctgactccccgtcgtgtagataactacgatacgggagggcttaccatctggccccagtgctgcaatgataccgcgagacccacgctcaccggctccagatttatcagcaataaaccagccagccggaagggccgagcgcagaagtggtcctgcaactttatccgcctccatccagtctattaattgttgccgggaagctagagtaagtagttcgccagttaatagtttgcgcaacgttgttgccattgctacaggcatcgtggtgtcacgctcgtcgtttggtatggcttcattcagctccggttcccaacgatcaaggcgagttacatgatcccccatgttgtgcaaaaaagcggttagctccttcggtcctccgatcgttgtcagaagtaagttggccgcagtgttatcactcatggttatggcagcactgcataattctcttactgtcatgccatccgtaagatgcttttctgtgactggtgagtactcaaccaagtcattctgagaatagtgtatgcggcgaccgagttgctcttgcccggcgtcaatacgggataataccgcgccacatagcagaactttaaaagtgctcatcattggaaaacgttcttcggggcgaaaactctcaaggatcttaccgctgttgagatccagttcgatgtaacccactcgtgcacccaactgatcttcagcatcttttactttcaccagcgtttctgggtgagcaaaaacaggaaggcaaaatgccgcaaaaaagggaataagggcgacacggaaatgttgaatactcatactcttcctttttcaatattattgaagcatttatcagggttattgtctcatgagcggatacatatttgaatgtatttagaaaaataaacaaataggggttccgcgcacatttccccgaaaagtgccacctgacgtcgacggatcgggagatcgatctcccgatcccctagggtcgactctcagtacaatctgctctgatgccgcatagttaagccagtatctgctccctgcttgtgtgttggaggtcgctgagtagtgcgcgagcaaaatttaagctacaacaaggcaaggcttgaccgacaattgcatgaagaatctgcttagggttaggcgttttgcgctgcttcgcgatgtacgggccagatatacgcgtt

SEQ ID NO: 291 - DNA, 8304 bp, synthetic construct
  source 1..8304: mol_type = other DNA
gacattgattattgactagttattaatagtaatcaattacggggtcattagttcatagcccatatatggagttccgcgttacataacttacggtaaatggcccgcctggctgaccgcccaacgacccccgcccattgacgtcaataatgacgtatgttcccatagtaacgccaatagggactttccattgacgtcaatgggtggagtatttacggtaaactgcccacttggcagtacatcaagtgtatcatatgccaagtacgccccctattgacgtcaatgacggtaaatggcccgcctggcattatgcccagtacatgaccttatgggactttcctacttggcagtacatctacgtattagtcatcgctattaccatggtgatgcggttttggcagtacatcaatgggcgtggatagcggtttgactcacggggatttccaagtctccaccccattgacgtcaatgggagtttgttttggcaccaaaatcaacgggactttccaaaatgtcgtaacaactccgccccattgacgcaaatgggcggtaggcgtgtacggtgggaggtctatataagcagagctggtttagtgaaccgtcagatccgctagagatccgcggccgctaatacgactcactatagggagagccgccaccatgaaacggacagccgacggaagcgagttcgagtcaccaaagaagaagcggaaagtcaatggtgtttgctttgattcaagattccaaaacccagaatggcctatggatgctgatgcaaacggagcttatcatattgcacttaagggtcagcttttgcttaatcacttgaaggagtctaaggatttgaagttgcagaacggtatttcaaatcaagattggcttgcttacattcaggaattgagaaacggctcctctggcagctccggctctagcggctcctctggcagctccggcactcagtttgagggattcacaaatctttaccaagtgtctaagactttgaggttcgagcttattccacaaggaaagacattgaagcacattcaagaacagggttttattgaggaagataaggctaggaatgatcattataaggaacttaagcctattattgatagaatctataagacctacgcagatcaatgtttgcagcttgttcaacttgattgggagaacttgtctgctgcaattgattcatacaggaaggaaaagacagaggaaaccagaaacgctcttattgaggaacaagctacttacaggaatgcaattcacgattatttcattggaagaaccgataacttgactgatgctattaataagagacatgcagaaatctataagggtctttttaaggctgagctttttaacggaaaggtgttgaagcagcttggtacagttactacaaccgagcacgaaaacgcacttttgaggtcttttgataagttcactacatacttctcaggattctacagaaacaggaagaatgtgttctctgctgaggatatttcaaccgcaatcccacatagaatcgttcaagataacttccctaagttcaaggaaaactgccacatttttacaaggcttatcaccgctgtgccatctttgagagaacatttcgaaaacgttaagaaggcaatcggtatctttgtgtctacttcaatcgaggaagttttctcttttcctttctacaaccaacttttgacccaaactcagattgatctttacaaccagcttttgggaggtatttcaagggaggctggaaccgaaaagattaagggtttgaacgaggttttgaatcttgcaatccaaaagaatgatgaaactgctcatattattgcatcacttccacacaggtttattcctcttttcaagcagattttgtctgatagaaacactctttcttttattcttgaggagtttaagtctgatgaggaagtgattcaatcattttgcaagtataagacacttttgagaaacgagaatgttcttgagactgctgaagcattgttcaacgaacttaattctattgatttgacccatattttcatttcacacaagaagttggagactatttcttctgctttgtgcgatcactgggatacattgaggaatgcactttacgagagaaggatttctgaattgactggaaagattacaaagtctgctaaggaaaaggttcaaagatcacttaagcatgaggatattaacttgcaggaaattatttctgctgcaggaaaggagctttcagaggcttttaagcaaaagacttctgagattttgtcacatgcacacgctgcattggatcagccacttcctaccactttgaagaagcaagaggaaaaggaaattcttaagtctcagttggattcacttttgggactttatcatcttttggattggttcgctgtggatgagtctaacgaggttgatccagagttttcagcaaggcttacaggtattaagttggagatggaaccttctttgtcattttacaacaaggctagaaactacgcaacaaagaagccatattctgtggagaagtttaagttgaacttccaaatgcctaccttggctaggggatgggatgtgaatagagaaaagaacaatggtgcaatccttttcgttaagaacggattgtactaccttggtattatgccaaagcagaagggaagatacaaggctttgtcttttgagcctactgaaaagacatcagaaggtttcgataagatgtactacgattacttcccagatgctgcaaagatgattcctaagtgttctactcaacttaaggctgttactgcacatttccagacacacacaaccccaatccttttgtcaaacaatttcatcgagcctcttgaaatcacaaaggaaatctatgatttgaacaatccagagaaggaacctaagaagttccaaaccgcttatgctaagaaaactggagatcagaagggttatagggaagctctttgcaagtggattgattttaccagagatttcttgtctaagtacactaagactacatcaattgatctttcttctcttagaccatcttctcaatacaaggatcttggagagtattacgctgaattgaaccctcttttgtaccacatttcttttcaaagaatcgctgagaaggaaattatggatgcagtggagactggaaagttgtatctttttcaaatctataacaaggatttcgcaaagggacatcatggaaagccaaatttgcataccctttactggactggacttttctctcctgagaacttggctaagacatctattaagttgaatggtcaggcagaattgttttataggccaaagtctaggatgaagaggatggctcatagacttggagaaaagatgcttaacaagaagttgaaggatcaaaagaccccaattcctgatactctttaccaggagttgtatgattacgttaatcataggctttctcacgatttgtcagatgaagctagagcacttttgcctaacgtgatcacaaaggaagtttctcacgaaattattaaggatagaaggttcacctctgataagtttttctttcatgtgccaatcactttgaactaccaagctgcaaattctccttcaaagtttaaccagagggttaatgcttatcttaaggagcatccagaaacccctattattggaattgatagaggtgagaggaacttgatctatatcacagtgattgattctaccggaaagattcttgagcaaagatcattgaataccattcaacagttcgattatcaaaagaagttggataacagagagaaggaaagggttgctgctagacaagcatggtctgttgtgggaactattaaggatcttaagcagggttacttgtcacaagtgattcatgagattgttgatttgatgattcactatcaggcagttgtggttttggaaaaccttaatttcggattcaagtctaagaggactggtattgctgagaaggcagtgtaccaacagttcgaaaagatgcttatcgataagttgaactgtttggttcttaaggattacccagctgagaaagtgggaggtgttcttaacccttatcagttgacagatcaattcacttcttttgctaagatgggaacacaatcaggttttcttttctatgttccagcaccttacacatctaagattgatccattgaccggatttgttgatccattcgtttggaaaactattaagaaccatgagtcaagaaagcacttccttgaaggatttgatttcttgcattacgatgttaagactggagatttcatcttgcacttcaagatgaacaggaatctttcttttcaaagaggattgccaggtttcatgcctgcttgggatattgtttttgagaagaacgaaactcagttcgatgctaagggaacaccattcattgcaggaaagagaattgtgcctgttattgagaatcacagattcactggtagatatagggatctttacccagctaacgaattgattgcacttttggaggaaaagggaattgtttttagggatggttctaacattcttcctaagttgcttgagaatgatgattcacatgctattgatactatggtggcacttattaggtctgttttgcaaatgagaaactcaaatgctgcaacaggagaggattacattaactctccagtgagggatttgtctggcggctcaaaaagaaccgccgacggcagcgaattcgagcccaagaagaagaggaaagtcggaagcggagctactaacttcagcctgctgaagcaggctggagacgtggaggagaaccctggacctatggtgagcaagggcgaggagctgttcaccggggtggtgcccatcctggtcgagctggacggcgacgtaaacggccacaagttcagcgtgtccggcgagggcgagggcgatgccacctacggcaagctgaccctgaagttcatctgcaccaccggcaagctgcccgtgccctggcccaccctcgtgaccaccctgacctatggagtgcagtgcttcagccgctaccccgaccacatgaagcagcacgacttcttcaagtccgccatgcccgaaggctacgtccaggagcgcaccatcttcttcaaggacgacggcaactacaagacccgcgccgaggtgaagttcgagggcgacaccctggtgaaccgcatcgagctgaagggcatcgacttcaaggaggacggcaacatcctggggcacaagctggagtacaactacaacagccacaacgtctatatcatggccgacaagcagaagaacggcatcaaggtgaacttcaagatccgccacaacatcgaggacggcagcgtgcagctcgccgaccactaccagcagaacacccccatcggcgacggccccgtgctgctgcccgacaaccactacctgagcacccagtccgccctgagcaaagaccccaacgagaagcgcgatcacatggtcctgctggagttcgtgaccgccgccgggatcactctcggcatggacgagctgtacaagtctggtggttctcccaagaagaagaggaaagtctaaccggtcatcatcaccatcaccattgagtttaaacccgctgatcagcctcgactgtgccttctagttgccagccatctgttgtttgcccctcccccgtgccttccttgaccctggaaggtgccactcccactgtcctttcctaataaaatgaggaaattgcatcgcattgtctgagtaggtgtcattctattctggggggtggggtggggcaggacagcaagggggaggattgggaagacaatagcaggcatgctggggatgcggtgggctctatggcttctgaggcggaaagaaccagctggggctcgataccgtcgacctctagctagagcttggcgtaatcatggtcatagctgtttcctgtgtgaaattgttatccgctcacaattccacacaacatacgagccggaagcataaagtgtaaagcctagggtgcctaatgagtgagctaactcacattaattgcgttgcgctcactgcccgctttccagtcgggaaacctgtcgtgccagctgcattaatgaatcggccaacgcgcggggagaggcggtttgcgtattgggcgctcttccgcttcctcgctcactgactcgctgcgctcggtcgttcggctgcggcgagcggtatcagctcactcaaaggcggtaatacggttatccacagaatcaggggataacgcaggaaagaacatgtgagcaaaaggccagcaaaaggccaggaaccgtaaaaaggccgcgttgctggcgtttttccataggctccgcccccctgacgagcatcacaaaaatcgacgctcaagtcagaggtggcgaaacccgacaggactataaagataccaggcgtttccccctggaagctccctcgtgcgctctcctgttccgaccctgccgcttaccggatacctgtccgcctttctcccttcgggaagcgtggcgctttctcatagctcacgctgtaggtatctcagttcggtgtaggtcgttcgctccaagctgggctgtgtgcacgaaccccccgttcagcccgaccgctgcgccttatccggtaactatcgtcttgagtccaacccggtaagacacgacttatcgccactggcagcagccactggtaacaggattagcagagcgaggtatgtaggcggtgctacagagttcttgaagtggtggcctaactacggctacactagaagaacagtatttggtatctgcgctctgctgaagccagttaccttcggaaaaagagttggtagctcttgatccggcaaacaaaccaccgctggtagcggtggtttttttgtttgcaagcagcagattacgcgcagaaaaaaaggatctcaagaagatcctttgatcttttctacggggtctgacactcagtggaacgaaaactcacgttaagggattttggtcatgagattatcaaaaaggatcttcacctagatccttttaaattaaaaatgaagttttaaatcaatctaaagtatatatgagtaaacttggtctgacagttaccaatgcttaatcagtgaggcacctatctcagcgatctgtctatttcgttcatccatagttgcctgactccccgtcgtgtagataactacgatacgggagggcttaccatctggccccagtgctgcaatgataccgcgagacccacgctcaccggctccagatttatcagcaataaaccagccagccggaagggccgagcgcagaagtggtcctgcaactttatccgcctccatccagtctattaattgttgccgggaagctagagtaagtagttcgccagttaatagtttgcgcaacgttgttgccattgctacaggcatcgtggtgtcacgctcgtcgtttggtatggcttcattcagctccggttcccaacgatcaaggcgagttacatgatcccccatgttgtgcaaaaaagcggttagctccttcggtcctccgatcgttgtcagaagtaagttggccgcagtgttatcactcatggttatggcagcactgcataattctcttactgtcatgccatccgtaagatgcttttctgtgactggtgagtactcaaccaagtcattctgagaatagtgtatgcggcgaccgagttgctcttgcccggcgtcaatacgggataataccgcgccacatagcagaactttaaaagtgctcatcattggaaaacgttcttcggggcgaaaactctcaaggatcttaccgctgttgagatccagttcgatgtaacccactcgtgcacccaactgatcttcagcatcttttactttcaccagcgtttctgggtgagcaaaaacaggaaggcaaaatgccgcaaaaaagggaataagggcgacacggaaatgttgaatactcatactcttcctttttcaatattattgaagcatttatcagggttattgtctcatgagcggatacatatttgaatgtatttagaaaaataaacaaataggggttccgcgcacatttccccgaaaagtgccacctgacgtcgacggatcgggagatcgatctcccgatcccctagggtcgactctcagtacaatctgctctgatgccgcatagttaagccagtatctgctccctgcttgtgtgttggaggtcgctgagtagtgcgcgagcaaaatttaagctacaacaaggcaaggcttgaccgacaattgcatgaagaatctgcttagggttaggcgttttgcgctgcttcgcgatgtacgggccagatatacgcgtt

SEQ ID NO: 292 - DNA, 8286 bp, synthetic construct
  source 1..8286: mol_type = other DNA
gacattgattattgactagttattaatagtaatcaattacggggtcattagttcatagcccatatatggagttccgcgttacataacttacggtaaatggcccgcctggctgaccgcccaacgacccccgcccattgacgtcaataatgacgtatgttcccatagtaacgccaatagggactttccattgacgtcaatgggtggagtatttacggtaaactgcccacttggcagtacatcaagtgtatcatatgccaagtacgccccctattgacgtcaatgacggtaaatggcccgcctggcattatgcccagtacatgaccttatgggactttcctacttggcagtacatctacgtattagtcatcgctattaccatggtgatgcggttttggcagtacatcaatgggcgtggatagcggtttgactcacggggatttccaagtctccaccccattgacgtcaatgggagtttgttttggcaccaaaatcaacgggactttccaaaatgtcgtaacaactccgccccattgacgcaaatgggcggtaggcgtgtacggtgggaggtctatataagcagagctggtttagtgaaccgtcagatccgctagagatccgcggccgctaatacgactcactatagggagagccgccaccatgaaacggacagccgacggaagcgagttcgagtcaccaaagaagaagcggaaagtcgagaagtttaagttgaacttccaaatgcctaccttggctaggggatgggatgtgaatagagaaaagaacaatggtgcaatccttttcgttaagaacggattgtactaccttggtattatgccaaagcagaagggaagatacaaggctttgtcttttgagcctactgaaaagacatcagaaggtttcgataagatgtactacgattacttcccagatgctgcaaagatgattcctaagtgttctactcaacttaaggctgttactgcacatttccagacacacacaaccccaatccttttgtcaaacaatttcatcgagcctcttgaaatcacaaaggaaatctatgatttgaacaatccagagaaggaacctaagaagttccaaaccgcttatgctaagaaaactggagatcagaagggttatagggaagctctttgcaagtggattgattttaccagagatttcttgtctaagtacactaagactacatcaattgatctttcttctcttagaccatcttctcaatacaaggatcttggagagtattacgctgaattgaaccctcttttgtaccacatttcttttcaaagaatcgctgagaaggaaattatggatgcagtggagactggaaagttgtatctttttcaaatctataacaaggatttcgcaaagggacatcatggaaagccaaatttgcataccctttactggactggacttttctctcctgagaacttggctaagacatctattaagttgaatggtcaggcagaattgttttataggccaaagtctaggatgaagaggatggctcatagacttggagaaaagatgcttaacaagaagttgaaggatcaaaagaccccaattcctgatactctttaccaggagttgtatgattacgttaatcataggctttctcacgatttgtcagatgaagctagagcacttttgcctaacgtgatcacaaaggaagtttctcacgaaattattaaggatagaaggttcacctctgataagtttttctttcatgtgccaatcactttgaactaccaagctgcaaattctccttcaaagtttaaccagagggttaatgcttatcttaaggagcatccagaaacccctattattggaattgatagaggtgagaggaacttgatctatatcacagtgattgattctaccggaaagattcttgagcaaagatcattgaataccattcaacagttcgattatcaaaagaagttggataacagagagaaggaaagggttgctgctagacaagcatggtctgttgtgggaactattaaggatcttaagcagggttacttgtcacaagtgattcatgagattgttgatttgatgattcactatcaggcagttgtggttttggaaaaccttaatttcggattcaagtctaagaggactggtattgctgagaaggcagtgtaccaacagttcgaaaagatgcttatcgataagttgaactgtttggttcttaaggattacccagctgagaaagtgggaggtgttcttaacccttatcagttgacagatcaattcacttcttttgctaagatgggaacacaatcaggttttcttttctatgttccagcaccttacacatctaagattgatccattgaccggatttgttgatccattcgtttggaaaactattaagaaccatgagtcaagaaagcacttccttgaaggatttgatttcttgcattacgatgttaagactggagatttcatcttgcacttcaagatgaacaggaatctttcttttcaaagaggattgccaggtttcatgcctgcttgggatattgtttttgagaagaacgaaactcagttcgatgctaagggaacaccattcattgcaggaaagagaattgtgcctgttattgagaatcacagattcactggtagatatagggatctttacccagctaacgaattgattgcacttttggaggaaaagggaattgtttttagggatggttctaacattcttcctaagttgcttgagaatgatgattcacatgctattgatactatggtggcacttattaggtctgttttgcaaatgagaaactcaaatgctgcaacaggagaggattacattaactctccagtgagggatttgaatggtgtttgctttgattcaagattccaaaacccagaatggcctatggatgctgatgcaaacggagcttatcatattgcacttaagggtcagcttttgcttaatcacttgaaggagtctaaggatttgaagttgcagaacggtatttcaaatcaagattggcttgcttacattcaggaattgagaaacggctcctctggcagctccggctctagcggcactcagtttgagggattcacaaatctttaccaagtgtctaagactttgaggttcgagcttattccacaaggaaagacattgaagcacattcaagaacagggttttattgaggaagataaggctaggaatgatcattataaggaacttaagcctattattgatagaatctataagacctacgcagatcaatgtttgcagcttgttcaacttgattgggagaacttgtctgctgcaattgattcatacaggaaggaaaagacagaggaaaccagaaacgctcttattgaggaacaagctacttacaggaatgcaattcacgattatttcattggaagaaccgataacttgactgatgctattaataagagacatgcagaaatctataagggtctttttaaggctgagctttttaacggaaaggtgttgaagcagcttggtacagttactacaaccgagcacgaaaacgcacttttgaggtcttttgataagttcactacatacttctcaggattctacagaaacaggaagaatgtgttctctgctgaggatatttcaaccgcaatcccacatagaatcgttcaagataacttccctaagttcaaggaaaactgccacatttttacaaggcttatcaccgctgtgccatctttgagagaacatttcgaaaacgttaagaaggcaatcggtatctttgtgtctacttcaatcgaggaagttttctcttttcctttctacaaccaacttttgacccaaactcagattgatctttacaaccagcttttgggaggtatttcaagggaggctggaaccgaaaagattaagggtttgaacgaggttttgaatcttgcaatccaaaagaatgatgaaactgctcatattattgcatcacttccacacaggtttattcctcttttcaagcagattttgtctgatagaaacactctttcttttattcttgaggagtttaagtctgatgaggaagtgattcaatcattttgcaagtataagacacttttgagaaacgagaatgttcttgagactgctgaagcattgttcaacgaacttaattctattgatttgacccatattttcatttcacacaagaagttggagactatttcttctgctttgtgcgatcactgggatacattgaggaatgcactttacgagagaaggatttctgaattgactggaaagattacaaagtctgctaaggaaaaggttcaaagatcacttaagcatgaggatattaacttgcaggaaattatttctgctgcaggaaaggagctttcagaggcttttaagcaaaagacttctgagattttgtcacatgcacacgctgcattggatcagccacttcctaccactttgaagaagcaagaggaaaaggaaattcttaagtctcagttggattcacttttgggactttatcatcttttggattggttcgctgtggatgagtctaacgaggttgatccagagttttcagcaaggcttacaggtattaagttggagatggaaccttctttgtcattttacaacaaggctagaaactacgcaacaaagaagccatattctgtgtctggcggctcaaaaagaaccgccgacggcagcgaattcgagcccaagaagaagaggaaagtcggaagcggagctactaacttcagcctgctgaagcaggctggagacgtggaggagaaccctggacctatggtgagcaagggcgaggagctgttcaccggggtggtgcccatcctggtcgagctggacggcgacgtaaacggccacaagttcagcgtgtccggcgagggcgagggcgatgccacctacggcaagctgaccctgaagttcatctgcaccaccggcaagctgcccgtgccctggcccaccctcgtgaccaccctgacctatggagtgcagtgcttcagccgctaccccgaccacatgaagcagcacgacttcttcaagtccgccatgcccgaaggctacgtccaggagcgcaccatcttcttcaaggacgacggcaactacaagacccgcgccgaggtgaagttcgagggcgacaccctggtgaaccgcatcgagctgaagggcatcgacttcaaggaggacggcaacatcctggggcacaagctggagtacaactacaacagccacaacgtctatatcatggccgacaagcagaagaacggcatcaaggtgaacttcaagatccgccacaacatcgaggacggcagcgtgcagctcgccgaccactaccagcagaacacccccatcggcgacggccccgtgctgctgcccgacaaccactacctgagcacccagtccgccctgagcaaagaccccaacgagaagcgcgatcacatggtcctgctggagttcgtgaccgccgccgggatcactctcggcatggacgagctgtacaagtctggtggttctcccaagaagaagaggaaagtctaaccggtcatcatcaccatcaccattgagtttaaacccgctgatcagcctcgactgtgccttctagttgccagccatctgttgtttgcccctcccccgtgccttccttgaccctggaaggtgccactcccactgtcctttcctaataaaatgaggaaattgcatcgcattgtctgagtaggtgtcattctattctggggggtggggtggggcaggacagcaagggggaggattgggaagacaatagcaggcatgctggggatgcggtgggctctatggcttctgaggcggaaagaaccagctggggctcgataccgtcgacctctagctagagcttggcgtaatcatggtcatagctgtttcctgtgtgaaattgttatccgctcacaattccacacaacatacgagccggaagcataaagtgtaaagcctagggtgcctaatgagtgagctaactcacattaattgcgttgcgctcactgcccgctttccagtcgggaaacctgtcgtgccagctgcattaatgaatcggccaacgcgcggggagaggcggtttgcgtattgggcgctcttccgcttcctcgctcactgactcgctgcgctcggtcgttcggctgcggcgagcggtatcagctcactcaaaggcggtaatacggttatccacagaatcaggggataacgcaggaaagaacatgtgagcaaaaggccagcaaaaggccaggaaccgtaaaaaggccgcgttgctggcgtttttccataggctccgcccccctgacgagcatcacaaaaatcgacgctcaagtcagaggtggcgaaacccgacaggactataaagataccaggcgtttccccctggaagctccctcgtgcgctctcctgttccgaccctgccgcttaccggatacctgtccgcctttctcccttcgggaagcgtggcgctttctcatagctcacgctgtaggtatctcagttcggtgtaggtcgttcgctccaagctgggctgtgtgcacgaaccccccgttcagcccgaccgctgcgccttatccggtaactatcgtcttgagtccaacccggtaagacacgacttatcgccactggcagcagccactggtaacaggattagcagagcgaggtatgtaggcggtgctacagagttcttgaagtggtggcctaactacggctacactagaagaacagtatttggtatctgcgctctgctgaagccagttaccttcggaaaaagagttggtagctcttgatccggcaaacaaaccaccgctggtagcggtggtttttttgtttgcaagcagcagattacgcgcagaaaaaaaggatctcaagaagatcctttgatcttttctacggggtctgacactcagtggaacgaaaactcacgttaagggattttggtcatgagattatcaaaaaggatcttcacctagatccttttaaattaaaaatgaagttttaaatcaatctaaagtatatatgagtaaacttggtctgacagttaccaatgcttaatcagtgaggcacctatctcagcgatctgtctatttcgttcatccatagttgcctgactccccgtcgtgtagataactacgatacgggagggcttaccatctggccccagtgctgcaatgataccgcgagacccacgctcaccggctccagatttatcagcaataaaccagccagccggaagggccgagcgcagaagtggtcctgcaactttatccgcctccatccagtctattaattgttgccgggaagctagagtaagtagttcgccagttaatagtttgcgcaacgttgttgccattgctacaggcatcgtggtgtcacgctcgtcgtttggtatggcttcattcagctccggttcccaacgatcaaggcgagttacatgatcccccatgttgtgcaaaaaagcggttagctccttcggtcctccgatcgttgtcagaagtaagttggccgcagtgttatcactcatggttatggcagcactgcataattctcttactgtcatgccatccgtaagatgcttttctgtgactggtgagtactcaaccaagtcattctgagaatagtgtatgcggcgaccgagttgctcttgcccggcgtcaatacgggataataccgcgccacatagcagaactttaaaagtgctcatcattggaaaacgttcttcggggcgaaaactctcaaggatcttaccgctgttgagatccagttcgatgtaacccactcgtgcacccaactgatcttcagcatcttttactttcaccagcgtttctgggtgagcaaaaacaggaaggcaaaatgccgcaaaaaagggaataagggcgacacggaaatgttgaatactcatactcttcctttttcaatattattgaagcatttatcagggttattgtctcatgagcggatacatatttgaatgtatttagaaaaataaacaaataggggttccgcgcacatttccccgaaaagtgccacctgacgtcgacggatcgggagatcgatctcccgatcccctagggtcgactctcagtacaatctgctctgatgccgcatagttaagccagtatctgctccctgcttgtgtgttggaggtcgctgagtagtgcgcgagcaaaatttaagctacaacaaggcaaggcttgaccgacaattgcatgaagaatctgcttagggttaggcgttttgcgctgcttcgcgatgtacgggccagatatacgcgtt

SEQ ID NO: 293 - DNA, 8304 bp, synthetic construct
  source 1..8304: mol_type = other DNA
gacattgattattgactagttattaatagtaatcaattacggggtcattagttcatagcccatatatggagttccgcgttacataacttacggtaaatggcccgcctggctgaccgcccaacgacccccgcccattgacgtcaataatgacgtatgttcccatagtaacgccaatagggactttccattgacgtcaatgggtggagtatttacggtaaactgcccacttggcagtacatcaagtgtatcatatgccaagtacgccccctattgacgtcaatgacggtaaatggcccgcctggcattatgcccagtacatgaccttatgggactttcctacttggcagtacatctacgtattagtcatcgctattaccatggtgatgcggttttggcagtacatcaatgggcgtggatagcggtttgactcacggggatttccaagtctccaccccattgacgtcaatgggagtttgttttggcaccaaaatcaacgggactttccaaaatgtcgtaacaactccgccccattgacgcaaatgggcggtaggcgtgtacggtgggaggtctatataagcagagctggtttagtgaaccgtcagatccgctagagatccgcggccgctaatacgactcactatagggagagccgccaccatgaaacggacagccgacggaagcgagttcgagtcaccaaagaagaagcggaaagtcgagaagtttaagttgaacttccaaatgcctaccttggctaggggatgggatgtgaatagagaaaagaacaatggtgcaatccttttcgttaagaacggattgtactaccttggtattatgccaaagcagaagggaagatacaaggctttgtcttttgagcctactgaaaagacatcagaaggtttcgataagatgtactacgattacttcccagatgctgcaaagatgattcctaagtgttctactcaacttaaggctgttactgcacatttccagacacacacaaccccaatccttttgtcaaacaatttcatcgagcctcttgaaatcacaaaggaaatctatgatttgaacaatccagagaaggaacctaagaagttccaaaccgcttatgctaagaaaactggagatcagaagggttatagggaagctctttgcaagtggattgattttaccagagatttcttgtctaagtacactaagactacatcaattgatctttcttctcttagaccatcttctcaatacaaggatcttggagagtattacgctgaattgaaccctcttttgtaccacatttcttttcaaagaatcgctgagaaggaaattatggatgcagtggagactggaaagttgtatctttttcaaatctataacaaggatttcgcaaagggacatcatggaaagccaaatttgcataccctttactggactggacttttctctcctgagaacttggctaagacatctattaagttgaatggtcaggcagaattgttttataggccaaagtctaggatgaagaggatggctcatagacttggagaaaagatgcttaacaagaagttgaaggatcaaaagaccccaattcctgatactctttaccaggagttgtatgattacgttaatcataggctttctcacgatttgtcagatgaagctagagcacttttgcctaacgtgatcacaaaggaagtttctcacgaaattattaaggatagaaggttcacctctgataagtttttctttcatgtgccaatcactttgaactaccaagctgcaaattctccttcaaagtttaaccagagggttaatgcttatcttaaggagcatccagaaacccctattattggaattgatagaggtgagaggaacttgatctatatcacagtgattgattctaccggaaagattcttgagcaaagatcattgaataccattcaacagttcgattatcaaaagaagttggataacagagagaaggaaagggttgctgctagacaagcatggtctgttgtgggaactattaaggatcttaagcagggttacttgtcacaagtgattcatgagattgttgatttgatgattcactatcaggcagttgtggttttggaaaaccttaatttcggattcaagtctaagaggactggtattgctgagaaggcagtgtaccaacagttcgaaaagatgcttatcgataagttgaactgtttggttcttaaggattacccagctgagaaagtgggaggtgttcttaacccttatcagttgacagatcaattcacttcttttgctaagatgggaacacaatcaggttttcttttctatgttccagcaccttacacatctaagattgatccattgaccggatttgttgatccattcgtttggaaaactattaagaaccatgagtcaagaaagcacttccttgaaggatttgatttcttgcattacgatgttaagactggagatttcatcttgcacttcaagatgaacaggaatctttcttttcaaagaggattgccaggtttcatgcctgcttgggatattgtttttgagaagaacgaaactcagttcgatgctaagggaacaccattcattgcaggaaagagaattgtgcctgttattgagaatcacagattcactggtagatatagggatctttacccagctaacgaattgattgcacttttggaggaaaagggaattgtttttagggatggttctaacattcttcctaagttgcttgagaatgatgattcacatgctattgatactatggtggcacttattaggtctgttttgcaaatgagaaactcaaatgctgcaacaggagaggattacattaactctccagtgagggatttgaatggtgtttgctttgattcaagattccaaaacccagaatggcctatggatgctgatgcaaacggagcttatcatattgcacttaagggtcagcttttgcttaatcacttgaaggagtctaaggatttgaagttgcagaacggtatttcaaatcaagattggcttgcttacattcaggaattgagaaacggctcctctggcagctccggctctagcggctcctctggcagctccggcactcagtttgagggattcacaaatctttaccaagtgtctaagactttgaggttcgagcttattccacaaggaaagacattgaagcacattcaagaacagggttttattgaggaagataaggctaggaatgatcattataaggaacttaagcctattattgatagaatctataagacctacgcagatcaatgtttgcagcttgttcaacttgattgggagaacttgtctgctgcaattgattcatacaggaaggaaaagacagaggaaaccagaaacgctcttattgaggaacaagctacttacaggaatgcaattcacgattatttcattggaagaaccgataacttgactgatgctattaataagagacatgcagaaatctataagggtctttttaaggctgagctttttaacggaaaggtgttgaagcagcttggtacagttactacaaccgagcacgaaaacgcacttttgaggtcttttgataagttcactacatacttctcaggattctacagaaacaggaagaatgtgttctctgctgaggatatttcaaccgcaatcccacatagaatcgttcaagataacttccctaagttcaaggaaaactgccacatttttacaaggcttatcaccgctgtgccatctttgagagaacatttcgaaaacgttaagaaggcaatcggtatctttgtgtctacttcaatcgaggaagttttctcttttcctttctacaaccaacttttgacccaaactcagattgatctttacaaccagcttttgggaggtatttcaagggaggctggaaccgaaaagattaagggtttgaacgaggttttgaatcttgcaatccaaaagaatgatgaaactgctcatattattgcatcacttccacacaggtttattcctcttttcaagcagattttgtctgatagaaacactctttcttttattcttgaggagtttaagtctgatgaggaagtgattcaatcattttgcaagtataagacacttttgagaaacgagaatgttcttgagactgctgaagcattgttcaacgaacttaattctattgatttgacccatattttcatttcacacaagaagttggagactatttcttctgctttgtgcgatcactgggatacattgaggaatgcactttacgagagaaggatttctgaattgactggaaagattacaaagtctgctaaggaaaaggttcaaagatcacttaagcatgaggatattaacttgcaggaaattatttctgctgcaggaaaggagctttcagaggcttttaagcaaaagacttctgagattttgtcacatgcacacgctgcattggatcagccacttcctaccactttgaagaagcaagaggaaaaggaaattcttaagtctcagttggattcacttttgggactttatcatcttttggattggttcgctgtggatgagtctaacgaggttgatccagagttttcagcaaggcttacaggtattaagttggagatggaaccttctttgtcattttacaacaaggctagaaactacgcaacaaagaagccatattctgtgtctggcggctcaaaaagaaccgccgacggcagcgaattcgagcccaagaagaagaggaaagtcggaagcggagctactaacttcagcctgctgaagcaggctggagacgtggaggagaaccctggacctatggtgagcaagggcgaggagctgttcaccggggtggtgcccatcctggtcgagctggacggcgacgtaaacggccacaagttcagcgtgtccggcgagggcgagggcgatgccacctacggcaagctgaccctgaagttcatctgcaccaccggcaagctgcccgtgccctggcccaccctcgtgaccaccctgacctatggagtgcagtgcttcagccgctaccccgaccacatgaagcagcacgacttcttcaagtccgccatgcccgaaggctacgtccaggagcgcaccatcttcttcaaggacgacggcaactacaagacccgcgccgaggtgaagttcgagggcgacaccctggtgaaccgcatcgagctgaagggcatcgacttcaaggaggacggcaacatcctggggcacaagctggagtacaactacaacagccacaacgtctatatcatggccgacaagcagaagaacggcatcaaggtgaacttcaagatccgccacaacatcgaggacggcagcgtgcagctcgccgaccactaccagcagaacacccccatcggcgacggccccgtgctgctgcccgacaaccactacctgagcacccagtccgccctgagcaaagaccccaacgagaagcgcgatcacatggtcctgctggagttcgtgaccgccgccgggatcactctcggcatggacgagctgtacaagtctggtggttctcccaagaagaagaggaaagtctaaccggtcatcatcaccatcaccattgagtttaaacccgctgatcagcctcgactgtgccttctagttgccagccatctgttgtttgcccctcccccgtgccttccttgaccctggaaggtgccactcccactgtcctttcctaataaaatgaggaaattgcatcgcattgtctgagtaggtgtcattctattctggggggtggggtggggcaggacagcaagggggaggattgggaagacaatagcaggcatgctggggatgcggtgggctctatggcttctgaggcggaaagaaccagctggggctcgataccgtcgacctctagctagagcttggcgtaatcatggtcatagctgtttcctgtgtgaaattgttatccgctcacaattccacacaacatacgagccggaagcataaagtgtaaagcctagggtgcctaatgagtgagctaactcacattaattgcgttgcgctcactgcccgctttccagtcgggaaacctgtcgtgccagctgcattaatgaatcggccaacgcgcggggagaggcggtttgcgtattgggcgctcttccgcttcctcgctcactgactcgctgcgctcggtcgttcggctgcggcgagcggtatcagctcactcaaaggcggtaatacggttatccacagaatcaggggataacgcaggaaagaacatgtgagcaaaaggccagcaaaaggccaggaaccgtaaaaaggccgcgttgctggcgtttttccataggctccgcccccctgacgagcatcacaaaaatcgacgctcaagtcagaggtggcgaaacccgacaggactataaagataccaggcgtttccccctggaagctccctcgtgcgctctcctgttccgaccctgccgcttaccggatacctgtccgcctttctcccttcgggaagcgtggcgctttctcatagctcacgctgtaggtatctcagttcggtgtaggtcgttcgctccaagctgggctgtgtgcacgaaccccccgttcagcccgaccgctgcgccttatccggtaactatcgtcttgagtccaacccggtaagacacgacttatcgccactggcagcagccactggtaacaggattagcagagcgaggtatgtaggcggtgctacagagttcttgaagtggtggcctaactacggctacactagaagaacagtatttggtatctgcgctctgctgaagccagttaccttcggaaaaagagttggtagctcttgatccggcaaacaaaccaccgctggtagcggtggtttttttgtttgcaagcagcagattacgcgcagaaaaaaaggatctcaagaagatcctttgatcttttctacggggtctgacactcagtggaacgaaaactcacgttaagggattttggtcatgagattatcaaaaaggatcttcacctagatccttttaaattaaaaatgaagttttaaatcaatctaaagtatatatgagtaaacttggtctgacagttaccaatgcttaatcagtgaggcacctatctcagcgatctgtctatttcgttcatccatagttgcctgactccccgtcgtgtagataactacgatacgggagggcttaccatctggccccagtgctgcaatgataccgcgagacccacgctcaccggctccagatttatcagcaataaaccagccagccggaagggccgagcgcagaagtggtcctgcaactttatccgcctccatccagtctattaattgttgccgggaagctagagtaagtagttcgccagttaatagtttgcgcaacgttgttgccattgctacaggcatcgtggtgtcacgctcgtcgtttggtatggcttcattcagctccggttcccaacgatcaaggcgagttacatgatcccccatgttgtgcaaaaaagcggttagctccttcggtcctccgatcgttgtcagaagtaagttggccgcagtgttatcactcatggttatggcagcactgcataattctcttactgtcatgccatccgtaagatgcttttctgtgactggtgagtactcaaccaagtcattctgagaatagtgtatgcggcgaccgagttgctcttgcccggcgtcaatacgggataataccgcgccacatagcagaactttaaaagtgctcatcattggaaaacgttcttcggggcgaaaactctcaaggatcttaccgctgttgagatccagttcgatgtaacccactcgtgcacccaactgatcttcagcatcttttactttcaccagcgtttctgggtgagcaaaaacaggaaggcaaaatgccgcaaaaaagggaataagggcgacacggaaatgttgaatactcatactcttcctttttcaatattattgaagcatttatcagggttattgtctcatgagcggatacatatttgaatgtatttagaaaaataaacaaataggggttccgcgcacatttccccgaaaagtgccacctgacgtcgacggatcgggagatcgatctcccgatcccctagggtcgactctcagtacaatctgctctgatgccgcatagttaagccagtatctgctccctgcttgtgtgttggaggtcgctgagtagtgcgcgagcaaaatttaagctacaacaaggcaaggcttgaccgacaattgcatgaagaatctgcttagggttaggcgttttgcgctgcttcgcgatgtacgggccagatatacgcgtt

SEQ ID NO: 294 - DNA, 8286 bp, synthetic construct
  source 1..8286: mol_type = other DNA
gacattgattattgactagttattaatagtaatcaattacggggtcattagttcatagcccatatatggagttccgcgttacataacttacggtaaatggcccgcctggctgaccgcccaacgacccccgcccattgacgtcaataatgacgtatgttcccatagtaacgccaatagggactttccattgacgtcaatgggtggagtatttacggtaaactgcccacttggcagtacatcaagtgtatcatatgccaagtacgccccctattgacgtcaatgacggtaaatggcccgcctggcattatgcccagtacatgaccttatgggactttcctacttggcagtacatctacgtattagtcatcgctattaccatggtgatgcggttttggcagtacatcaatgggcgtggatagcggtttgactcacggggatttccaagtctccaccccattgacgtcaatgggagtttgttttggcaccaaaatcaacgggactttccaaaatgtcgtaacaactccgccccattgacgcaaatgggcggtaggcgtgtacggtgggaggtctatataagcagagctggtttagtgaaccgtcagatccgctagagatccgcggccgctaatacgactcactatagggagagccgccaccatgaaacggacagccgacggaagcgagttcgagtcaccaaagaagaagcggaaagtcactttgaagaagcaagaggaaaaggaaattcttaagtctcagttggattcacttttgggactttatcatcttttggattggttcgctgtggatgagtctaacgaggttgatccagagttttcagcaaggcttacaggtattaagttggagatggaaccttctttgtcattttacaacaaggctagaaactacgcaacaaagaagccatattctgtggagaagtttaagttgaacttccaaatgcctaccttggctaggggatgggatgtgaatagagaaaagaacaatggtgcaatccttttcgttaagaacggattgtactaccttggtattatgccaaagcagaagggaagatacaaggctttgtcttttgagcctactgaaaagacatcagaaggtttcgataagatgtactacgattacttcccagatgctgcaaagatgattcctaagtgttctactcaacttaaggctgttactgcacatttccagacacacacaaccccaatccttttgtcaaacaatttcatcgagcctcttgaaatcacaaaggaaatctatgatttgaacaatccagagaaggaacctaagaagttccaaaccgcttatgctaagaaaactggagatcagaagggttatagggaagctctttgcaagtggattgattttaccagagatttcttgtctaagtacactaagactacatcaattgatctttcttctcttagaccatcttctcaatacaaggatcttggagagtattacgctgaattgaaccctcttttgtaccacatttcttttcaaagaatcgctgagaaggaaattatggatgcagtggagactggaaagttgtatctttttcaaatctataacaaggatttcgcaaagggacatcatggaaagccaaatttgcataccctttactggactggacttttctctcctgagaacttggctaagacatctattaagttgaatggtcaggcagaattgttttataggccaaagtctaggatgaagaggatggctcatagacttggagaaaagatgcttaacaagaagttgaaggatcaaaagaccccaattcctgatactctttaccaggagttgtatgattacgttaatcataggctttctcacgatttgtcagatgaagctagagcacttttgcctaacgtgatcacaaaggaagtttctcacgaaattattaaggatagaaggttcacctctgataagtttttctttcatgtgccaatcactttgaactaccaagctgcaaattctccttcaaagtttaaccagagggttaatgcttatcttaaggagcatccagaaacccctattattggaattgatagaggtgagaggaacttgatctatatcacagtgattgattctaccggaaagattcttgagcaaagatcattgaataccattcaacagttcgattatcaaaagaagttggataacagagagaaggaaagggttgctgctagacaagcatggtctgttgtgggaactattaaggatcttaagcagggttacttgtcacaagtgattcatgagattgttgatttgatgattcactatcaggcagttgtggttttggaaaaccttaatttcggattcaagtctaagaggactggtattgctgagaaggcagtgtaccaacagttcgaaaagatgcttatcgataagttgaactgtttggttcttaaggattacccagctgagaaagtgggaggtgttcttaacccttatcagttgacagatcaattcacttcttttgctaagatgggaacacaatcaggttttcttttctatgttccagcaccttacacatctaagattgatccattgaccggatttgttgatccattcgtttggaaaactattaagaaccatgagtcaagaaagcacttccttgaaggatttgatttcttgcattacgatgttaagactggagatttcatcttgcacttcaagatgaacaggaatctttcttttcaaagaggattgccaggtttcatgcctgcttgggatattgtttttgagaagaacgaaactcagttcgatgctaagggaacaccattcattgcaggaaagagaattgtgcctgttattgagaatcacagattcactggtagatatagggatctttacccagctaacgaattgattgcacttttggaggaaaagggaattgtttttagggatggttctaacattcttcctaagttgcttgagaatgatgattcacatgctattgatactatggtggcacttattaggtctgttttgcaaatgagaaactcaaatgctgcaacaggagaggattacattaactctccagtgagggatttgaatggtgtttgctttgattcaagattccaaaacccagaatggcctatggatgctgatgcaaacggagcttatcatattgcacttaagggtcagcttttgcttaatcacttgaaggagtctaaggatttgaagttgcagaacggtatttcaaatcaagattggcttgcttacattcaggaattgagaaacggctcctctggcagctccggctctagcggcactcagtttgagggattcacaaatctttaccaagtgtctaagactttgaggttcgagcttattccacaaggaaagacattgaagcacattcaagaacagggttttattgaggaagataaggctaggaatgatcattataaggaacttaagcctattattgatagaatctataagacctacgcagatcaatgtttgcagcttgttcaacttgattgggagaacttgtctgctgcaattgattcatacaggaaggaaaagacagaggaaaccagaaacgctcttattgaggaacaagctacttacaggaatgcaattcacgattatttcattggaagaaccgataacttgactgatgctattaataagagacatgcagaaatctataagggtctttttaaggctgagctttttaacggaaaggtgttgaagcagcttggtacagttactacaaccgagcacgaaaacgcacttttgaggtcttttgataagttcactacatacttctcaggattctacagaaacaggaagaatgtgttctctgctgaggatatttcaaccgcaatcccacatagaatcgttcaagataacttccctaagttcaaggaaaactgccacatttttacaaggcttatcaccgctgtgccatctttgagagaacatttcgaaaacgttaagaaggcaatcggtatctttgtgtctacttcaatcgaggaagttttctcttttcctttctacaaccaacttttgacccaaactcagattgatctttacaaccagcttttgggaggtatttcaagggaggctggaaccgaaaagattaagggtttgaacgaggttttgaatcttgcaatccaaaagaatgatgaaactgctcatattattgcatcacttccacacaggtttattcctcttttcaagcagattttgtctgatagaaacactctttcttttattcttgaggagtttaagtctgatgaggaagtgattcaatcattttgcaagtataagacacttttgagaaacgagaatgttcttgagactgctgaagcattgttcaacgaacttaattctattgatttgacccatattttcatttcacacaagaagttggagactatttcttctgctttgtgcgatcactgggatacattgaggaatgcactttacgagagaaggatttctgaattgactggaaagattacaaagtctgctaaggaaaaggttcaaagatcacttaagcatgaggatattaacttgcaggaaattatttctgctgcaggaaaggagctttcagaggcttttaagcaaaagacttctgagattttgtcacatgcacacgctgcattggatcagccacttcctacctctggcggctcaaaaagaaccgccgacggcagcgaattcgagcccaagaagaagaggaaagtcggaagcggagctactaacttcagcctgctgaagcaggctggagacgtggaggagaaccctggacctatggtgagcaagggcgaggagctgttcaccggggtggtgcccatcctggtcgagctggacggcgacgtaaacggccacaagttcagcgtgtccggcgagggcgagggcgatgccacctacggcaagctgaccctgaagttcatctgcaccaccggcaagctgcccgtgccctggcccaccctcgtgaccaccctgacctatggagtgcagtgcttcagccgctaccccgaccacatgaagcagcacgacttcttcaagtccgccatgcccgaaggctacgtccaggagcgcaccatcttcttcaaggacgacggcaactacaagacccgcgccgaggtgaagttcgagggcgacaccctggtgaaccgcatcgagctgaagggcatcgacttcaaggaggacggcaacatcctggggcacaagctggagtacaactacaacagccacaacgtctatatcatggccgacaagcagaagaacggcatcaaggtgaacttcaagatccgccacaacatcgaggacggcagcgtgcagctcgccgaccactaccagcagaacacccccatcggcgacggccccgtgctgctgcccgacaaccactacctgagcacccagtccgccctgagcaaagaccccaacgagaagcgcgatcacatggtcctgctggagttcgtgaccgccgccgggatcactctcggcatggacgagctgtacaagtctggtggttctcccaagaagaagaggaaagtctaaccggtcatcatcaccatcaccattgagtttaaacccgctgatcagcctcgactgtgccttctagttgccagccatctgttgtttgcccctcccccgtgccttccttgaccctggaaggtgccactcccactgtcctttcctaataaaatgaggaaattgcatcgcattgtctgagtaggtgtcattctattctggggggtggggtggggcaggacagcaagggggaggattgggaagacaatagcaggcatgctggggatgcggtgggctctatggcttctgaggcggaaagaaccagctggggctcgataccgtcgacctctagctagagcttggcgtaatcatggtcatagctgtttcctgtgtgaaattgttatccgctcacaattccacacaacatacgagccggaagcataaagtgtaaagcctagggtgcctaatgagtgagctaactcacattaattgcgttgcgctcactgcccgctttccagtcgggaaacctgtcgtgccagctgcattaatgaatcggccaacgcgcggggagaggcggtttgcgtattgggcgctcttccgcttcctcgctcactgactcgctgcgctcggtcgttcggctgcggcgagcggtatcagctcactcaaaggcggtaatacggttatccacagaatcaggggataacgcaggaaagaacatgtgagcaaaaggccagcaaaaggccaggaaccgtaaaaaggccgcgttgctggcgtttttccataggctccgcccccctgacgagcatcacaaaaatcgacgctcaagtcagaggtggcgaaacccgacaggactataaagataccaggcgtttccccctggaagctccctcgtgcgctctcctgttccgaccctgccgcttaccggatacctgtccgcctttctcccttcgggaagcgtggcgctttctcatagctcacgctgtaggtatctcagttcggtgtaggtcgttcgctccaagctgggctgtgtgcacgaaccccccgttcagcccgaccgctgcgccttatccggtaactatcgtcttgagtccaacccggtaagacacgacttatcgccactggcagcagccactggtaacaggattagcagagcgaggtatgtaggcggtgctacagagttcttgaagtggtggcctaactacggctacactagaagaacagtatttggtatctgcgctctgctgaagccagttaccttcggaaaaagagttggtagctcttgatccggcaaacaaaccaccgctggtagcggtggtttttttgtttgcaagcagcagattacgcgcagaaaaaaaggatctcaagaagatcctttgatcttttctacggggtctgacactcagtggaacgaaaactcacgttaagggattttggtcatgagattatcaaaaaggatcttcacctagatccttttaaattaaaaatgaagttttaaatcaatctaaagtatatatgagtaaacttggtctgacagttaccaatgcttaatcagtgaggcacctatctcagcgatctgtctatttcgttcatccatagttgcctgactccccgtcgtgtagataactacgatacgggagggcttaccatctggccccagtgctgcaatgataccgcgagacccacgctcaccggctccagatttatcagcaataaaccagccagccggaagggccgagcgcagaagtggtcctgcaactttatccgcctccatccagtctattaattgttgccgggaagctagagtaagtagttcgccagttaatagtttgcgcaacgttgttgccattgctacaggcatcgtggtgtcacgctcgtcgtttggtatggcttcattcagctccggttcccaacgatcaaggcgagttacatgatcccccatgttgtgcaaaaaagcggttagctccttcggtcctccgatcgttgtcagaagtaagttggccgcagtgttatcactcatggttatggcagcactgcataattctcttactgtcatgccatccgtaagatgcttttctgtgactggtgagtactcaaccaagtcattctgagaatagtgtatgcggcgaccgagttgctcttgcccggcgtcaatacgggataataccgcgccacatagcagaactttaaaagtgctcatcattggaaaacgttcttcggggcgaaaactctcaaggatcttaccgctgttgagatccagttcgatgtaacccactcgtgcacccaactgatcttcagcatcttttactttcaccagcgtttctgggtgagcaaaaacaggaaggcaaaatgccgcaaaaaagggaataagggcgacacggaaatgttgaatactcatactcttcctttttcaatattattgaagcatttatcagggttattgtctcatgagcggatacatatttgaatgtatttagaaaaataaacaaataggggttccgcgcacatttccccgaaaagtgccacctgacgtcgacggatcgggagatcgatctcccgatcccctagggtcgactctcagtacaatctgctctgatgccgcatagttaagccagtatctgctccctgcttgtgtgttggaggtcgctgagtagtgcgcgagcaaaatttaagctacaacaaggcaaggcttgaccgacaattgcatgaagaatctgcttagggttaggcgttttgcgctgcttcgcgatgtacgggccagatatacgcgtt

SEQ ID NO: 295 - DNA, 8304 bp, synthetic construct
  source 1..8304: mol_type = other DNA
gacattgattattgactagttattaatagtaatcaattacggggtcattagttcatagcccatatatggagttccgcgttacataacttacggtaaatggcccgcctggctgaccgcccaacgacccccgcccattgacgtcaataatgacgtatgttcccatagtaacgccaatagggactttccattgacgtcaatgggtggagtatttacggtaaactgcccacttggcagtacatcaagtgtatcatatgccaagtacgccccctattgacgtcaatgacggtaaatggcccgcctggcattatgcccagtacatgaccttatgggactttcctacttggcagtacatctacgtattagtcatcgctattaccatggtgatgcggttttggcagtacatcaatgggcgtggatagcggtttgactcacggggatttccaagtctccaccccattgacgtcaatgggagtttgttttggcaccaaaatcaacgggactttccaaaatgtcgtaacaactccgccccattgacgcaaatgggcggtaggcgtgtacggtgggaggtctatataagcagagctggtttagtgaaccgtcagatccgctagagatccgcggccgctaatacgactcactatagggagagccgccaccatgaaacggacagccgacggaagcgagttcgagtcaccaaagaagaagcggaaagtcactttgaagaagcaagaggaaaaggaaattcttaagtctcagttggattcacttttgggactttatcatcttttggattggttcgctgtggatgagtctaacgaggttgatccagagttttcagcaaggcttacaggtattaagttggagatggaaccttctttgtcattttacaacaaggctagaaactacgcaacaaagaagccatattctgtggagaagtttaagttgaacttccaaatgcctaccttggctaggggatgggatgtgaatagagaaaagaacaatggtgcaatccttttcgttaagaacggattgtactaccttggtattatgccaaagcagaagggaagatacaaggctttgtcttttgagcctactgaaaagacatcagaaggtttcgataagatgtactacgattacttcccagatgctgcaaagatgattcctaagtgttctactcaacttaaggctgttactgcacatttccagacacacacaaccccaatccttttgtcaaacaatttcatcgagcctcttgaaatcacaaaggaaatctatgatttgaacaatccagagaaggaacctaagaagttccaaaccgcttatgctaagaaaactggagatcagaagggttatagggaagctctttgcaagtggattgattttaccagagatttcttgtctaagtacactaagactacatcaattgatctttcttctcttagaccatcttctcaatacaaggatcttggagagtattacgctgaattgaaccctcttttgtaccacatttcttttcaaagaatcgctgagaaggaaattatggatgcagtggagactggaaagttgtatctttttcaaatctataacaaggatttcgcaaagggacatcatggaaagccaaatttgcataccctttactggactggacttttctctcctgagaacttggctaagacatctattaagttgaatggtcaggcagaattgttttataggccaaagtctaggatgaagaggatggctcatagacttggagaaaagatgcttaacaagaagttgaaggatcaaaagaccccaattcctgatactctttaccaggagttgtatgattacgttaatcataggctttctcacgatttgtcagatgaagctagagcacttttgcctaacgtgatcacaaaggaagtttctcacgaaattattaaggatagaaggttcacctctgataagtttttctttcatgtgccaatcactttgaactaccaagctgcaaattctccttcaaagtttaaccagagggttaatgcttatcttaaggagcatccagaaacccctattattggaattgatagaggtgagaggaacttgatctatatcacagtgattgattctaccggaaagattcttgagcaaagatcattgaataccattcaacagttcgattatcaaaagaagttggataacagagagaaggaaagggttgctgctagacaagcatggtctgttgtgggaactattaaggatcttaagcagggttacttgtcacaagtgattcatgagattgttgatttgatgattcactatcaggcagttgtggttttggaaaaccttaatttcggattcaagtctaagaggactggtattgctgagaaggcagtgtaccaacagttcgaaaagatgcttatcgataagttgaactgtttggttcttaaggattacccagctgagaaagtgggaggtgttcttaacccttatcagttgacagatcaattcacttcttttgctaagatgggaacacaatcaggttttcttttctatgttccagcaccttacacatctaagattgatccattgaccggatttgttgatccattcgtttggaaaactattaagaaccatgagtcaagaaagcacttccttgaaggatttgatttcttgcattacgatgttaagactggagatttcatcttgcacttcaagatgaacaggaatctttcttttcaaagaggattgccaggtttcatgcctgcttgggatattgtttttgagaagaacgaaactcagttcgatgctaagggaacaccattcattgcaggaaagagaattgtgcctgttattgagaatcacagattcactggtagatatagggatctttacccagctaacgaattgattgcacttttggaggaaaagggaattgtttttagggatggttctaacattcttcctaagttgcttgagaatgatgattcacatgctattgatactatggtggcacttattaggtctgttttgcaaatgagaaactcaaatgctgcaacaggagaggattacattaactctccagtgagggatttgaatggtgtttgctttgattcaagattccaaaacccagaatggcctatggatgctgatgcaaacggagcttatcatattgcacttaagggtcagcttttgcttaatcacttgaaggagtctaaggatttgaagttgcagaacggtatttcaaatcaagattggcttgcttacattcaggaattgagaaacggctcctctggcagctccggctctagcggctcctctggcagctccggcactcagtttgagggattcacaaatctttaccaagtgtctaagactttgaggttcgagcttattccacaaggaaagacattgaagcacattcaagaacagggttttattgaggaagataaggctaggaatgatcattataaggaacttaagcctattattgatagaatctataagacctacgcagatcaatgtttgcagcttgttcaacttgattgggagaacttgtctgctgcaattgattcatacaggaaggaaaagacagaggaaaccagaaacgctcttattgaggaacaagctacttacaggaatgcaattcacgattatttcattggaagaaccgataacttgactgatgctattaataagagacatgcagaaatctataagggtctttttaaggctgagctttttaacggaaaggtgttgaagcagcttggtacagttactacaaccgagcacgaaaacgcacttttgaggtcttttgataagttcactacatacttctcaggattctacagaaacaggaagaatgtgttctctgctgaggatatttcaaccgcaatcccacatagaatcgttcaagataacttccctaagttcaaggaaaactgccacatttttacaaggcttatcaccgctgtgccatctttgagagaacatttcgaaaacgttaagaaggcaatcggtatctttgtgtctacttcaatcgaggaagttttctcttttcctttctacaaccaacttttgacccaaactcagattgatctttacaaccagcttttgggaggtatttcaagggaggctggaaccgaaaagattaagggtttgaacgaggttttgaatcttgcaatccaaaagaatgatgaaactgctcatattattgcatcacttccacacaggtttattcctcttttcaagcagattttgtctgatagaaacactctttcttttattcttgaggagtttaagtctgatgaggaagtgattcaatcattttgcaagtataagacacttttgagaaacgagaatgttcttgagactgctgaagcattgttcaacgaacttaattctattgatttgacccatattttcatttcacacaagaagttggagactatttcttctgctttgtgcgatcactgggatacattgaggaatgcactttacgagagaaggatttctgaattgactggaaagattacaaagtctgctaaggaaaaggttcaaagatcacttaagcatgaggatattaacttgcaggaaattatttctgctgcaggaaaggagctttcagaggcttttaagcaaaagacttctgagattttgtcacatgcacacgctgcattggatcagccacttcctacctctggcggctcaaaaagaaccgccgacggcagcgaattcgagcccaagaagaagaggaaagtcggaagcggagctactaacttcagcctgctgaagcaggctggagacgtggaggagaaccctggacctatggtgagcaagggcgaggagctgttcaccggggtggtgcccatcctggtcgagctggacggcgacgtaaacggccacaagttcagcgtgtccggcgagggcgagggcgatgccacctacggcaagctgaccctgaagttcatctgcaccaccggcaagctgcccgtgccctggcccaccctcgtgaccaccctgacctatggagtgcagtgcttcagccgctaccccgaccacatgaagcagcacgacttcttcaagtccgccatgcccgaaggctacgtccaggagcgcaccatcttcttcaaggacgacggcaactacaagacccgcgccgaggtgaagttcgagggcgacaccctggtgaaccgcatcgagctgaagggcatcgacttcaaggaggacggcaacatcctggggcacaagctggagtacaactacaacagccacaacgtctatatcatggccgacaagcagaagaacggcatcaaggtgaacttcaagatccgccacaacatcgaggacggcagcgtgcagctcgccgaccactaccagcagaacacccccatcggcgacggccccgtgctgctgcccgacaaccactacctgagcacccagtccgccctgagcaaagaccccaacgagaagcgcgatcacatggtcctgctggagttcgtgaccgccgccgggatcactctcggcatggacgagctgtacaagtctggtggttctcccaagaagaagaggaaagtctaaccggtcatcatcaccatcaccattgagtttaaacccgctgatcagcctcgactgtgccttctagttgccagccatctgttgtttgcccctcccccgtgccttccttgaccctggaaggtgccactcccactgtcctttcctaataaaatgaggaaattgcatcgcattgtctgagtaggtgtcattctattctggggggtggggtggggcaggacagcaagggggaggattgggaagacaatagcaggcatgctggggatgcggtgggctctatggcttctgaggcggaaagaaccagctggggctcgataccgtcgacctctagctagagcttggcgtaatcatggtcatagctgtttcctgtgtgaaattgttatccgctcacaattccacacaacatacgagccggaagcataaagtgtaaagcctagggtgcctaatgagtgagctaactcacattaattgcgttgcgctcactgcccgctttccagtcgggaaacctgtcgtgccagctgcattaatgaatcggccaacgcgcggggagaggcggtttgcgtattgggcgctcttccgcttcctcgctcactgactcgctgcgctcggtcgttcggctgcggcgagcggtatcagctcactcaaaggcggtaatacggttatccacagaatcaggggataacgcaggaaagaacatgtgagcaaaaggccagcaaaaggccaggaaccgtaaaaaggccgcgttgctggcgtttttccataggctccgcccccctgacgagcatcacaaaaatcgacgctcaagtcagaggtggcgaaacccgacaggactataaagataccaggcgtttccccctggaagctccctcgtgcgctctcctgttccgaccctgccgcttaccggatacctgtccgcctttctcccttcgggaagcgtggcgctttctcatagctcacgctgtaggtatctcagttcggtgtaggtcgttcgctccaagctgggctgtgtgcacgaaccccccgttcagcccgaccgctgcgccttatccggtaactatcgtcttgagtccaacccggtaagacacgacttatcgccactggcagcagccactggtaacaggattagcagagcgaggtatgtaggcggtgctacagagttcttgaagtggtggcctaactacggctacactagaagaacagtatttggtatctgcgctctgctgaagccagttaccttcggaaaaagagttggtagctcttgatccggcaaacaaaccaccgctggtagcggtggtttttttgtttgcaagcagcagattacgcgcagaaaaaaaggatctcaagaagatcctttgatcttttctacggggtctgacactcagtggaacgaaaactcacgttaagggattttggtcatgagattatcaaaaaggatcttcacctagatccttttaaattaaaaatgaagttttaaatcaatctaaagtatatatgagtaaacttggtctgacagttaccaatgcttaatcagtgaggcacctatctcagcgatctgtctatttcgttcatccatagttgcctgactccccgtcgtgtagataactacgatacgggagggcttaccatctggccccagtgctgcaatgataccgcgagacccacgctcaccggctccagatttatcagcaataaaccagccagccggaagggccgagcgcagaagtggtcctgcaactttatccgcctccatccagtctattaattgttgccgggaagctagagtaagtagttcgccagttaatagtttgcgcaacgttgttgccattgctacaggcatcgtggtgtcacgctcgtcgtttggtatggcttcattcagctccggttcccaacgatcaaggcgagttacatgatcccccatgttgtgcaaaaaagcggttagctccttcggtcctccgatcgttgtcagaagtaagttggccgcagtgttatcactcatggttatggcagcactgcataattctcttactgtcatgccatccgtaagatgcttttctgtgactggtgagtactcaaccaagtcattctgagaatagtgtatgcggcgaccgagttgctcttgcccggcgtcaatacgggataataccgcgccacatagcagaactttaaaagtgctcatcattggaaaacgttcttcggggcgaaaactctcaaggatcttaccgctgttgagatccagttcgatgtaacccactcgtgcacccaactgatcttcagcatcttttactttcaccagcgtttctgggtgagcaaaaacaggaaggcaaaatgccgcaaaaaagggaataagggcgacacggaaatgttgaatactcatactcttcctttttcaatattattgaagcatttatcagggttattgtctcatgagcggatacatatttgaatgtatttagaaaaataaacaaataggggttccgcgcacatttccccgaaaagtgccacctgacgtcgacggatcgggagatcgatctcccgatcccctagggtcgactctcagtacaatctgctctgatgccgcatagttaagccagtatctgctccctgcttgtgtgttggaggtcgctgagtagtgcgcgagcaaaatttaagctacaacaaggcaaggcttgaccgacaattgcatgaagaatctgcttagggttaggcgttttgcgctgcttcgcgatgtacgggccagatatacgcgtt

SEQ ID NO: 296 - DNA, 8286 bp, synthetic construct
  source 1..8286: mol_type = other DNA
gacattgattattgactagttattaatagtaatcaattacggggtcattagttcatagcccatatatggagttccgcgttacataacttacggtaaatggcccgcctggctgaccgcccaacgacccccgcccattgacgtcaataatgacgtatgttcccatagtaacgccaatagggactttccattgacgtcaatgggtggagtatttacggtaaactgcccacttggcagtacatcaagtgtatcatatgccaagtacgccccctattgacgtcaatgacggtaaatggcccgcctggcattatgcccagtacatgaccttatgggactttcctacttggcagtacatctacgtattagtcatcgctattaccatggtgatgcggttttggcagtacatcaatgggcgtggatagcggtttgactcacggggatttccaagtctccaccccattgacgtcaatgggagtttgttttggcaccaaaatcaacgggactttccaaaatgtcgtaacaactccgccccattgacgcaaatgggcggtaggcgtgtacggtgggaggtctatataagcagagctggtttagtgaaccgtcagatccgctagagatccgcggccgctaatacgactcactatagggagagccgccaccatgaaacggacagccgacggaagcgagttcgagtcaccaaagaagaagcggaaagtcgattcacatgctattgatactatggtggcacttattaggtctgttttgcaaatgagaaactcaaatgctgcaacaggagaggattacattaactctccagtgagggatttgaatggtgtttgctttgattcaagattccaaaacccagaatggcctatggatgctgatgcaaacggagcttatcatattgcacttaagggtcagcttttgcttaatcacttgaaggagtctaaggatttgaagttgcagaacggtatttcaaatcaagattggcttgcttacattcaggaattgagaaacggctcctctggcagctccggctctagcggcactcagtttgagggattcacaaatctttaccaagtgtctaagactttgaggttcgagcttattccacaaggaaagacattgaagcacattcaagaacagggttttattgaggaagataaggctaggaatgatcattataaggaacttaagcctattattgatagaatctataagacctacgcagatcaatgtttgcagcttgttcaacttgattgggagaacttgtctgctgcaattgattcatacaggaaggaaaagacagaggaaaccagaaacgctcttattgaggaacaagctacttacaggaatgcaattcacgattatttcattggaagaaccgataacttgactgatgctattaataagagacatgcagaaatctataagggtctttttaaggctgagctttttaacggaaaggtgttgaagcagcttggtacagttactacaaccgagcacgaaaacgcacttttgaggtcttttgataagttcactacatacttctcaggattctacagaaacaggaagaatgtgttctctgctgaggatatttcaaccgcaatcccacatagaatcgttcaagataacttccctaagttcaaggaaaactgccacatttttacaaggcttatcaccgctgtgccatctttgagagaacatttcgaaaacgttaagaaggcaatcggtatctttgtgtctacttcaatcgaggaagttttctcttttcctttctacaaccaacttttgacccaaactcagattgatctttacaaccagcttttgggaggtatttcaagggaggctggaaccgaaaagattaagggtttgaacgaggttttgaatcttgcaatccaaaagaatgatgaaactgctcatattattgcatcacttccacacaggtttattcctcttttcaagcagattttgtctgatagaaacactctttcttttattcttgaggagtttaagtctgatgaggaagtgattcaatcattttgcaagtataagacacttttgagaaacgagaatgttcttgagactgctgaagcattgttcaacgaacttaattctattgatttgacccatattttcatttcacacaagaagttggagactatttcttctgctttgtgcgatcactgggatacattgaggaatgcactttacgagagaaggatttctgaattgactggaaagattacaaagtctgctaaggaaaaggttcaaagatcacttaagcatgaggatattaacttgcaggaaattatttctgctgcaggaaaggagctttcagaggcttttaagcaaaagacttctgagattttgtcacatgcacacgctgcattggatcagccacttcctaccactttgaagaagcaagaggaaaaggaaattcttaagtctcagttggattcacttttgggactttatcatcttttggattggttcgctgtggatgagtctaacgaggttgatccagagttttcagcaaggcttacaggtattaagttggagatggaaccttctttgtcattttacaacaaggctagaaactacgcaacaaagaagccatattctgtggagaagtttaagttgaacttccaaatgcctaccttggctaggggatgggatgtgaatagagaaaagaacaatggtgcaatccttttcgttaagaacggattgtactaccttggtattatgccaaagcagaagggaagatacaaggctttgtcttttgagcctactgaaaagacatcagaaggtttcgataagatgtactacgattacttcccagatgctgcaaagatgattcctaagtgttctactcaacttaaggctgttactgcacatttccagacacacacaaccccaatccttttgtcaaacaatttcatcgagcctcttgaaatcacaaaggaaatctatgatttgaacaatccagagaaggaacctaagaagttccaaaccgcttatgctaagaaaactggagatcagaagggttatagggaagctctttgcaagtggattgattttaccagagatttcttgtctaagtacactaagactacatcaattgatctttcttctcttagaccatcttctcaatacaaggatcttggagagtattacgctgaattgaaccctcttttgtaccacatttcttttcaaagaatcgctgagaaggaaattatggatgcagtggagactggaaagttgtatctttttcaaatctataacaaggatttcgcaaagggacatcatggaaagccaaatttgcataccctttactggactggacttttctctcctgagaacttggctaagacatctattaagttgaatggtcaggcagaattgttttataggccaaagtctaggatgaagaggatggctcatagacttggagaaaagatgcttaacaagaagttgaaggatcaaaagaccccaattcctgatactctttaccaggagttgtatgattacgttaatcataggctttctcacgatttgtcagatgaagctagagcacttttgcctaacgtgatcacaaaggaagtttctcacgaaattattaaggatagaaggttcacctctgataagtttttctttcatgtgccaatcactttgaactaccaagctgcaaattctccttcaaagtttaaccagagggttaatgcttatcttaaggagcatccagaaacccctattattggaattgatagaggtgagaggaacttgatctatatcacagtgattgattctaccggaaagattcttgagcaaagatcattgaataccattcaacagttcgattatcaaaagaagttggataacagagagaaggaaagggttgctgctagacaagcatggtctgttgtgggaactattaaggatcttaagcagggttacttgtcacaagtgattcatgagattgttgatttgatgattcactatcaggcagttgtggttttggaaaaccttaatttcggattcaagtctaagaggactggtattgctgagaaggcagtgtaccaacagttcgaaaagatgcttatcgataagttgaactgtttggttcttaaggattacccagctgagaaagtgggaggtgttcttaacccttatcagttgacagatcaattcacttcttttgctaagatgggaacacaatcaggttttcttttctatgttccagcaccttacacatctaagattgatccattgaccggatttgttgatccattcgtttggaaaactattaagaaccatgagtcaagaaagcacttccttgaaggatttgatttcttgcattacgatgttaagactggagatttcatcttgcacttcaagatgaacaggaatctttcttttcaaagaggattgccaggtttcatgcctgcttgggatattgtttttgagaagaacgaaactcagttcgatgctaagggaacaccattcattgcaggaaagagaattgtgcctgttattgagaatcacagattcactggtagatatagggatctttacccagctaacgaattgattgcacttttggaggaaaagggaattgtttttagggatggttctaacattcttcctaagttgcttgagaatgattctggcggctcaaaaagaaccgccgacggcagcgaattcgagcccaagaagaagaggaaagtcggaagcggagctactaacttcagcctgctgaagcaggctggagacgtggaggagaaccctggacctatggtgagcaagggcgaggagctgttcaccggggtggtgcccatcctggtcgagctggacggcgacgtaaacggccacaagttcagcgtgtccggcgagggcgagggcgatgccacctacggcaagctgaccctgaagttcatctgcaccaccggcaagctgcccgtgccctggcccaccctcgtgaccaccctgacctatggagtgcagtgcttcagccgctaccccgaccacatgaagcagcacgacttcttcaagtccgccatgcccgaaggctacgtccaggagcgcaccatcttcttcaaggacgacggcaactacaagacccgcgccgaggtgaagttcgagggcgacaccctggtgaaccgcatcgagctgaagggcatcgacttcaaggaggacggcaacatcctggggcacaagctggagtacaactacaacagccacaacgtctatatcatggccgacaagcagaagaacggcatcaaggtgaacttcaagatccgccacaacatcgaggacggcagcgtgcagctcgccgaccactaccagcagaacacccccatcggcgacggccccgtgctgctgcccgacaaccactacctgagcacccagtccgccctgagcaaagaccccaacgagaagcgcgatcacatggtcctgctggagttcgtgaccgccgccgggatcactctcggcatggacgagctgtacaagtctggtggttctcccaagaagaagaggaaagtctaaccggtcatcatcaccatcaccattgagtttaaacccgctgatcagcctcgactgtgccttctagttgccagccatctgttgtttgcccctcccccgtgccttccttgaccctggaaggtgccactcccactgtcctttcctaataaaatgaggaaattgcatcgcattgtctgagtaggtgtcattctattctggggggtggggtggggcaggacagcaagggggaggattgggaagacaatagcaggcatgctggggatgcggtgggctctatggcttctgaggcggaaagaaccagctggggctcgataccgtcgacctctagctagagcttggcgtaatcatggtcatagctgtttcctgtgtgaaattgttatccgctcacaattccacacaacatacgagccggaagcataaagtgtaaagcctagggtgcctaatgagtgagctaactcacattaattgcgttgcgctcactgcccgctttccagtcgggaaacctgtcgtgccagctgcattaatgaatcggccaacgcgcggggagaggcggtttgcgtattgggcgctcttccgcttcctcgctcactgactcgctgcgctcggtcgttcggctgcggcgagcggtatcagctcactcaaaggcggtaatacggttatccacagaatcaggggataacgcaggaaagaacatgtgagcaaaaggccagcaaaaggccaggaaccgtaaaaaggccgcgttgctggcgtttttccataggctccgcccccctgacgagcatcacaaaaatcgacgctcaagtcagaggtggcgaaacccgacaggactataaagataccaggcgtttccccctggaagctccctcgtgcgctctcctgttccgaccctgccgcttaccggatacctgtccgcctttctcccttcgggaagcgtggcgctttctcatagctcacgctgtaggtatctcagttcggtgtaggtcgttcgctccaagctgggctgtgtgcacgaaccccccgttcagcccgaccgctgcgccttatccggtaactatcgtcttgagtccaacccggtaagacacgacttatcgccactggcagcagccactggtaacaggattagcagagcgaggtatgtaggcggtgctacagagttcttgaagtggtggcctaactacggctacactagaagaacagtatttggtatctgcgctctgctgaagccagttaccttcggaaaaagagttggtagctcttgatccggcaaacaaaccaccgctggtagcggtggtttttttgtttgcaagcagcagattacgcgcagaaaaaaaggatctcaagaagatcctttgatcttttctacggggtctgacactcagtggaacgaaaactcacgttaagggattttggtcatgagattatcaaaaaggatcttcacctagatccttttaaattaaaaatgaagttttaaatcaatctaaagtatatatgagtaaacttggtctgacagttaccaatgcttaatcagtgaggcacctatctcagcgatctgtctatttcgttcatccatagttgcctgactccccgtcgtgtagataactacgatacgggagggcttaccatctggccccagtgctgcaatgataccgcgagacccacgctcaccggctccagatttatcagcaataaaccagccagccggaagggccgagcgcagaagtggtcctgcaactttatccgcctccatccagtctattaattgttgccgggaagctagagtaagtagttcgccagttaatagtttgcgcaacgttgttgccattgctacaggcatcgtggtgtcacgctcgtcgtttggtatggcttcattcagctccggttcccaacgatcaaggcgagttacatgatcccccatgttgtgcaaaaaagcggttagctccttcggtcctccgatcgttgtcagaagtaagttggccgcagtgttatcactcatggttatggcagcactgcataattctcttactgtcatgccatccgtaagatgcttttctgtgactggtgagtactcaaccaagtcattctgagaatagtgtatgcggcgaccgagttgctcttgcccggcgtcaatacgggataataccgcgccacatagcagaactttaaaagtgctcatcattggaaaacgttcttcggggcgaaaactctcaaggatcttaccgctgttgagatccagttcgatgtaacccactcgtgcacccaactgatcttcagcatcttttactttcaccagcgtttctgggtgagcaaaaacaggaaggcaaaatgccgcaaaaaagggaataagggcgacacggaaatgttgaatactcatactcttcctttttcaatattattgaagcatttatcagggttattgtctcatgagcggatacatatttgaatgtatttagaaaaataaacaaataggggttccgcgcacatttccccgaaaagtgccacctgacgtcgacggatcgggagatcgatctcccgatcccctagggtcgactctcagtacaatctgctctgatgccgcatagttaagccagtatctgctccctgcttgtgtgttggaggtcgctgagtagtgcgcgagcaaaatttaagctacaacaaggcaaggcttgaccgacaattgcatgaagaatctgcttagggttaggcgttttgcgctgcttcgcgatgtacgggccagatatacgcgtt

SEQ ID NO: 297 - DNA, 8304 bp, synthetic construct
  source 1..8304: mol_type = other DNA
gacattgattattgactagttattaatagtaatcaattacggggtcattagttcatagcccatatatggagttccgcgttacataacttacggtaaatggcccgcctggctgaccgcccaacgacccccgcccattgacgtcaataatgacgtatgttcccatagtaacgccaatagggactttccattgacgtcaatgggtggagtatttacggtaaactgcccacttggcagtacatcaagtgtatcatatgccaagtacgccccctattgacgtcaatgacggtaaatggcccgcctggcattatgcccagtacatgaccttatgggactttcctacttggcagtacatctacgtattagtcatcgctattaccatggtgatgcggttttggcagtacatcaatgggcgtggatagcggtttgactcacggggatttccaagtctccaccccattgacgtcaatgggagtttgttttggcaccaaaatcaacgggactttccaaaatgtcgtaacaactccgccccattgacgcaaatgggcggtaggcgtgtacggtgggaggtctatataagcagagctggtttagtgaaccgtcagatccgctagagatccgcggccgctaatacgactcactatagggagagccgccaccatgaaacggacagccgacggaagcgagttcgagtcaccaaagaagaagcggaaagtcgattcacatgctattgatactatggtggcacttattaggtctgttttgcaaatgagaaactcaaatgctgcaacaggagaggattacattaactctccagtgagggatttgaatggtgtttgctttgattcaagattccaaaacccagaatggcctatggatgctgatgcaaacggagcttatcatattgcacttaagggtcagcttttgcttaatcacttgaaggagtctaaggatttgaagttgcagaacggtatttcaaatcaagattggcttgcttacattcaggaattgagaaacggctcctctggcagctccggctctagcggctcctctggcagctccggcactcagtttgagggattcacaaatctttaccaagtgtctaagactttgaggttcgagcttattccacaaggaaagacattgaagcacattcaagaacagggttttattgaggaagataaggctaggaatgatcattataaggaacttaagcctattattgatagaatctataagacctacgcagatcaatgtttgcagcttgttcaacttgattgggagaacttgtctgctgcaattgattcatacaggaaggaaaagacagaggaaaccagaaacgctcttattgaggaacaagctacttacaggaatgcaattcacgattatttcattggaagaaccgataacttgactgatgctattaataagagacatgcagaaatctataagggtctttttaaggctgagctttttaacggaaaggtgttgaagcagcttggtacagttactacaaccgagcacgaaaacgcacttttgaggtcttttgataagttcactacatacttctcaggattctacagaaacaggaagaatgtgttctctgctgaggatatttcaaccgcaatcccacatagaatcgttcaagataacttccctaagttcaaggaaaactgccacatttttacaaggcttatcaccgctgtgccatctttgagagaacatttcgaaaacgttaagaaggcaatcggtatctttgtgtctacttcaatcgaggaagttttctcttttcctttctacaaccaacttttgacccaaactcagattgatctttacaaccagcttttgggaggtatttcaagggaggctggaaccgaaaagattaagggtttgaacgaggttttgaatcttgcaatccaaaagaatgatgaaactgctcatattattgcatcacttccacacaggtttattcctcttttcaagcagattttgtctgatagaaacactctttcttttattcttgaggagtttaagtctgatgaggaagtgattcaatcattttgcaagtataagacacttttgagaaacgagaatgttcttgagactgctgaagcattgttcaacgaacttaattctattgatttgacccatattttcatttcacacaagaagttggagactatttcttctgctttgtgcgatcactgggatacattgaggaatgcactttacgagagaaggatttctgaattgactggaaagattacaaagtctgctaaggaaaaggttcaaagatcacttaagcatgaggatattaacttgcaggaaattatttctgctgcaggaaaggagctttcagaggcttttaagcaaaagacttctgagattttgtcacatgcacacgctgcattggatcagccacttcctaccactttgaagaagcaagaggaaaaggaaattcttaagtctcagttggattcacttttgggactttatcatcttttggattggttcgctgtggatgagtctaacgaggttgatccagagttttcagcaaggcttacaggtattaagttggagatggaaccttctttgtcattttacaacaaggctagaaactacgcaacaaagaagccatattctgtggagaagtttaagttgaacttccaaatgcctaccttggctaggggatgggatgtgaatagagaaaagaacaatggtgcaatccttttcgttaagaacggattgtactaccttggtattatgccaaagcagaagggaagatacaaggctttgtcttttgagcctactgaaaagacatcagaaggtttcgataagatgtactacgattacttcccagatgctgcaaagatgattcctaagtgttctactcaacttaaggctgttactgcacatttccagacacacacaaccccaatccttttgtcaaacaatttcatcgagcctcttgaaatcacaaaggaaatctatgatttgaacaatccagagaaggaacctaagaagttccaaaccgcttatgctaagaaaactggagatcagaagggttatagggaagctctttgcaagtggattgattttaccagagatttcttgtctaagtacactaagactacatcaattgatctttcttctcttagaccatcttctcaatacaaggatcttggagagtattacgctgaattgaaccctcttttgtaccacatttcttttcaaagaatcgctgagaaggaaattatggatgcagtggagactggaaagttgtatctttttcaaatctataacaaggatttcgcaaagggacatcatggaaagccaaatttgcataccctttactggactggacttttctctcctgagaacttggctaagacatctattaagttgaatggtcaggcagaattgttttataggccaaagtctaggatgaagaggatggctcatagacttggagaaaagatgcttaacaagaagttgaaggatcaaaagaccccaattcctgatactctttaccaggagttgtatgattacgttaatcataggctttctcacgatttgtcagatgaagctagagcacttttgcctaacgtgatcacaaaggaagtttctcacgaaattattaaggatagaaggttcacctctgataagtttttctttcatgtgccaatcactttgaactaccaagctgcaaattctccttcaaagtttaaccagagggttaatgcttatcttaaggagcatccagaaacccctattattggaattgatagaggtgagaggaacttgatctatatcacagtgattgattctaccggaaagattcttgagcaaagatcattgaataccattcaacagttcgattatcaaaagaagttggataacagagagaaggaaagggttgctgctagacaagcatggtctgttgtgggaactattaaggatcttaagcagggttacttgtcacaagtgattcatgagattgttgatttgatgattcactatcaggcagttgtggttttggaaaaccttaatttcggattcaagtctaagaggactggtattgctgagaaggcagtgtaccaacagttcgaaaagatgcttatcgataagttgaactgtttggttcttaaggattacccagctgagaaagtgggaggtgttcttaacccttatcagttgacagatcaattcacttcttttgctaagatgggaacacaatcaggttttcttttctatgttccagcaccttacacatctaagattgatccattgaccggatttgttgatccattcgtttggaaaactattaagaaccatgagtcaagaaagcacttccttgaaggatttgatttcttgcattacgatgttaagactggagatttcatcttgcacttcaagatgaacaggaatctttcttttcaaagaggattgccaggtttcatgcctgcttgggatattgtttttgagaagaacgaaactcagttcgatgctaagggaacaccattcattgcaggaaagagaattgtgcctgttattgagaatcacagattcactggtagatatagggatctttacccagctaacgaattgattgcacttttggaggaaaagggaattgtttttagggatggttctaacattcttcctaagttgcttgagaatgattctggcggctcaaaaagaaccgccgacggcagcgaattcgagcccaagaagaagaggaaagtcggaagcggagctactaacttcagcctgctgaagcaggctggagacgtggaggagaaccctggacctatggtgagcaagggcgaggagctgttcaccggggtggtgcccatcctggtcgagctggacggcgacgtaaacggccacaagttcagcgtgtccggcgagggcgagggcgatgccacctacggcaagctgaccctgaagttcatctgcaccaccggcaagctgcccgtgccctggcccaccctcgtgaccaccctgacctatggagtgcagtgcttcagccgctaccccgaccacatgaagcagcacgacttcttcaagtccgccatgcccgaaggctacgtccaggagcgcaccatcttcttcaaggacgacggcaactacaagacccgcgccgaggtgaagttcgagggcgacaccctggtgaaccgcatcgagctgaagggcatcgacttcaaggaggacggcaacatcctggggcacaagctggagtacaactacaacagccacaacgtctatatcatggccgacaagcagaagaacggcatcaaggtgaacttcaagatccgccacaacatcgaggacggcagcgtgcagctcgccgaccactaccagcagaacacccccatcggcgacggccccgtgctgctgcccgacaaccactacctgagcacccagtccgccctgagcaaagaccccaacgagaagcgcgatcacatggtcctgctggagttcgtgaccgccgccgggatcactctcggcatggacgagctgtacaagtctggtggttctcccaagaagaagaggaaagtctaaccggtcatcatcaccatcaccattgagtttaaacccgctgatcagcctcgactgtgccttctagttgccagccatctgttgtttgcccctcccccgtgccttccttgaccctggaaggtgccactcccactgtcctttcctaataaaatgaggaaattgcatcgcattgtctgagtaggtgtcattctattctggggggtggggtggggcaggacagcaagggggaggattgggaagacaatagcaggcatgctggggatgcggtgggctctatggcttctgaggcggaaagaaccagctggggctcgataccgtcgacctctagctagagcttggcgtaatcatggtcatagctgtttcctgtgtgaaattgttatccgctcacaattccacacaacatacgagccggaagcataaagtgtaaagcctagggtgcctaatgagtgagctaactcacattaattgcgttgcgctcactgcccgctttccagtcgggaaacctgtcgtgccagctgcattaatgaatcggccaacgcgcggggagaggcggtttgcgtattgggcgctcttccgcttcctcgctcactgactcgctgcgctcggtcgttcggctgcggcgagcggtatcagctcactcaaaggcggtaatacggttatccacagaatcaggggataacgcaggaaagaacatgtgagcaaaaggccagcaaaaggccaggaaccgtaaaaaggccgcgttgctggcgtttttccataggctccgcccccctgacgagcatcacaaaaatcgacgctcaagtcagaggtggcgaaacccgacaggactataaagataccaggcgtttccccctggaagctccctcgtgcgctctcctgttccgaccctgccgcttaccggatacctgtccgcctttctcccttcgggaagcgtggcgctttctcatagctcacgctgtaggtatctcagttcggtgtaggtcgttcgctccaagctgggctgtgtgcacgaaccccccgttcagcccgaccgctgcgccttatccggtaactatcgtcttgagtccaacccggtaagacacgacttatcgccactggcagcagccactggtaacaggattagcagagcgaggtatgtaggcggtgctacagagttcttgaagtggtggcctaactacggctacactagaagaacagtatttggtatctgcgctctgctgaagccagttaccttcggaaaaagagttggtagctcttgatccggcaaacaaaccaccgctggtagcggtggtttttttgtttgcaagcagcagattacgcgcagaaaaaaaggatctcaagaagatcctttgatcttttctacggggtctgacactcagtggaacgaaaactcacgttaagggattttggtcatgagattatcaaaaaggatcttcacctagatccttttaaattaaaaatgaagttttaaatcaatctaaagtatatatgagtaaacttggtctgacagttaccaatgcttaatcagtgaggcacctatctcagcgatctgtctatttcgttcatccatagttgcctgactccccgtcgtgtagataactacgatacgggagggcttaccatctggccccagtgctgcaatgataccgcgagacccacgctcaccggctccagatttatcagcaataaaccagccagccggaagggccgagcgcagaagtggtcctgcaactttatccgcctccatccagtctattaattgttgccgggaagctagagtaagtagttcgccagttaatagtttgcgcaacgttgttgccattgctacaggcatcgtggtgtcacgctcgtcgtttggtatggcttcattcagctccggttcccaacgatcaaggcgagttacatgatcccccatgttgtgcaaaaaagcggttagctccttcggtcctccgatcgttgtcagaagtaagttggccgcagtgttatcactcatggttatggcagcactgcataattctcttactgtcatgccatccgtaagatgcttttctgtgactggtgagtactcaaccaagtcattctgagaatagtgtatgcggcgaccgagttgctcttgcccggcgtcaatacgggataataccgcgccacatagcagaactttaaaagtgctcatcattggaaaacgttcttcggggcgaaaactctcaaggatcttaccgctgttgagatccagttcgatgtaacccactcgtgcacccaactgatcttcagcatcttttactttcaccagcgtttctgggtgagcaaaaacaggaaggcaaaatgccgcaaaaaagggaataagggcgacacggaaatgttgaatactcatactcttcctttttcaatattattgaagcatttatcagggttattgtctcatgagcggatacatatttgaatgtatttagaaaaataaacaaataggggttccgcgcacatttccccgaaaagtgccacctgacgtcgacggatcgggagatcgatctcccgatcccctagggtcgactctcagtacaatctgctctgatgccgcatagttaagccagtatctgctccctgcttgtgtgttggaggtcgctgagtagtgcgcgagcaaaatttaagctacaacaaggcaaggcttgaccgacaattgcatgaagaatctgcttagggttaggcgttttgcgctgcttcgcgatgtacgggccagatatacgcgtt

SEQ ID NO: 298 - protein, 1306 aa, synthetic construct
TQFEGFTNLYQVSKTLRFELIPQGKTLKHIQEQGFIEEDKARNDHYKELKPIIDRIYKTYADQCLQLVQLDWENLSAAIDSYRKEKTEETRNALIEEQATYRNAIHDYFIGRTDNLTDAINKRHAEIYKGLFKAELFNGKVLKQLGTVTTTEHENALLRSFDKFTTYFSGFYRNRKNVFSAEDISTAIPHRIVQDNFPKFKENCHIFTRLITAVPSLREHFENVKKAIGIFVSTSIEEVFSFPFYNQLLTQTQIDLYNQLLGGISREAGTEKIKGLNEVLNLAIQKNDETAHIIASLPHRFIPLFKQILSDRNTLSFILEEFKSDEEVIQSFCKYKTLLRNENVLETAEALFNELNSIDLTHIFISHKKLETISSALCDHWDTLRNALYERRISELTGKITKSAKEKVQRSLKHEDINLQEIISAAGKELSEAFKQKTSEILSHAHAALDQPLPTTLKKQEEKEILKSQLDSLLGLYHLLDWFAVDESNEVDPEFSARLTGIKLEMEPSLSFYNKARNYATKKPYSVEKFKLNFQMPTLARGWDVNREKNNGAILFVKNGLYYLGIMPKQKGRYKALSFEPTEKTSEGFDKMYYDYFPDAAKMIPKCSTQLKAVTAHFQTHTTPILLSNNFIEPLEITKEIYDLNNPEKEPKKFQTAYAKKTGDQKGYREALCKWIDFTRDFLSKYTKTTSIDLSSLRPSSQYKDLGEYYAELNPLLYHISFQRIAEKEIMDAVETGKLYLFQIYNKDFAKGHHGKPNLHTLYWTGLFSPENLAKTSIKLNGQAELFYRPKSRMKRMAHRLGEKMLNKKLKDQKTPIPDTLYQELYDYVNHRLSHDLSDEARALLPNVITKEVSHEIIKDRRFTSDKFFFHVPITLNYQAANSPSKFNQRVNAYLKEHPETPIIGIDRGERNLIYITVIDSTGKILEQRSLNTIQQFDYQKKLDNREKERVAARQAWSVVGTIKDLKQGYLSQVIHEIVDLMIHYQAVVVLENLNFGFKSKRTGIAEKAVYQQFEKMLIDKLNCLVLKDYPAEKVGGVLNPYQLTDQFTSFAKMGTQSGFLFYVPAPYTSKIDPLTGFVDPFVWKTIKNHESRKHFLEGFDFLHYDVKTGDFILHFKMNRNLSFQRGLPGFMPAWDIVFEKNETQFDAKGTPFIAGKRIVPVIENHRFTGRYRDLYPANELIALLEEKGIVFRDGSNILPKLLENDDSHAIDTMVALIRSVLQMRNSNAATGEDYINSPVRDLNGVCFDSRFQNPEWPMDADANGAYHIALKGQLLLNHLKESKDLKLQNGISNQDWLAYIQELRN

SEQ ID NO: 299 - protein, 1316 aa, synthetic construct
TEETRNALIEEQATYRNAIHDYFIGRTDNLTDAINKRHAEIYKGLFKAELFNGKVLKQLGTVTTTEHENALLRSFDKFTTYFSGFYRNRKNVFSAEDISTAIPHRIVQDNFPKFKENCHIFTRLITAVPSLREHFENVKKAIGIFVSTSIEEVFSFPFYNQLLTQTQIDLYNQLLGGISREAGTEKIKGLNEVLNLAIQKNDETAHIIASLPHRFIPLFKQILSDRNTLSFILEEFKSDEEVIQSFCKYKTLLRNENVLETAEALFNELNSIDLTHIFISHKKLETISSALCDHWDTLRNALYERRISELTGKITKSAKEKVQRSLKHEDINLQEIISAAGKELSEAFKQKTSEILSHAHAALDQPLPTTLKKQEEKEILKSQLDSLLGLYHLLDWFAVDESNEVDPEFSARLTGIKLEMEPSLSFYNKARNYATKKPYSVEKFKLNFQMPTLARGWDVNREKNNGAILFVKNGLYYLGIMPKQKGRYKALSFEPTEKTSEGFDKMYYDYFPDAAKMIPKCSTQLKAVTAHFQTHTTPILLSNNFIEPLEITKEIYDLNNPEKEPKKFQTAYAKKTGDQKGYREALCKWIDFTRDFLSKYTKTTSIDLSSLRPSSQYKDLGEYYAELNPLLYHISFQRIAEKEIMDAVETGKLYLFQIYNKDFAKGHHGKPNLHTLYWTGLFSPENLAKTSIKLNGQAELFYRPKSRMKRMAHRLGEKMLNKKLKDQKTPIPDTLYQELYDYVNHRLSHDLSDEARALLPNVITKEVSHEIIKDRRFTSDKFFFHVPITLNYQAANSPSKFNQRVNAYLKEHPETPIIGIDRGERNLIYITVIDSTGKILEQRSLNTIQQFDYQKKLDNREKERVAARQAWSVVGTIKDLKQGYLSQVIHEIVDLMIHYQAVVVLENLNFGFKSKRTGIAEKAVYQQFEKMLIDKLNCLVLKDYPAEKVGGVLNPYQLTDQFTSFAKMGTQSGFLFYVPAPYTSKIDPLTGFVDPFVWKTIKNHESRKHFLEGFDFLHYDVKTGDFILHFKMNRNLSFQRGLPGFMPAWDIVFEKNETQFDAKGTPFIAGKRIVPVIENHRFTGRYRDLYPANELIALLEEKGIVFRDGSNILPKLLENDDSHAIDTMVALIRSVLQMRNSNAATGEDYINSPVRDLNGVCFDSRFQNPEWPMDADANGAYHIALKGQLLLNHLKESKDLKLQNGISNQDWLAYIQELRNGSSGSSGSSGTQFEGFTNLYQVSKTLRFELIPQGKTLKHIQEQGFIEEDKARNDHYKELKPIIDRIYKTYADQCLQLVQLDWENLSAAIDSYRKEK

SEQ ID NO: 300 - protein, 1322 aa, synthetic construct
TEETRNALIEEQATYRNAIHDYFIGRTDNLTDAINKRHAEIYKGLFKAELFNGKVLKQLGTVTTTEHENALLRSFDKFTTYFSGFYRNRKNVFSAEDISTAIPHRIVQDNFPKFKENCHIFTRLITAVPSLREHFENVKKAIGIFVSTSIEEVFSFPFYNQLLTQTQIDLYNQLLGGISREAGTEKIKGLNEVLNLAIQKNDETAHIIASLPHRFIPLFKQILSDRNTLSFILEEFKSDEEVIQSFCKYKTLLRNENVLETAEALFNELNSIDLTHIFISHKKLETISSALCDHWDTLRNALYERRISELTGKITKSAKEKVQRSLKHEDINLQEIISAAGKELSEAFKQKTSEILSHAHAALDQPLPTTLKKQEEKEILKSQLDSLLGLYHLLDWFAVDESNEVDPEFSARLTGIKLEMEPSLSFYNKARNYATKKPYSVEKFKLNFQMPTLARGWDVNREKNNGAILFVKNGLYYLGIMPKQKGRYKALSFEPTEKTSEGFDKMYYDYFPDAAKMIPKCSTQLKAVTAHFQTHTTPILLSNNFIEPLEITKEIYDLNNPEKEPKKFQTAYAKKTGDQKGYREALCKWIDFTRDFLSKYTKTTSIDLSSLRPSSQYKDLGEYYAELNPLLYHISFQRIAEKEIMDAVETGKLYLFQIYNKDFAKGHHGKPNLHTLYWTGLFSPENLAKTSIKLNGQAELFYRPKSRMKRMAHRLGEKMLNKKLKDQKTPIPDTLYQELYDYVNHRLSHDLSDEARALLPNVITKEVSHEIIKDRRFTSDKFFFHVPITLNYQAANSPSKFNQRVNAYLKEHPETPIIGIDRGERNLIYITVIDSTGKILEQRSLNTIQQFDYQKKLDNREKERVAARQAWSVVGTIKDLKQGYLSQVIHEIVDLMIHYQAVVVLENLNFGFKSKRTGIAEKAVYQQFEKMLIDKLNCLVLKDYPAEKVGGVLNPYQLTDQFTSFAKMGTQSGFLFYVPAPYTSKIDPLTGFVDPFVWKTIKNHESRKHFLEGFDFLHYDVKTGDFILHFKMNRNLSFQRGLPGFMPAWDIVFEKNETQFDAKGTPFIAGKRIVPVIENHRFTGRYRDLYPANELIALLEEKGIVFRDGSNILPKLLENDDSHAIDTMVALIRSVLQMRNSNAATGEDYINSPVRDLNGVCFDSRFQNPEWPMDADANGAYHIALKGQLLLNHLKESKDLKLQNGISNQDWLAYIQELRNGSSGSSGSSGSSGSSGTQFEGFTNLYQVSKTLRFELIPQGKTLKHIQEQGFIEEDKARNDHYKELKPIIDRIYKTYADQCLQLVQLDWENLSAAIDSYRKEK

SEQ ID NO: 301 - protein, 1316 aa, synthetic construct
EFKSDEEVIQSFCKYKTLLRNENVLETAEALFNELNSIDLTHIFISHKKLETISSALCDHWDTLRNALYERRISELTGKITKSAKEKVQRSLKHEDINLQEIISAAGKELSEAFKQKTSEILSHAHAALDQPLPTTLKKQEEKEILKSQLDSLLGLYHLLDWFAVDESNEVDPEFSARLTGIKLEMEPSLSFYNKARNYATKKPYSVEKFKLNFQMPTLARGWDVNREKNNGAILFVKNGLYYLGIMPKQKGRYKALSFEPTEKTSEGFDKMYYDYFPDAAKMIPKCSTQLKAVTAHFQTHTTPILLSNNFIEPLEITKEIYDLNNPEKEPKKFQTAYAKKTGDQKGYREALCKWIDFTRDFLSKYTKTTSIDLSSLRPSSQYKDLGEYYAELNPLLYHISFQRIAEKEIMDAVETGKLYLFQIYNKDFAKGHHGKPNLHTLYWTGLFSPENLAKTSIKLNGQAELFYRPKSRMKRMAHRLGEKMLNKKLKDQKTPIPDTLYQELYDYVNHRLSHDLSDEARALLPNVITKEVSHEIIKDRRFTSDKFFFHVPITLNYQAANSPSKFNQRVNAYLKEHPETPIIGIDRGERNLIYITVIDSTGKILEQRSLNTIQQFDYQKKLDNREKERVAARQAWSVVGTIKDLKQGYLSQVIHEIVDLMIHYQAVVVLENLNFGFKSKRTGIAEKAVYQQFEKMLIDKLNCLVLKDYPAEKVGGVLNPYQLTDQFTSFAKMGTQSGFLFYVPAPYTSKIDPLTGFVDPFVWKTIKNHESRKHFLEGFDFLHYDVKTGDFILHFKMNRNLSFQRGLPGFMPAWDIVFEKNETQFDAKGTPFIAGKRIVPVIENHRFTGRYRDLYPANELIALLEEKGIVFRDGSNILPKLLENDDSHAIDTMVALIRSVLQMRNSNAATGEDYINSPVRDLNGVCFDSRFQNPEWPMDADANGAYHIALKGQLLLNHLKESKDLKLQNGISNQDWLAYIQELRNGSSGSSGSSGTQFEGFTNLYQVSKTLRFELIPQGKTLKHIQEQGFIEEDKARNDHYKELKPIIDRIYKTYADQCLQLVQLDWENLSAAIDSYRKEKTEETRNALIEEQATYRNAIHDYFIGRTDNLTDAINKRHAEIYKGLFKAELFNGKVLKQLGTVTTTEHENALLRSFDKFTTYFSGFYRNRKNVFSAEDISTAIPHRIVQDNFPKFKENCHIFTRLITAVPSLREHFENVKKAIGIFVSTSIEEVFSFPFYNQLLTQTQIDLYNQLLGGISREAGTEKIKGLNEVLNLAIQKNDETAHIIASLPHRFIPLFKQILSDRNTLSFILE

SEQ ID NO: 302 - protein, 1322 aa, synthetic construct
EFKSDEEVIQSFCKYKTLLRNENVLETAEALFNELNSIDLTHIFISHKKLETISSALCDHWDTLRNALYERRISELTGKITKSAKEKVQRSLKHEDINLQEIISAAGKELSEAFKQKTSEILSHAHAALDQPLPTTLKKQEEKEILKSQLDSLLGLYHLLDWFAVDESNEVDPEFSARLTGIKLEMEPSLSFYNKARNYATKKPYSVEKFKLNFQMPTLARGWDVNREKNNGAILFVKNGLYYLGIMPKQKGRYKALSFEPTEKTSEGFDKMYYDYFPDAAKMIPKCSTQLKAVTAHFQTHTTPILLSNNFIEPLEITKEIYDLNNPEKEPKKFQTAYAKKTGDQKGYREALCKWIDFTRDFLSKYTKTTSIDLSSLRPSSQYKDLGEYYAELNPLLYHISFQRIAEKEIMDAVETGKLYLFQIYNKDFAKGHHGKPNLHTLYWTGLFSPENLAKTSIKLNGQAELFYRPKSRMKRMAHRLGEKMLNKKLKDQKTPIPDTLYQELYDYVNHRLSHDLSDEARALLPNVITKEVSHEIIKDRRFTSDKFFFHVPITLNYQAANSPSKFNQRVNAYLKEHPETPIIGIDRGERNLIYITVIDSTGKILEQRSLNTIQQFDYQKKLDNREKERVAARQAWSVVGTIKDLKQGYLSQVIHEIVDLMIHYQAVVVLENLNFGFKSKRTGIAEKAVYQQFEKMLIDKLNCLVLKDYPAEKVGGVLNPYQLTDQFTSFAKMGTQSGFLFYVPAPYTSKIDPLTGFVDPFVWKTIKNHESRKHFLEGFDFLHYDVKTGDFILHFKMNRNLSFQRGLPGFMPAWDIVFEKNETQFDAKGTPFIAGKRIVPVIENHRFTGRYRDLYPANELIALLEEKGIVFRDGSNILPKLLENDDSHAIDTMVALIRSVLQMRNSNAATGEDYINSPVRDLNGVCFDSRFQNPEWPMDADANGAYHIALKGQLLLNHLKESKDLKLQNGISNQDWLAYIQELRNGSSGSSGSSGSSGSSGTQFEGFTNLYQVSKTLRFELIPQGKTLKHIQEQGFIEEDKARNDHYKELKPIIDRIYKTYADQCLQLVQLDWENLSAAIDSYRKEKTEETRNALIEEQATYRNAIHDYFIGRTDNLTDAINKRHAEIYKGLFKAELFNGKVLKQLGTVTTTEHENALLRSFDKFTTYFSGFYRNRKNVFSAEDISTAIPHRIVQDNFPKFKENCHIFTRLITAVPSLREHFENVKKAIGIFVSTSIEEVFSFPFYNQLLTQTQIDLYNQLLGGISREAGTEKIKGLNEVLNLAIQKNDETAHIIASLPHRFIPLFKQILSDRNTLSFILE

SEQ ID NO: 303 - protein, 1316 aa, synthetic construct
NGVCFDSRFQNPEWPMDADANGAYHIALKGQLLLNHLKESKDLKLQNGISNQDWLAYIQELRNGSSGSSGSSGTQFEGFTNLYQVSKTLRFELIPQGKTLKHIQEQGFIEEDKARNDHYKELKPIIDRIYKTYADQCLQLVQLDWENLSAAIDSYRKEKTEETRNALIEEQATYRNAIHDYFIGRTDNLTDAINKRHAEIYKGLFKAELFNGKVLKQLGTVTTTEHENALLRSFDKFTTYFSGFYRNRKNVFSAEDISTAIPHRIVQDNFPKFKENCHIFTRLITAVPSLREHFENVKKAIGIFVSTSIEEVFSFPFYNQLLTQTQIDLYNQLLGGISREAGTEKIKGLNEVLNLAIQKNDETAHIIASLPHRFIPLFKQILSDRNTLSFILEEFKSDEEVIQSFCKYKTLLRNENVLETAEALFNELNSIDLTHIFISHKKLETISSALCDHWDTLRNALYERRISELTGKITKSAKEKVQRSLKHEDINLQEIISAAGKELSEAFKQKTSEILSHAHAALDQPLPTTLKKQEEKEILKSQLDSLLGLYHLLDWFAVDESNEVDPEFSARLTGIKLEMEPSLSFYNKARNYATKKPYSVEKFKLNFQMPTLARGWDVNREKNNGAILFVKNGLYYLGIMPKQKGRYKALSFEPTEKTSEGFDKMYYDYFPDAAKMIPKCSTQLKAVTAHFQTHTTPILLSNNFIEPLEITKEIYDLNNPEKEPKKFQTAYAKKTGDQKGYREALCKWIDFTRDFLSKYTKTTSIDLSSLRPSSQYKDLGEYYAELNPLLYHISFQRIAEKEIMDAVETGKLYLFQIYNKDFAKGHHGKPNLHTLYWTGLFSPENLAKTSIKLNGQAELFYRPKSRMKRMAHRLGEKMLNKKLKDQKTPIPDTLYQELYDYVNHRLSHDLSDEARALLPNVITKEVSHEIIKDRRFTSDKFFFHVPITLNYQAANSPSKFNQRVNAYLKEHPETPIIGIDRGERNLIYITVIDSTGKILEQRSLNTIQQFDYQKKLDNREKERVAARQAWSVVGTIKDLKQGYLSQVIHEIVDLMIHYQAVVVLENLNFGFKSKRTGIAEKAVYQQFEKMLIDKLNCLVLKDYPAEKVGGVLNPYQLTDQFTSFAKMGTQSGFLFYVPAPYTSKIDPLTGFVDPFVWKTIKNHESRKHFLEGFDFLHYDVKTGDFILHFKMNRNLSFQRGLPGFMPAWDIVFEKNETQFDAKGTPFIAGKRIVPVIENHRFTGRYRDLYPANELIALLEEKGIVFRDGSNILPKLLENDDSHAIDTMVALIRSVLQMRNSNAATGEDYINSPVRDL

SEQ ID NO: 304 - protein, 1322 aa, synthetic construct
NGVCFDSRFQNPEWPMDADANGAYHIALKGQLLLNHLKESKDLKLQNGISNQDWLAYIQELRNGSSGSSGSSGSSGSSGTQFEGFTNLYQVSKTLRFELIPQGKTLKHIQEQGFIEEDKARNDHYKELKPIIDRIYKTYADQCLQLVQLDWENLSAAIDSYRKEKTEETRNALIEEQATYRNAIHDYFIGRTDNLTDAINKRHAEIYKGLFKAELFNGKVLKQLGTVTTTEHENALLRSFDKFTTYFSGFYRNRKNVFSAEDISTAIPHRIVQDNFPKFKENCHIFTRLITAVPSLREHFENVKKAIGIFVSTSIEEVFSFPFYNQLLTQTQIDLYNQLLGGISREAGTEKIKGLNEVLNLAIQKNDETAHIIASLPHRFIPLFKQILSDRNTLSFILEEFKSDEEVIQSFCKYKTLLRNENVLETAEALFNELNSIDLTHIFISHKKLETISSALCDHWDTLRNALYERRISELTGKITKSAKEKVQRSLKHEDINLQEIISAAGKELSEAFKQKTSEILSHAHAALDQPLPTTLKKQEEKEILKSQLDSLLGLYHLLDWFAVDESNEVDPEFSARLTGIKLEMEPSLSFYNKARNYATKKPYSVEKFKLNFQMPTLARGWDVNREKNNGAILFVKNGLYYLGIMPKQKGRYKALSFEPTEKTSEGFDKMYYDYFPDAAKMIPKCSTQLKAVTAHFQTHTTPILLSNNFIEPLEITKEIYDLNNPEKEPKKFQTAYAKKTGDQKGYREALCKWIDFTRDFLSKYTKTTSIDLSSLRPSSQYKDLGEYYAELNPLLYHISFQRIAEKEIMDAVETGKLYLFQIYNKDFAKGHHGKPNLHTLYWTGLFSPENLAKTSIKLNGQAELFYRPKSRMKRMAHRLGEKMLNKKLKDQKTPIPDTLYQELYDYVNHRLSHDLSDEARALLPNVITKEVSHEIIKDRRFTSDKFFFHVPITLNYQAANSPSKFNQRVNAYLKEHPETPIIGIDRGERNLIYITVIDSTGKILEQRSLNTIQQFDYQKKLDNREKERVAARQAWSVVGTIKDLKQGYLSQVIHEIVDLMIHYQAVVVLENLNFGFKSKRTGIAEKAVYQQFEKMLIDKLNCLVLKDYPAEKVGGVLNPYQLTDQFTSFAKMGTQSGFLFYVPAPYTSKIDPLTGFVDPFVWKTIKNHESRKHFLEGFDFLHYDVKTGDFILHFKMNRNLSFQRGLPGFMPAWDIVFEKNETQFDAKGTPFIAGKRIVPVIENHRFTGRYRDLYPANELIALLEEKGIVFRDGSNILPKLLENDDSHAIDTMVALIRSVLQMRNSNAATGEDYINSPVRDL

SEQ ID NO: 305 - protein, 1316 aa, synthetic construct
EKFKLNFQMPTLARGWDVNREKNNGAILFVKNGLYYLGIMPKQKGRYKALSFEPTEKTSEGFDKMYYDYFPDAAKMIPKCSTQLKAVTAHFQTHTTPILLSNNFIEPLEITKEIYDLNNPEKEPKKFQTAYAKKTGDQKGYREALCKWIDFTRDFLSKYTKTTSIDLSSLRPSSQYKDLGEYYAELNPLLYHISFQRIAEKEIMDAVETGKLYLFQIYNKDFAKGHHGKPNLHTLYWTGLFSPENLAKTSIKLNGQAELFYRPKSRMKRMAHRLGEKMLNKKLKDQKTPIPDTLYQELYDYVNHRLSHDLSDEARALLPNVITKEVSHEIIKDRRFTSDKFFFHVPITLNYQAANSPSKFNQRVNAYLKEHPETPIIGIDRGERNLIYITVIDSTGKILEQRSLNTIQQFDYQKKLDNREKERVAARQAWSVVGTIKDLKQGYLSQVIHEIVDLMIHYQAVVVLENLNFGFKSKRTGIAEKAVYQQFEKMLIDKLNCLVLKDYPAEKVGGVLNPYQLTDQFTSFAKMGTQSGFLFYVPAPYTSKIDPLTGFVDPFVWKTIKNHESRKHFLEGFDFLHYDVKTGDFILHFKMNRNLSFQRGLPGFMPAWDIVFEKNETQFDAKGTPFIAGKRIVPVIENHRFTGRYRDLYPANELIALLEEKGIVFRDGSNILPKLLENDDSHAIDTMVALIRSVLQMRNSNAATGEDYINSPVRDLNGVCFDSRFQNPEWPMDADANGAYHIALKGQLLLNHLKESKDLKLQNGISNQDWLAYIQELRNGSSGSSGSSGTQFEGFTNLYQVSKTLRFELIPQGKTLKHIQEQGFIEEDKARNDHYKELKPIIDRIYKTYADQCLQLVQLDWENLSAAIDSYRKEKTEETRNALIEEQATYRNAIHDYFIGRTDNLTDAINKRHAEIYKGLFKAELFNGKVLKQLGTVTTTEHENALLRSFDKFTTYFSGFYRNRKNVFSAEDISTAIPHRIVQDNFPKFKENCHIFTRLITAVPSLREHFENVKKAIGIFVSTSIEEVFSFPFYNQLLTQTQIDLYNQLLGGISREAGTEKIKGLNEVLNLAIQKNDETAHIIASLPHRFIPLFKQILSDRNTLSFILEEFKSDEEVIQSFCKYKTLLRNENVLETAEALFNELNSIDLTHIFISHKKLETISSALCDHWDTLRNALYERRISELTGKITKSAKEKVQRSLKHEDINLQEIISAAGKELSEAFKQKTSEILSHAHAALDQPLPTTLKKQEEKEILKSQLDSLLGLYHLLDWFAVDESNEVDPEFSARLTGIKLEMEPSLSFYNKARNYATKKPYSV

SEQ ID NO: 306 - protein, 1322 aa, synthetic construct
EKFKLNFQMPTLARGWDVNREKNNGAILFVKNGLYYLGIMPKQKGRYKALSFEPTEKTSEGFDKMYYDYFPDAAKMIPKCSTQLKAVTAHFQTHTTPILLSNNFIEPLEITKEIYDLNNPEKEPKKFQTAYAKKTGDQKGYREALCKWIDFTRDFLSKYTKTTSIDLSSLRPSSQYKDLGEYYAELNPLLYHISFQRIAEKEIMDAVETGKLYLFQIYNKDFAKGHHGKPNLHTLYWTGLFSPENLAKTSIKLNGQAELFYRPKSRMKRMAHRLGEKMLNKKLKDQKTPIPDTLYQELYDYVNHRLSHDLSDEARALLPNVITKEVSHEIIKDRRFTSDKFFFHVPITLNYQAANSPSKFNQRVNAYLKEHPETPIIGIDRGERNLIYITVIDSTGKILEQRSLNTIQQFDYQKKLDNREKERVAARQAWSVVGTIKDLKQGYLSQVIHEIVDLMIHYQAVVVLENLNFGFKSKRTGIAEKAVYQQFEKMLIDKLNCLVLKDYPAEKVGGVLNPYQLTDQFTSFAKMGTQSGFLFYVPAPYTSKIDPLTGFVDPFVWKTIKNHESRKHFLEGFDFLHYDVKTGDFILHFKMNRNLSFQRGLPGFMPAWDIVFEKNETQFDAKGTPFIAGKRIVPVIENHRFTGRYRDLYPANELIALLEEKGIVFRDGSNILPKLLENDDSHAIDTMVALIRSVLQMRNSNAATGEDYINSPVRDLNGVCFDSRFQNPEWPMDADANGAYHIALKGQLLLNHLKESKDLKLQNGISNQDWLAYIQELRNGSSGSSGSSGSSGSSGTQFEGFTNLYQVSKTLRFELIPQGKTLKHIQEQGFIEEDKARNDHYKELKPIIDRIYKTYADQCLQLVQLDWENLSAAIDSYRKEKTEETRNALIEEQATYRNAIHDYFIGRTDNLTDAINKRHAEIYKGLFKAELFNGKVLKQLGTVTTTEHENALLRSFDKFTTYFSGFYRNRKNVFSAEDISTAIPHRIVQDNFPKFKENCHIFTRLITAVPSLREHFENVKKAIGIFVSTSIEEVFSFPFYNQLLTQTQIDLYNQLLGGISREAGTEKIKGLNEVLNLAIQKNDETAHIIASLPHRFIPLFKQILSDRNTLSFILEEFKSDEEVIQSFCKYKTLLRNENVLETAEALFNELNSIDLTHIFISHKKLETISSALCDHWDTLRNALYERRISELTGKITKSAKEKVQRSLKHEDINLQEIISAAGKELSEAFKQKTSEILSHAHAALDQPLPTTLKKQEEKEILKSQLDSLLGLYHLLDWFAVDESNEVDPEFSARLTGIKLEMEPSLSFYNKARNYATKKPYSV

SEQ ID NO: 307 - protein, 1316 aa, synthetic construct
TLKKQEEKEILKSQLDSLLGLYHLLDWFAVDESNEVDPEFSARLTGIKLEMEPSLSFYNKARNYATKKPYSVEKFKLNFQMPTLARGWDVNREKNNGAILFVKNGLYYLGIMPKQKGRYKALSFEPTEKTSEGFDKMYYDYFPDAAKMIPKCSTQLKAVTAHFQTHTTPILLSNNFIEPLEITKEIYDLNNPEKEPKKFQTAYAKKTGDQKGYREALCKWIDFTRDFLSKYTKTTSIDLSSLRPSSQYKDLGEYYAELNPLLYHISFQRIAEKEIMDAVETGKLYLFQIYNKDFAKGHHGKPNLHTLYWTGLFSPENLAKTSIKLNGQAELFYRPKSRMKRMAHRLGEKMLNKKLKDQKTPIPDTLYQELYDYVNHRLSHDLSDEARALLPNVITKEVSHEIIKDRRFTSDKFFFHVPITLNYQAANSPSKFNQRVNAYLKEHPETPIIGIDRGERNLIYITVIDSTGKILEQRSLNTIQQFDYQKKLDNREKERVAARQAWSVVGTIKDLKQGYLSQVIHEIVDLMIHYQAVVVLENLNFGFKSKRTGIAEKAVYQQFEKMLIDKLNCLVLKDYPAEKVGGVLNPYQLTDQFTSFAKMGTQSGFLFYVPAPYTSKIDPLTGFVDPFVWKTIKNHESRKHFLEGFDFLHYDVKTGDFILHFKMNRNLSFQRGLPGFMPAWDIVFEKNETQFDAKGTPFIAGKRIVPVIENHRFTGRYRDLYPANELIALLEEKGIVFRDGSNILPKLLENDDSHAIDTMVALIRSVLQMRNSNAATGEDYINSPVRDLNGVCFDSRFQNPEWPMDADANGAYHIALKGQLLLNHLKESKDLKLQNGISNQDWLAYIQELRNGSSGSSGSSGTQFEGFTNLYQVSKTLRFELIPQGKTLKHIQEQGFIEEDKARNDHYKELKPIIDRIYKTYADQCLQLVQLDWENLSAAIDSYRKEKTEETRNALIEEQATYRNAIHDYFIGRTDNLTDAINKRHAEIYKGLFKAELFNGKVLKQLGTVTTTEHENALLRSFDKFTTYFSGFYRNRKNVFSAEDISTAIPHRIVQDNFPKFKENCHIFTRLITAVPSLREHFENVKKAIGIFVSTSIEEVFSFPFYNQLLTQTQIDLYNQLLGGISREAGTEKIKGLNEVLNLAIQKNDETAHIIASLPHRFIPLFKQILSDRNTLSFILEEFKSDEEVIQSFCKYKTLLRNENVLETAEALFNELNSIDLTHIFISHKKLETISSALCDHWDTLRNALYERRISELTGKITKSAKEKVQRSLKHEDINLQEIISAAGKELSEAFKQKTSEILSHAHAALDQPLPT

SEQ ID NO: 308 - protein, 1322 aa, synthetic construct
TLKKQEEKEILKSQLDSLLGLYHLLDWFAVDESNEVDPEFSARLTGIKLEMEPSLSFYNKARNYATKKPYSVEKFKLNFQMPTLARGWDVNREKNNGAILFVKNGLYYLGIMPKQKGRYKALSFEPTEKTSEGFDKMYYDYFPDAAKMIPKCSTQLKAVTAHFQTHTTPILLSNNFIEPLEITKEIYDLNNPEKEPKKFQTAYAKKTGDQKGYREALCKWIDFTRDFLSKYTKTTSIDLSSLRPSSQYKDLGEYYAELNPLLYHISFQRIAEKEIMDAVETGKLYLFQIYNKDFAKGHHGKPNLHTLYWTGLFSPENLAKTSIKLNGQAELFYRPKSRMKRMAHRLGEKMLNKKLKDQKTPIPDTLYQELYDYVNHRLSHDLSDEARALLPNVITKEVSHEIIKDRRFTSDKFFFHVPITLNYQAANSPSKFNQRVNAYLKEHPETPIIGIDRGERNLIYITVIDSTGKILEQRSLNTIQQFDYQKKLDNREKERVAARQAWSVVGTIKDLKQGYLSQVIHEIVDLMIHYQAVVVLENLNFGFKSKRTGIAEKAVYQQFEKMLIDKLNCLVLKDYPAEKVGGVLNPYQLTDQFTSFAKMGTQSGFLFYVPAPYTSKIDPLTGFVDPFVWKTIKNHESRKHFLEGFDFLHYDVKTGDFILHFKMNRNLSFQRGLPGFMPAWDIVFEKNETQFDAKGTPFIAGKRIVPVIENHRFTGRYRDLYPANELIALLEEKGIVFRDGSNILPKLLENDDSHAIDTMVALIRSVLQMRNSNAATGEDYINSPVRDLNGVCFDSRFQNPEWPMDADANGAYHIALKGQLLLNHLKESKDLKLQNGISNQDWLAYIQELRNGSSGSSGSSGSSGSSGTQFEGFTNLYQVSKTLRFELIPQGKTLKHIQEQGFIEEDKARNDHYKELKPIIDRIYKTYADQCLQLVQLDWENLSAAIDSYRKEKTEETRNALIEEQATYRNAIHDYFIGRTDNLTDAINKRHAEIYKGLFKAELFNGKVLKQLGTVTTTEHENALLRSFDKFTTYFSGFYRNRKNVFSAEDISTAIPHRIVQDNFPKFKENCHIFTRLITAVPSLREHFENVKKAIGIFVSTSIEEVFSFPFYNQLLTQTQIDLYNQLLGGISREAGTEKIKGLNEVLNLAIQKNDETAHIIASLPHRFIPLFKQILSDRNTLSFILEEFKSDEEVIQSFCKYKTLLRNENVLETAEALFNELNSIDLTHIFISHKKLETISSALCDHWDTLRNALYERRISELTGKITKSAKEKVQRSLKHEDINLQEIISAAGKELSEAFKQKTSEILSHAHAALDQPLPT

SEQ ID NO: 309 - protein, 1316 aa, synthetic construct
DSHAIDTMVALIRSVLQMRNSNAATGEDYINSPVRDLNGVCFDSRFQNPEWPMDADANGAYHIALKGQLLLNHLKESKDLKLQNGISNQDWLAYIQELRNGSSGSSGSSGTQFEGFTNLYQVSKTLRFELIPQGKTLKHIQEQGFIEEDKARNDHYKELKPIIDRIYKTYADQCLQLVQLDWENLSAAIDSYRKEKTEETRNALIEEQATYRNAIHDYFIGRTDNLTDAINKRHAEIYKGLFKAELFNGKVLKQLGTVTTTEHENALLRSFDKFTTYFSGFYRNRKNVFSAEDISTAIPHRIVQDNFPKFKENCHIFTRLITAVPSLREHFENVKKAIGIFVSTSIEEVFSFPFYNQLLTQTQIDLYNQLLGGISREAGTEKIKGLNEVLNLAIQKNDETAHIIASLPHRFIPLFKQILSDRNTLSFILEEFKSDEEVIQSFCKYKTLLRNENVLETAEALFNELNSIDLTHIFISHKKLETISSALCDHWDTLRNALYERRISELTGKITKSAKEKVQRSLKHEDINLQEIISAAGKELSEAFKQKTSEILSHAHAALDQPLPTTLKKQEEKEILKSQLDSLLGLYHLLDWFAVDESNEVDPEFSARLTGIKLEMEPSLSFYNKARNYATKKPYSVEKFKLNFQMPTLARGWDVNREKNNGAILFVKNGLYYLGIMPKQKGRYKALSFEPTEKTSEGFDKMYYDYFPDAAKMIPKCSTQLKAVTAHFQTHTTPILLSNNFIEPLEITKEIYDLNNPEKEPKKFQTAYAKKTGDQKGYREALCKWIDFTRDFLSKYTKTTSIDLSSLRPSSQYKDLGEYYAELNPLLYHISFQRIAEKEIMDAVETGKLYLFQIYNKDFAKGHHGKPNLHTLYWTGLFSPENLAKTSIKLNGQAELFYRPKSRMKRMAHRLGEKMLNKKLKDQKTPIPDTLYQELYDYVNHRLSHDLSDEARALLPNVITKEVSHEIIKDRRFTSDKFFFHVPITLNYQAANSPSKFNQRVNAYLKEHPETPIIGIDRGERNLIYITVIDSTGKILEQRSLNTIQQFDYQKKLDNREKERVAARQAWSVVGTIKDLKQGYLSQVIHEIVDLMIHYQAVVVLENLNFGFKSKRTGIAEKAVYQQFEKMLIDKLNCLVLKDYPAEKVGGVLNPYQLTDQFTSFAKMGTQSGFLFYVPAPYTSKIDPLTGFVDPFVWKTIKNHESRKHFLEGFDFLHYDVKTGDFILHFKMNRNLSFQRGLPGFMPAWDIVFEKNETQFDAKGTPFIAGKRIVPVIENHRFTGRYRDLYPANELIALLEEKGIVFRDGSNILPKLLEND

SEQ ID NO: 310 - protein, 1322 aa, synthetic construct
DSHAIDTMVALIRSVLQMRNSNAATGEDYINSPVRDLNGVCFDSRFQNPEWPMDADANGAYHIALKGQLLLNHLKESKDLKLQNGISNQDWLAYIQELRNGSSGSSGSSGSSGSSGTQFEGFTNLYQVSKTLRFELIPQGKTLKHIQEQGFIEEDKARNDHYKELKPIIDRIYKTYADQCLQLVQLDWENLSAAIDSYRKEKTEETRNALIEEQATYRNAIHDYFIGRTDNLTDAINKRHAEIYKGLFKAELFNGKVLKQLGTVTTTEHENALLRSFDKFTTYFSGFYRNRKNVFSAEDISTAIPHRIVQDNFPKFKENCHIFTRLITAVPSLREHFENVKKAIGIFVSTSIEEVFSFPFYNQLLTQTQIDLYNQLLGGISREAGTEKIKGLNEVLNLAIQKNDETAHIIASLPHRFIPLFKQILSDRNTLSFILEEFKSDEEVIQSFCKYKTLLRNENVLETAEALFNELNSIDLTHIFISHKKLETISSALCDHWDTLRNALYERRISELTGKITKSAKEKVQRSLKHEDINLQEIISAAGKELSEAFKQKTSEILSHAHAALDQPLPTTLKKQEEKEILKSQLDSLLGLYHLLDWFAVDESNEVDPEFSARLTGIKLEMEPSLSFYNKARNYATKKPYSVEKFKLNFQMPTLARGWDVNREKNNGAILFVKNGLYYLGIMPKQKGRYKALSFEPTEKTSEGFDKMYYDYFPDAAKMIPKCSTQLKAVTAHFQTHTTPILLSNNFIEPLEITKEIYDLNNPEKEPKKFQTAYAKKTGDQKGYREALCKWIDFTRDFLSKYTKTTSIDLSSLRPSSQYKDLGEYYAELNPLLYHISFQRIAEKEIMDAVETGKLYLFQIYNKDFAKGHHGKPNLHTLYWTGLFSPENLAKTSIKLNGQAELFYRPKSRMKRMAHRLGEKMLNKKLKDQKTPIPDTLYQELYDYVNHRLSHDLSDEARALLPNVITKEVSHEIIKDRRFTSDKFFFHVPITLNYQAANSPSKFNQRVNAYLKEHPETPIIGIDRGERNLIYITVIDSTGKILEQRSLNTIQQFDYQKKLDNREKERVAARQAWSVVGTIKDLKQGYLSQVIHEIVDLMIHYQAVVVLENLNFGFKSKRTGIAEKAVYQQFEKMLIDKLNCLVLKDYPAEKVGGVLNPYQLTDQFTSFAKMGTQSGFLFYVPAPYTSKIDPLTGFVDPFVWKTIKNHESRKHFLEGFDFLHYDVKTGDFILHFKMNRNLSFQRGLPGFMPAWDIVFEKNETQFDAKGTPFIAGKRIVPVIENHRFTGRYRDLYPANELIALLEEKGIVFRDGSNILPKLLEND

SEQ ID NO: 311 - DNA, 30 bp, synthetic construct
  source 1..30: mol_type = other DNA
ggctcctctggcagctccggctctagcggc

SEQ ID NO: 312 - DNA, 48 bp, synthetic construct
  source 1..48: mol_type = other DNA
ggctcctctggcagctccggctctagcggctcctctggcagctccggc

SEQ ID NO: 313 - protein, 10 aa, synthetic construct
GSSGSSGSSG

SEQ ID NO: 314 - protein, 16 aa, synthetic construct
GSSGSSGSSGSSGSSG

SEQ ID NO: 315-326 - skipped (12 entries)

SEQ ID NO: 327 - DNA, 3948 bp, synthetic construct
  source 1..3948: mol_type = other DNA
acagaggaaaccagaaacgctcttattgaggaacaagctacttacaggaatgcaattcacgattatttcattggaagaaccgataacttgactgatgctattaataagagacatgcagaaatctataagggtctttttaaggctgagctttttaacggaaaggtgttgaagcagcttggtacagttactacaaccgagcacgaaaacgcacttttgaggtcttttgataagttcactacatacttctcaggattctacagaaacaggaagaatgtgttctctgctgaggatatttcaaccgcaatcccacatagaatcgttcaagataacttccctaagttcaaggaaaactgccacatttttacaaggcttatcaccgctgtgccatctttgagagaacatttcgaaaacgttaagaaggcaatcggtatctttgtgtctacttcaatcgaggaagttttctcttttcctttctacaaccaacttttgacccaaactcagattgatctttacaaccagcttttgggaggtatttcaagggaggctggaaccgaaaagattaagggtttgaacgaggttttgaatcttgcaatccaaaagaatgatgaaactgctcatattattgcatcacttccacacaggtttattcctcttttcaagcagattttgtctgatagaaacactctttcttttattcttgaggagtttaagtctgatgaggaagtgattcaatcattttgcaagtataagacacttttgagaaacgagaatgttcttgagactgctgaagcattgttcaacgaacttaattctattgatttgacccatattttcatttcacacaagaagttggagactatttcttctgctttgtgcgatcactgggatacattgaggaatgcactttacgagagaaggatttctgaattgactggaaagattacaaagtctgctaaggaaaaggttcaaagatcacttaagcatgaggatattaacttgcaggaaattatttctgctgcaggaaaggagctttcagaggcttttaagcaaaagacttctgagattttgtcacatgcacacgctgcattggatcagccacttcctaccactttgaagaagcaagaggaaaaggaaattcttaagtctcagttggattcacttttgggactttatcatcttttggattggttcgctgtggatgagtctaacgaggttgatccagagttttcagcaaggcttacaggtattaagttggagatggaaccttctttgtcattttacaacaaggctagaaactacgcaacaaagaagccatattctgtggagaagtttaagttgaacttccaaatgcctaccttggctaggggatgggatgtgaatagagaaaagaacaatggtgcaatccttttcgttaagaacggattgtactaccttggtattatgccaaagcagaagggaagatacaaggctttgtcttttgagcctactgaaaagacatcagaaggtttcgataagatgtactacgattacttcccagatgctgcaaagatgattcctaagtgttctactcaacttaaggctgttactgcacatttccagacacacacaaccccaatccttttgtcaaacaatttcatcgagcctcttgaaatcacaaaggaaatctatgatttgaacaatccagagaaggaacctaagaagttccaaaccgcttatgctaagaaaactggagatcagaagggttatagggaagctctttgcaagtggattgattttaccagagatttcttgtctaagtacactaagactacatcaattgatctttcttctcttagaccatcttctcaatacaaggatcttggagagtattacgctgaattgaaccctcttttgtaccacatttcttttcaaagaatcgctgagaaggaaattatggatgcagtggagactggaaagttgtatctttttcaaatctataacaaggatttcgcaaagggacatcatggaaagccaaatttgcataccctttactggactggacttttctctcctgagaacttggctaagacatctattaagttgaatggtcaggcagaattgttttataggccaaagtctaggatgaagaggatggctcatagacttggagaaaagatgcttaacaagaagttgaaggatcaaaagaccccaattcctgatactctttaccaggagttgtatgattacgttaatcataggctttctcacgatttgtcagatgaagctagagcacttttgcctaacgtgatcacaaaggaagtttctcacgaaattattaaggatagaaggttcacctctgataagtttttctttcatgtgccaatcactttgaactaccaagctgcaaattctccttcaaagtttaaccagagggttaatgcttatcttaaggagcatccagaaacccctattattggaattgatagaggtgagaggaacttgatctatatcacagtgattgattctaccggaaagattcttgagcaaagatcattgaataccattcaacagttcgattatcaaaagaagttggataacagagagaaggaaagggttgctgctagacaagcatggtctgttgtgggaactattaaggatcttaagcagggttacttgtcacaagtgattcatgagattgttgatttgatgattcactatcaggcagttgtggttttggaaaaccttaatttcggattcaagtctaagaggactggtattgctgagaaggcagtgtaccaacagttcgaaaagatgcttatcgataagttgaactgtttggttcttaaggattacccagctgagaaagtgggaggtgttcttaacccttatcagttgacagatcaattcacttcttttgctaagatgggaacacaatcaggttttcttttctatgttccagcaccttacacatctaagattgatccattgaccggatttgttgatccattcgtttggaaaactattaagaaccatgagtcaagaaagcacttccttgaaggatttgatttcttgcattacgatgttaagactggagatttcatcttgcacttcaagatgaacaggaatctttcttttcaaagaggattgccaggtttcatgcctgcttgggatattgtttttgagaagaacgaaactcagttcgatgctaagggaacaccattcattgcaggaaagagaattgtgcctgttattgagaatcacagattcactggtagatatagggatctttacccagctaacgaattgattgcacttttggaggaaaagggaattgtttttagggatggttctaacattcttcctaagttgcttgagaatgatgattcacatgctattgatactatggtggcacttattaggtctgttttgcaaatgagaaactcaaatgctgcaacaggagaggattacattaactctccagtgagggatttgaatggtgtttgctttgattcaagattccaaaacccagaatggcctatggatgctgatgcaaacggagcttatcatattgcacttaagggtcagcttttgcttaatcacttgaaggagtctaaggatttgaagttgcagaacggtatttcaaatcaagattggcttgcttacattcaggaattgagaaacggctcctctggcagctccggctctagcggcactcagtttgagggattcacaaatctttaccaagtgtctaagactttgaggttcgagcttattccacaaggaaagacattgaagcacattcaagaacagggttttattgaggaagataaggctaggaatgatcattataaggaacttaagcctattattgatagaatctataagacctacgcagatcaatgtttgcagcttgttcaacttgattgggagaacttgtctgctgcaattgattcatacaggaaggaaaag

SEQ ID NO: 328 - DNA, 3966 bp, synthetic construct
  source 1..3966: mol_type = other DNA
acagaggaaaccagaaacgctcttattgaggaacaagctacttacaggaatgcaattcacgattatttcattggaagaaccgataacttgactgatgctattaataagagacatgcagaaatctataagggtctttttaaggctgagctttttaacggaaaggtgttgaagcagcttggtacagttactacaaccgagcacgaaaacgcacttttgaggtcttttgataagttcactacatacttctcaggattctacagaaacaggaagaatgtgttctctgctgaggatatttcaaccgcaatcccacatagaatcgttcaagataacttccctaagttcaaggaaaactgccacatttttacaaggcttatcaccgctgtgccatctttgagagaacatttcgaaaacgttaagaaggcaatcggtatctttgtgtctacttcaatcgaggaagttttctcttttcctttctacaaccaacttttgacccaaactcagattgatctttacaaccagcttttgggaggtatttcaagggaggctggaaccgaaaagattaagggtttgaacgaggttttgaatcttgcaatccaaaagaatgatgaaactgctcatattattgcatcacttccacacaggtttattcctcttttcaagcagattttgtctgatagaaacactctttcttttattcttgaggagtttaagtctgatgaggaagtgattcaatcattttgcaagtataagacacttttgagaaacgagaatgttcttgagactgctgaagcattgttcaacgaacttaattctattgatttgacccatattttcatttcacacaagaagttggagactatttcttctgctttgtgcgatcactgggatacattgaggaatgcactttacgagagaaggatttctgaattgactggaaagattacaaagtctgctaaggaaaaggttcaaagatcacttaagcatgaggatattaacttgcaggaaattatttctgctgcaggaaaggagctttcagaggcttttaagcaaaagacttctgagattttgtcacatgcacacgctgcattggatcagccacttcctaccactttgaagaagcaagaggaaaaggaaattcttaagtctcagttggattcacttttgggactttatcatcttttggattggttcgctgtggatgagtctaacgaggttgatccagagttttcagcaaggcttacaggtattaagttggagatggaaccttctttgtcattttacaacaaggctagaaactacgcaacaaagaagccatattctgtggagaagtttaagttgaacttccaaatgcctaccttggctaggggatgggatgtgaatagagaaaagaacaatggtgcaatccttttcgttaagaacggattgtactaccttggtattatgccaaagcagaagggaagatacaaggctttgtcttttgagcctactgaaaagacatcagaaggtttcgataagatgtactacgattacttcccagatgctgcaaagatgattcctaagtgttctactcaacttaaggctgttactgcacatttccagacacacacaaccccaatccttttgtcaaacaatttcatcgagcctcttgaaatcacaaaggaaatctatgatttgaacaatccagagaaggaacctaagaagttccaaaccgcttatgctaagaaaactggagatcagaagggttatagggaagctctttgcaagtggattgattttaccagagatttcttgtctaagtacactaagactacatcaattgatctttcttctcttagaccatcttctcaatacaaggatcttggagagtattacgctgaattgaaccctcttttgtaccacatttcttttcaaagaatcgctgagaaggaaattatggatgcagtggagactggaaagttgtatctttttcaaatctataacaaggatttcgcaaagggacatcatggaaagccaaatttgcataccctttactggactggacttttctctcctgagaacttggctaagacatctattaagttgaatggtcaggcagaattgttttataggccaaagtctaggatgaagaggatggctcatagacttggagaaaagatgcttaacaagaagttgaaggatcaaaagaccccaattcctgatactctttaccaggagttgtatgattacgttaatcataggctttctcacgatttgtcagatgaagctagagcacttttgcctaacgtgatcacaaaggaagtttctcacgaaattattaaggatagaaggttcacctctgataagtttttctttcatgtgccaatcactttgaactaccaagctgcaaattctccttcaaagtttaaccagagggttaatgcttatcttaaggagcatccagaaacccctattattggaattgatagaggtgagaggaacttgatctatatcacagtgattgattctaccggaaagattcttgagcaaagatcattgaataccattcaacagttcgattatcaaaagaagttggataacagagagaaggaaagggttgctgctagacaagcatggtctgttgtgggaactattaaggatcttaagcagggttacttgtcacaagtgattcatgagattgttgatttgatgattcactatcaggcagttgtggttttggaaaaccttaatttcggattcaagtctaagaggactggtattgctgagaaggcagtgtaccaacagttcgaaaagatgcttatcgataagttgaactgtttggttcttaaggattacccagctgagaaagtgggaggtgttcttaacccttatcagttgacagatcaattcacttcttttgctaagatgggaacacaatcaggttttcttttctatgttccagcaccttacacatctaagattgatccattgaccggatttgttgatccattcgtttggaaaactattaagaaccatgagtcaagaaagcacttccttgaaggatttgatttcttgcattacgatgttaagactggagatttcatcttgcacttcaagatgaacaggaatctttcttttcaaagaggattgccaggtttcatgcctgcttgggatattgtttttgagaagaacgaaactcagttcgatgctaagggaacaccattcattgcaggaaagagaattgtgcctgttattgagaatcacagattcactggtagatatagggatctttacccagctaacgaattgattgcacttttggaggaaaagggaattgtttttagggatggttctaacattcttcctaagttgcttgagaatgatgattcacatgctattgatactatggtggcacttattaggtctgttttgcaaatgagaaactcaaatgctgcaacaggagaggattacattaactctccagtgagggatttgaatggtgtttgctttgattcaagattccaaaacccagaatggcctatggatgctgatgcaaacggagcttatcatattgcacttaagggtcagcttttgcttaatcacttgaaggagtctaaggatttgaagttgcagaacggtatttcaaatcaagattggcttgcttacattcaggaattgagaaacggctcctctggcagctccggctctagcggctcctctggcagctccggcactcagtttgagggattcacaaatctttaccaagtgtctaagactttgaggttcgagcttattccacaaggaaagacattgaagcacattcaagaacagggttttattgaggaagataaggctaggaatgatcattataaggaacttaagcctattattgatagaatctataagacctacgcagatcaatgtttgcagcttgttcaacttgattgggagaacttgtctgctgcaattgattcatacaggaaggaaaag

SEQ ID NO: 329 - DNA, 3948 bp, synthetic construct
  source 1..3948: mol_type = other DNA
gagtttaagtctgatgaggaagtgattcaatcattttgcaagtataagacacttttgagaaacgagaatgttcttgagactgctgaagcattgttcaacgaacttaattctattgatttgacccatattttcatttcacacaagaagttggagactatttcttctgctttgtgcgatcactgggatacattgaggaatgcactttacgagagaaggatttctgaattgactggaaagattacaaagtctgctaaggaaaaggttcaaagatcacttaagcatgaggatattaacttgcaggaaattatttctgctgcaggaaaggagctttcagaggcttttaagcaaaagacttctgagattttgtcacatgcacacgctgcattggatcagccacttcctaccactttgaagaagcaagaggaaaaggaaattcttaagtctcagttggattcacttttgggactttatcatcttttggattggttcgctgtggatgagtctaacgaggttgatccagagttttcagcaaggcttacaggtattaagttggagatggaaccttctttgtcattttacaacaaggctagaaactacgcaacaaagaagccatattctgtggagaagtttaagttgaacttccaaatgcctaccttggctaggggatgggatgtgaatagagaaaagaacaatggtgcaatccttttcgttaagaacggattgtactaccttggtattatgccaaagcagaagggaagatacaaggctttgtcttttgagcctactgaaaagacatcagaaggtttcgataagatgtactacgattacttcccagatgctgcaaagatgattcctaagtgttctactcaacttaaggctgttactgcacatttccagacacacacaaccccaatccttttgtcaaacaatttcatcgagcctcttgaaatcacaaaggaaatctatgatttgaacaatccagagaaggaacctaagaagttccaaaccgcttatgctaagaaaactggagatcagaagggttatagggaagctctttgcaagtggattgattttaccagagatttcttgtctaagtacactaagactacatcaattgatctttcttctcttagaccatcttctcaatacaaggatcttggagagtattacgctgaattgaaccctcttttgtaccacatttcttttcaaagaatcgctgagaaggaaattatggatgcagtggagactggaaagttgtatctttttcaaatctataacaaggatttcgcaaagggacatcatggaaagccaaatttgcataccctttactggactggacttttctctcctgagaacttggctaagacatctattaagttgaatggtcaggcagaattgttttataggccaaagtctaggatgaagaggatggctcatagacttggagaaaagatgcttaacaagaagttgaaggatcaaaagaccccaattcctgatactctttaccaggagttgtatgattacgttaatcataggctttctcacgatttgtcagatgaagctagagcacttttgcctaacgtgatcacaaaggaagtttctcacgaaattattaaggatagaaggttcacctctgataagtttttctttcatgtgccaatcactttgaactaccaagctgcaaattctccttcaaagtttaaccagagggttaatgcttatcttaaggagcatccagaaacccctattattggaattgatagaggtgagaggaacttgatctatatcacagtgattgattctaccggaaagattcttgagcaaagatcattgaataccattcaacagttcgattatcaaaagaagttggataacagagagaaggaaagggttgctgctagacaagcatggtctgttgtgggaactattaaggatcttaagcagggttacttgtcacaagtgattcatgagattgttgatttgatgattcactatcaggcagttgtggttttggaaaaccttaatttcggattcaagtctaagaggactggtattgctgagaaggcagtgtaccaacagttcgaaaagatgcttatcgataagttgaactgtttggttcttaaggattacccagctgagaaagtgggaggtgttcttaacccttatcagttgacagatcaattcacttcttttgctaagatgggaacacaatcaggttttcttttctatgttccagcaccttacacatctaagattgatccattgaccggatttgttgatccattcgtttggaaaactattaagaaccatgagtcaagaaagcacttccttgaaggatttgatttcttgcattacgatgttaagactggagatttcatcttgcacttcaagatgaacaggaatctttcttttcaaagaggattgccaggtttcatgcctgcttgggatattgtttttgagaagaacgaaactcagttcgatgctaagggaacaccattcattgcaggaaagagaattgtgcctgttattgagaatcacagattcactggtagatatagggatctttacccagctaacgaattgattgcacttttggaggaaaagggaattgtttttagggatggttctaacattcttcctaagttgcttgagaatgatgattcacatgctattgatactatggtggcacttattaggtctgttttgcaaatgagaaactcaaatgctgcaacaggagaggattacattaactctccagtgagggatttgaatggtgtttgctttgattcaagattccaaaacccagaatggcctatggatgctgatgcaaacggagcttatcatattgcacttaagggtcagcttttgcttaatcacttgaaggagtctaaggatttgaagttgcagaacggtatttcaaatcaagattggcttgcttacattcaggaattgagaaacggctcctctggcagctccggctctagcggcactcagtttgagggattcacaaatctttaccaagtgtctaagactttgaggttcgagcttattccacaaggaaagacattgaagcacattcaagaacagggttttattgaggaagataaggctaggaatgatcattataaggaacttaagcctattattgatagaatctataagacctacgcagatcaatgtttgcagcttgttcaacttgattgggagaacttgtctgctgcaattgattcatacaggaaggaaaagacagaggaaaccagaaacgctcttattgaggaacaagctacttacaggaatgcaattcacgattatttcattggaagaaccgataacttgactgatgctattaataagagacatgcagaaatctataagggtctttttaaggctgagctttttaacggaaaggtgttgaagcagcttggtacagttactacaaccgagcacgaaaacgcacttttgaggtcttttgataagttcactacatacttctcaggattctacagaaacaggaagaatgtgttctctgctgaggatatttcaaccgcaatcccacatagaatcgttcaagataacttccctaagttcaaggaaaactgccacatttttacaaggcttatcaccgctgtgccatctttgagagaacatttcgaaaacgttaagaaggcaatcggtatctttgtgtctacttcaatcgaggaagttttctcttttcctttctacaaccaacttttgacccaaactcagattgatctttacaaccagcttttgggaggtatttcaagggaggctggaaccgaaaagattaagggtttgaacgaggttttgaatcttgcaatccaaaagaatgatgaaactgctcatattattgcatcacttccacacaggtttattcctcttttcaagcagattttgtctgatagaaacactctttcttttattcttgag

SEQ ID NO: 330 - DNA, 3966 bp, synthetic construct
  source 1..3966: mol_type = other DNA
gagtttaagtctgatgaggaagtgattcaatcattttgcaagtataagacacttttgagaaacgagaatgttcttgagactgctgaagcattgttcaacgaacttaattctattgatttgacccatattttcatttcacacaagaagttggagactatttcttctgctttgtgcgatcactgggatacattgaggaatgcactttacgagagaaggatttctgaattgactggaaagattacaaagtctgctaaggaaaaggttcaaagatcacttaagcatgaggatattaacttgcaggaaattatttctgctgcaggaaaggagctttcagaggcttttaagcaaaagacttctgagattttgtcacatgcacacgctgcattggatcagccacttcctaccactttgaagaagcaagaggaaaaggaaattcttaagtctcagttggattcacttttgggactttatcatcttttggattggttcgctgtggatgagtctaacgaggttgatccagagttttcagcaaggcttacaggtattaagttggagatggaaccttctttgtcattttacaacaaggctagaaactacgcaacaaagaagccatattctgtggagaagtttaagttgaacttccaaatgcctaccttggctaggggatgggatgtgaatagagaaaagaacaatggtgcaatccttttcgttaagaacggattgtactaccttggtattatgccaaagcagaagggaagatacaaggctttgtcttttgagcctactgaaaagacatcagaaggtttcgataagatgtactacgattacttcccagatgctgcaaagatgattcctaagtgttctactcaacttaaggctgttactgcacatttccagacacacacaaccccaatccttttgtcaaacaatttcatcgagcctcttgaaatcacaaaggaaatctatgatttgaacaatccagagaaggaacctaagaagttccaaaccgcttatgctaagaaaactggagatcagaagggttatagggaagctctttgcaagtggattgattttaccagagatttcttgtctaagtacactaagactacatcaattgatctttcttctcttagaccatcttctcaatacaaggatcttggagagtattacgctgaattgaaccctcttttgtaccacatttcttttcaaagaatcgctgagaaggaaattatggatgcagtggagactggaaagttgtatctttttcaaatctataacaaggatttcgcaaagggacatcatggaaagccaaatttgcataccctttactggactggacttttctctcctgagaacttggctaagacatctattaagttgaatggtcaggcagaattgttttataggccaaagtctaggatgaagaggatggctcatagacttggagaaaagatgcttaacaagaagttgaaggatcaaaagaccccaattcctgatactctttaccaggagttgtatgattacgttaatcataggctttctcacgatttgtcagatgaagctagagcacttttgcctaacgtgatcacaaaggaagtttctcacgaaattattaaggatagaaggttcacctctgataagtttttctttcatgtgccaatcactttgaactaccaagctgcaaattctccttcaaagtttaaccagagggttaatgcttatcttaaggagcatccagaaacccctattattggaattgatagaggtgagaggaacttgatctatatcacagtgattgattctaccggaaagattcttgagcaaagatcattgaataccattcaacagttcgattatcaaaagaagttggataacagagagaaggaaagggttgctgctagacaagcatggtctgttgtgggaactattaaggatcttaagcagggttacttgtcacaagtgattcatgagattgttgatttgatgattcactatcaggcagttgtggttttggaaaaccttaatttcggattcaagtctaagaggactggtattgctgagaaggcagtgtaccaacagttcgaaaagatgcttatcgataagttgaactgtttggttcttaaggattacccagctgagaaagtgggaggtgttcttaacccttatcagttgacagatcaattcacttcttttgctaagatgggaacacaatcaggttttcttttctatgttccagcaccttacacatctaagattgatccattgaccggatttgttgatccattcgtttggaaaactattaagaaccatgagtcaagaaagcacttccttgaaggatttgatttcttgcattacgatgttaagactggagatttcatcttgcacttcaagatgaacaggaatctttcttttcaaagaggattgccaggtttcatgcctgcttgggatattgtttttgagaagaacgaaactcagttcgatgctaagggaacaccattcattgcaggaaagagaattgtgcctgttattgagaatcacagattcactggtagatatagggatctttacccagctaacgaattgattgcacttttggaggaaaagggaattgtttttagggatggttctaacattcttcctaagttgcttgagaatgatgattcacatgctattgatactatggtggcacttattaggtctgttttgcaaatgagaaactcaaatgctgcaacaggagaggattacattaactctccagtgagggatttgaatggtgtttgctttgattcaagattccaaaacccagaatggcctatggatgctgatgcaaacggagcttatcatattgcacttaagggtcagcttttgcttaatcacttgaaggagtctaaggatttgaagttgcagaacggtatttcaaatcaagattggcttgcttacattcaggaattgagaaacggctcctctggcagctccggctctagcggctcctctggcagctccggcactcagtttgagggattcacaaatctttaccaagtgtctaagactttgaggttcgagcttattccacaaggaaagacattgaagcacattcaagaacagggttttattgaggaagataaggctaggaatgatcattataaggaacttaagcctattattgatagaatctataagacctacgcagatcaatgtttgcagcttgttcaacttgattgggagaacttgtctgctgcaattgattcatacaggaaggaaaagacagaggaaaccagaaacgctcttattgaggaacaagctacttacaggaatgcaattcacgattatttcattggaagaaccgataacttgactgatgctattaataagagacatgcagaaatctataagggtctttttaaggctgagctttttaacggaaaggtgttgaagcagcttggtacagttactacaaccgagcacgaaaacgcacttttgaggtcttttgataagttcactacatacttctcaggattctacagaaacaggaagaatgtgttctctgctgaggatatttcaaccgcaatcccacatagaatcgttcaagataacttccctaagttcaaggaaaactgccacatttttacaaggcttatcaccgctgtgccatctttgagagaacatttcgaaaacgttaagaaggcaatcggtatctttgtgtctacttcaatcgaggaagttttctcttttcctttctacaaccaacttttgacccaaactcagattgatctttacaaccagcttttgggaggtatttcaagggaggctggaaccgaaaagattaagggtttgaacgaggttttgaatcttgcaatccaaaagaatgatgaaactgctcatattattgcatcacttccacacaggtttattcctcttttcaagcagattttgtctgatagaaacactctttcttttattcttgag

SEQ ID NO: 331 - DNA, 3948 bp, synthetic construct
  source 1..3948: mol_type = other DNA
aatggtgtttgctttgattcaagattccaaaacccagaatggcctatggatgctgatgcaaacggagcttatcatattgcacttaagggtcagcttttgcttaatcacttgaaggagtctaaggatttgaagttgcagaacggtatttcaaatcaagattggcttgcttacattcaggaattgagaaacggctcctctggcagctccggctctagcggcactcagtttgagggattcacaaatctttaccaagtgtctaagactttgaggttcgagcttattccacaaggaaagacattgaagcacattcaagaacagggttttattgaggaagataaggctaggaatgatcattataaggaacttaagcctattattgatagaatctataagacctacgcagatcaatgtttgcagcttgttcaacttgattgggagaacttgtctgctgcaattgattcatacaggaaggaaaagacagaggaaaccagaaacgctcttattgaggaacaagctacttacaggaatgcaattcacgattatttcattggaagaaccgataacttgactgatgctattaataagagacatgcagaaatctataagggtctttttaaggctgagctttttaacggaaaggtgttgaagcagcttggtacagttactacaaccgagcacgaaaacgcacttttgaggtcttttgataagttcactacatacttctcaggattctacagaaacaggaagaatgtgttctctgctgaggatatttcaaccgcaatcccacatagaatcgttcaagataacttccctaagttcaaggaaaactgccacatttttacaaggcttatcaccgctgtgccatctttgagagaacatttcgaaaacgttaagaaggcaatcggtatctttgtgtctacttcaatcgaggaagttttctcttttcctttctacaaccaacttttgacccaaactcagattgatctttacaaccagcttttgggaggtatttcaagggaggctggaaccgaaaagattaagggtttgaacgaggttttgaatcttgcaatccaaaagaatgatgaaactgctcatattattgcatcacttccacacaggtttattcctcttttcaagcagattttgtctgatagaaacactctttcttttattcttgaggagtttaagtctgatgaggaagtgattcaatcattttgcaagtataagacacttttgagaaacgagaatgttcttgagactgctgaagcattgttcaacgaacttaattctattgatttgacccatattttcatttcacacaagaagttggagactatttcttctgctttgtgcgatcactgggatacattgaggaatgcactttacgagagaaggatttctgaattgactggaaagattacaaagtctgctaaggaaaaggttcaaagatcacttaagcatgaggatattaacttgcaggaaattatttctgctgcaggaaaggagctttcagaggcttttaagcaaaagacttctgagattttgtcacatgcacacgctgcattggatcagccacttcctaccactttgaagaagcaagaggaaaaggaaattcttaagtctcagttggattcacttttgggactttatcatcttttggattggttcgctgtggatgagtctaacgaggttgatccagagttttcagcaaggcttacaggtattaagttggagatggaaccttctttgtcattttacaacaaggctagaaactacgcaacaaagaagccatattctgtggagaagtttaagttgaacttccaaatgcctaccttggctaggggatgggatgtgaatagagaaaagaacaatggtgcaatccttttcgttaagaacggattgtactaccttggtattatgccaaagcagaagggaagatacaaggctttgtcttttgagcctactgaaaagacatcagaaggtttcgataagatgtactacgattacttcccagatgctgcaaagatgattcctaagtgttctactcaacttaaggctgttactgcacatttccagacacacacaaccccaatccttttgtcaaacaatttcatcgagcctcttgaaatcacaaaggaaatctatgatttgaacaatccagagaaggaacctaagaagttccaaaccgcttatgctaagaaaactggagatcagaagggttatagggaagctctttgcaagtggattgattttaccagagatttcttgtctaagtacactaagactacatcaattgatctttcttctcttagaccatcttctcaatacaaggatcttggagagtattacgctgaattgaaccctcttttgtaccacatttcttttcaaagaatcgctgagaaggaaattatggatgcagtggagactggaaagttgtatctttttcaaatctataacaaggatttcgcaaagggacatcatggaaagccaaatttgcataccctttactggactggacttttctctcctgagaacttggctaagacatctattaagttgaatggtcaggcagaattgttttataggccaaagtctaggatgaagaggatggctcatagacttggagaaaagatgcttaacaagaagttgaaggatcaaaagaccccaattcctgatactctttaccaggagttgtatgattacgttaatcataggctttctcacgatttgtcagatgaagctagagcacttttgcctaacgtgatcacaaaggaagtttctcacgaaattattaaggatagaaggttcacctctgataagtttttctttcatgtgccaatcactttgaactaccaagctgcaaattctccttcaaagtttaaccagagggttaatgcttatcttaaggagcatccagaaacccctattattggaattgatagaggtgagaggaacttgatctatatcacagtgattgattctaccggaaagattcttgagcaaagatcattgaataccattcaacagttcgattatcaaaagaagttggataacagagagaaggaaagggttgctgctagacaagcatggtctgttgtgggaactattaaggatcttaagcagggttacttgtcacaagtgattcatgagattgttgatttgatgattcactatcaggcagttgtggttttggaaaaccttaatttcggattcaagtctaagaggactggtattgctgagaaggcagtgtaccaacagttcgaaaagatgcttatcgataagttgaactgtttggttcttaaggattacccagctgagaaagtgggaggtgttcttaacccttatcagttgacagatcaattcacttcttttgctaagatgggaacacaatcaggttttcttttctatgttccagcaccttacacatctaagattgatccattgaccggatttgttgatccattcgtttggaaaactattaagaaccatgagtcaagaaagcacttccttgaaggatttgatttcttgcattacgatgttaagactggagatttcatcttgcacttcaagatgaacaggaatctttcttttcaaagaggattgccaggtttcatgcctgcttgggatattgtttttgagaagaacgaaactcagttcgatgctaagggaacaccattcattgcaggaaagagaattgtgcctgttattgagaatcacagattcactggtagatatagggatctttacccagctaacgaattgattgcacttttggaggaaaagggaattgtttttagggatggttctaacattcttcctaagttgcttgagaatgatgattcacatgctattgatactatggtggcacttattaggtctgttttgcaaatgagaaactcaaatgctgcaacaggagaggattacattaactctccagtgagggatttg

SEQ ID NO: 332 - DNA, 3966 bp, synthetic construct
  source 1..3966: mol_type = other DNA
aatggtgtttgctttgattcaagattccaaaacccagaatggcctatggatgctgatgcaaacggagcttatcatattgcacttaagggtcagcttttgcttaatcacttgaaggagtctaaggatttgaagttgcagaacggtatttcaaatcaagattggcttgcttacattcaggaattgagaaacggctcctctggcagctccggctctagcggctcctctggcagctccggcactcagtttgagggattcacaaatctttaccaagtgtctaagactttgaggttcgagcttattccacaaggaaagacattgaagcacattcaagaacagggttttattgaggaagataaggctaggaatgatcattataaggaacttaagcctattattgatagaatctataagacctacgcagatcaatgtttgcagcttgttcaacttgattgggagaacttgtctgctgcaattgattcatacaggaaggaaaagacagaggaaaccagaaacgctcttattgaggaacaagctacttacaggaatgcaattcacgattatttcattggaagaaccgataacttgactgatgctattaataagagacatgcagaaatctataagggtctttttaaggctgagctttttaacggaaaggtgttgaagcagcttggtacagttactacaaccgagcacgaaaacgcacttttgaggtcttttgataagttcactacatacttctcaggattctacagaaacaggaagaatgtgttctctgctgaggatatttcaaccgcaatcccacatagaatcgttcaagataacttccctaagttcaaggaaaactgccacatttttacaaggcttatcaccgctgtgccatctttgagagaacatttcgaaaacgttaagaaggcaatcggtatctttgtgtctacttcaatcgaggaagttttctcttttcctttctacaaccaacttttgacccaaactcagattgatctttacaaccagcttttgggaggtatttcaagggaggctggaaccgaaaagattaagggtttgaacgaggttttgaatcttgcaatccaaaagaatgatgaaactgctcatattattgcatcacttccacacaggtttattcctcttttcaagcagattttgtctgatagaaacactctttcttttattcttgaggagtttaagtctgatgaggaagtgattcaatcattttgcaagtataagacacttttgagaaacgagaatgttcttgagactgctgaagcattgttcaacgaacttaattctattgatttgacccatattttcatttcacacaagaagttggagactatttcttctgctttgtgcgatcactgggatacattgaggaatgcactttacgagagaaggatttctgaattgactggaaagattacaaagtctgctaaggaaaaggttcaaagatcacttaagcatgaggatattaacttgcaggaaattatttctgctgcaggaaaggagctttcagaggcttttaagcaaaagacttctgagattttgtcacatgcacacgctgcattggatcagccacttcctaccactttgaagaagcaagaggaaaaggaaattcttaagtctcagttggattcacttttgggactttatcatcttttggattggttcgctgtggatgagtctaacgaggttgatccagagttttcagcaaggcttacaggtattaagttggagatggaaccttctttgtcattttacaacaaggctagaaactacgcaacaaagaagccatattctgtggagaagtttaagttgaacttccaaatgcctaccttggctaggggatgggatgtgaatagagaaaagaacaatggtgcaatccttttcgttaagaacggattgtactaccttggtattatgccaaagcagaagggaagatacaaggctttgtcttttgagcctactgaaaagacatcagaaggtttcgataagatgtactacgattacttcccagatgctgcaaagatgattcctaagtgttctactcaacttaaggctgttactgcacatttccagacacacacaaccccaatccttttgtcaaacaatttcatcgagcctcttgaaatcacaaaggaaatctatgatttgaacaatccagagaaggaacctaagaagttccaaaccgcttatgctaagaaaactggagatcagaagggttatagggaagctctttgcaagtggattgattttaccagagatttcttgtctaagtacactaagactacatcaattgatctttcttctcttagaccatcttctcaatacaaggatcttggagagtattacgctgaattgaaccctcttttgtaccacatttcttttcaaagaatcgctgagaaggaaattatggatgcagtggagactggaaagttgtatctttttcaaatctataacaaggatttcgcaaagggacatcatggaaagccaaatttgcataccctttactggactggacttttctctcctgagaacttggctaagacatctattaagttgaatggtcaggcagaattgttttataggccaaagtctaggatgaagaggatggctcatagacttggagaaaagatgcttaacaagaagttgaaggatcaaaagaccccaattcctgatactctttaccaggagttgtatgattacgttaatcataggctttctcacgatttgtcagatgaagctagagcacttttgcctaacgtgatcacaaaggaagtttctcacgaaattattaaggatagaaggttcacctctgataagtttttctttcatgtgccaatcactttgaactaccaagctgcaaattctccttcaaagtttaaccagagggttaatgcttatcttaaggagcatccagaaacccctattattggaattgatagaggtgagaggaacttgatctatatcacagtgattgattctaccggaaagattcttgagcaaagatcattgaataccattcaacagttcgattatcaaaagaagttggataacagagagaaggaaagggttgctgctagacaagcatggtctgttgtgggaactattaaggatcttaagcagggttacttgtcacaagtgattcatgagattgttgatttgatgattcactatcaggcagttgtggttttggaaaaccttaatttcggattcaagtctaagaggactggtattgctgagaaggcagtgtaccaacagttcgaaaagatgcttatcgataagttgaactgtttggttcttaaggattacccagctgagaaagtgggaggtgttcttaacccttatcagttgacagatcaattcacttcttttgctaagatgggaacacaatcaggttttcttttctatgttccagcaccttacacatctaagattgatccattgaccggatttgttgatccattcgtttggaaaactattaagaaccatgagtcaagaaagcacttccttgaaggatttgatttcttgcattacgatgttaagactggagatttcatcttgcacttcaagatgaacaggaatctttcttttcaaagaggattgccaggtttcatgcctgcttgggatattgtttttgagaagaacgaaactcagttcgatgctaagggaacaccattcattgcaggaaagagaattgtgcctgttattgagaatcacagattcactggtagatatagggatctttacccagctaacgaattgattgcacttttggaggaaaagggaattgtttttagggatggttctaacattcttcctaagttgcttgagaatgatgattcacatgctattgatactatggtggcacttattaggtctgttttgcaaatgagaaactcaaatgctgcaacaggagaggattacattaactctccagtgagggatttg

SEQ ID NO: 333 - DNA, 3948 bp, synthetic construct
  source 1..3948: mol_type = other DNA
gagaagtttaagttgaacttccaaatgcctaccttggctaggggatgggatgtgaatagagaaaagaacaatggtgcaatccttttcgttaagaacggattgtactaccttggtattatgccaaagcagaagggaagatacaaggctttgtcttttgagcctactgaaaagacatcagaaggtttcgataagatgtactacgattacttcccagatgctgcaaagatgattcctaagtgttctactcaacttaaggctgttactgcacatttccagacacacacaaccccaatccttttgtcaaacaatttcatcgagcctcttgaaatcacaaaggaaatctatgatttgaacaatccagagaaggaacctaagaagttccaaaccgcttatgctaagaaaactggagatcagaagggttatagggaagctctttgcaagtggattgattttaccagagatttcttgtctaagtacactaagactacatcaattgatctttcttctcttagaccatcttctcaatacaaggatcttggagagtattacgctgaattgaaccctcttttgtaccacatttcttttcaaagaatcgctgagaaggaaattatggatgcagtggagactggaaagttgtatctttttcaaatctataacaaggatttcgcaaagggacatcatggaaagccaaatttgcataccctttactggactggacttttctctcctgagaacttggctaagacatctattaagttgaatggtcaggcagaattgttttataggccaaagtctaggatgaagaggatggctcatagacttggagaaaagatgcttaacaagaagttgaaggatcaaaagaccccaattcctgatactctttaccaggagttgtatgattacgttaatcataggctttctcacgatttgtcagatgaagctagagcacttttgcctaacgtgatcacaaaggaagtttctcacgaaattattaaggatagaaggttcacctctgataagtttttctttcatgtgccaatcactttgaactaccaagctgcaaattctccttcaaagtttaaccagagggttaatgcttatcttaaggagcatccagaaacccctattattggaattgatagaggtgagaggaacttgatctatatcacagtgattgattctaccggaaagattcttgagcaaagatcattgaataccattcaacagttcgattatcaaaagaagttggataacagagagaaggaaagggttgctgctagacaagcatggtctgttgtgggaactattaaggatcttaagcagggttacttgtcacaagtgattcatgagattgttgatttgatgattcactatcaggcagttgtggttttggaaaaccttaatttcggattcaagtctaagaggactggtattgctgagaaggcagtgtaccaacagttcgaaaagatgcttatcgataagttgaactgtttggttcttaaggattacccagctgagaaagtgggaggtgttcttaacccttatcagttgacagatcaattcacttcttttgctaagatgggaacacaatcaggttttcttttctatgttccagcaccttacacatctaagattgatccattgaccggatttgttgatccattcgtttggaaaactattaagaaccatgagtcaagaaagcacttccttgaaggatttgatttcttgcattacgatgttaagactggagatttcatcttgcacttcaagatgaacaggaatctttcttttcaaagaggattgccaggtttcatgcctgcttgggatattgtttttgagaagaacgaaactcagttcgatgctaagggaacaccattcattgcaggaaagagaattgtgcctgttattgagaatcacagattcactggtagatatagggatctttacccagctaacgaattgattgcacttttggaggaaaagggaattgtttttagggatggttctaacattcttcctaagttgcttgagaatgatgattcacatgctattgatactatggtggcacttattaggtctgttttgcaaatgagaaactcaaatgctgcaacaggagaggattacattaactctccagtgagggatttgaatggtgtttgctttgattcaagattccaaaacccagaatggcctatggatgctgatgcaaacggagcttatcatattgcacttaagggtcagcttttgcttaatcacttgaaggagtctaaggatttgaagttgcagaacggtatttcaaatcaagattggcttgcttacattcaggaattgagaaacggctcctctggcagctccggctctagcggcactcagtttgagggattcacaaatctttaccaagtgtctaagactttgaggttcgagcttattccacaaggaaagacattgaagcacattcaagaacagggttttattgaggaagataaggctaggaatgatcattataaggaacttaagcctattattgatagaatctataagacctacgcagatcaatgtttgcagcttgttcaacttgattgggagaacttgtctgctgcaattgattcatacaggaaggaaaagacagaggaaaccagaaacgctcttattgaggaacaagctacttacaggaatgcaattcacgattatttcattggaagaaccgataacttgactgatgctattaataagagacatgcagaaatctataagggtctttttaaggctgagctttttaacggaaaggtgttgaagcagcttggtacagttactacaaccgagcacgaaaacgcacttttgaggtcttttgataagttcactacatacttctcaggattctacagaaacaggaagaatgtgttctctgctgaggatatttcaaccgcaatcccacatagaatcgttcaagataacttccctaagttcaaggaaaactgccacatttttacaaggcttatcaccgctgtgccatctttgagagaacatttcgaaaacgttaagaaggcaatcggtatctttgtgtctacttcaatcgaggaagttttctcttttcctttctacaaccaacttttgacccaaactcagattgatctttacaaccagcttttgggaggtatttcaagggaggctggaaccgaaaagattaagggtttgaacgaggttttgaatcttgcaatccaaaagaatgatgaaactgctcatattattgcatcacttccacacaggtttattcctcttttcaagcagattttgtctgatagaaacactctttcttttattcttgaggagtttaagtctgatgaggaagtgattcaatcattttgcaagtataagacacttttgagaaacgagaatgttcttgagactgctgaagcattgttcaacgaacttaattctattgatttgacccatattttcatttcacacaagaagttggagactatttcttctgctttgtgcgatcactgggatacattgaggaatgcactttacgagagaaggatttctgaattgactggaaagattacaaagtctgctaaggaaaaggttcaaagatcacttaagcatgaggatattaacttgcaggaaattatttctgctgcaggaaaggagctttcagaggcttttaagcaaaagacttctgagattttgtcacatgcacacgctgcattggatcagccacttcctaccactttgaagaagcaagaggaaaaggaaattcttaagtctcagttggattcacttttgggactttatcatcttttggattggttcgctgtggatgagtctaacgaggttgatccagagttttcagcaaggcttacaggtattaagttggagatggaaccttctttgtcattttacaacaaggctagaaactacgcaacaaagaagccatattctgtg

SEQ ID NO: 334 - DNA, 3966 bp, synthetic construct
  source 1..3966: mol_type = other DNA
gagaagtttaagttgaacttccaaatgcctaccttggctaggggatgggatgtgaatagagaaaagaacaatggtgcaatccttttcgttaagaacggattgtactaccttggtattatgccaaagcagaagggaagatacaaggctttgtcttttgagcctactgaaaagacatcagaaggtttcgataagatgtactacgattacttcccagatgctgcaaagatgattcctaagtgttctactcaacttaaggctgttactgcacatttccagacacacacaaccccaatccttttgtcaaacaatttcatcgagcctcttgaaatcacaaaggaaatctatgatttgaacaatccagagaaggaacctaagaagttccaaaccgcttatgctaagaaaactggagatcagaagggttatagggaagctctttgcaagtggattgattttaccagagatttcttgtctaagtacactaagactacatcaattgatctttcttctcttagaccatcttctcaatacaaggatcttggagagtattacgctgaattgaaccctcttttgtaccacatttcttttcaaagaatcgctgagaaggaaattatggatgcagtggagactggaaagttgtatctttttcaaatctataacaaggatttcgcaaagggacatcatggaaagccaaatttgcataccctttactggactggacttttctctcctgagaacttggctaagacatctattaagttgaatggtcaggcagaattgttttataggccaaagtctaggatgaagaggatggctcatagacttggagaaaagatgcttaacaagaagttgaaggatcaaaagaccccaattcctgatactctttaccaggagttgtatgattacgttaatcataggctttctcacgatttgtcagatgaagctagagcacttttgcctaacgtgatcacaaaggaagtttctcacgaaattattaaggatagaaggttcacctctgataagtttttctttcatgtgccaatcactttgaactaccaagctgcaaattctccttcaaagtttaaccagagggttaatgcttatcttaaggagcatccagaaacccctattattggaattgatagaggtgagaggaacttgatctatatcacagtgattgattctaccggaaagattcttgagcaaagatcattgaataccattcaacagttcgattatcaaaagaagttggataacagagagaaggaaagggttgctgctagacaagcatggtctgttgtgggaactattaaggatcttaagcagggttacttgtcacaagtgattcatgagattgttgatttgatgattcactatcaggcagttgtggttttggaaaaccttaatttcggattcaagtctaagaggactggtattgctgagaaggcagtgtaccaacagttcgaaaagatgcttatcgataagttgaactgtttggttcttaaggattacccagctgagaaagtgggaggtgttcttaacccttatcagttgacagatcaattcacttcttttgctaagatgggaacacaatcaggttttcttttctatgttccagcaccttacacatctaagattgatccattgaccggatttgttgatccattcgtttggaaaactattaagaaccatgagtcaagaaagcacttccttgaaggatttgatttcttgcattacgatgttaagactggagatttcatcttgcacttcaagatgaacaggaatctttcttttcaaagaggattgccaggtttcatgcctgcttgggatattgtttttgagaagaacgaaactcagttcgatgctaagggaacaccattcattgcaggaaagagaattgtgcctgttattgagaatcacagattcactggtagatatagggatctttacccagctaacgaattgattgcacttttggaggaaaagggaattgtttttagggatggttctaacattcttcctaagttgcttgagaatgatgattcacatgctattgatactatggtggcacttattaggtctgttttgcaaatgagaaactcaaatgctgcaacaggagaggattacattaactctccagtgagggatttgaatggtgtttgctttgattcaagattccaaaacccagaatggcctatggatgctgatgcaaacggagcttatcatattgcacttaagggtcagcttttgcttaatcacttgaaggagtctaaggatttgaagttgcagaacggtatttcaaatcaagattggcttgcttacattcaggaattgagaaacggctcctctggcagctccggctctagcggctcctctggcagctccggcactcagtttgagggattcacaaatctttaccaagtgtctaagactttgaggttcgagcttattccacaaggaaagacattgaagcacattcaagaacagggttttattgaggaagataaggctaggaatgatcattataaggaacttaagcctattattgatagaatctataagacctacgcagatcaatgtttgcagcttgttcaacttgattgggagaacttgtctgctgcaattgattcatacaggaaggaaaagacagaggaaaccagaaacgctcttattgaggaacaagctacttacaggaatgcaattcacgattatttcattggaagaaccgataacttgactgatgctattaataagagacatgcagaaatctataagggtctttttaaggctgagctttttaacggaaaggtgttgaagcagcttggtacagttactacaaccgagcacgaaaacgcacttttgaggtcttttgataagttcactacatacttctcaggattctacagaaacaggaagaatgtgttctctgctgaggatatttcaaccgcaatcccacatagaatcgttcaagataacttccctaagttcaaggaaaactgccacatttttacaaggcttatcaccgctgtgccatctttgagagaacatttcgaaaacgttaagaaggcaatcggtatctttgtgtctacttcaatcgaggaagttttctcttttcctttctacaaccaacttttgacccaaactcagattgatctttacaaccagcttttgggaggtatttcaagggaggctggaaccgaaaagattaagggtttgaacgaggttttgaatcttgcaatccaaaagaatgatgaaactgctcatattattgcatcacttccacacaggtttattcctcttttcaagcagattttgtctgatagaaacactctttcttttattcttgaggagtttaagtctgatgaggaagtgattcaatcattttgcaagtataagacacttttgagaaacgagaatgttcttgagactgctgaagcattgttcaacgaacttaattctattgatttgacccatattttcatttcacacaagaagttggagactatttcttctgctttgtgcgatcactgggatacattgaggaatgcactttacgagagaaggatttctgaattgactggaaagattacaaagtctgctaaggaaaaggttcaaagatcacttaagcatgaggatattaacttgcaggaaattatttctgctgcaggaaaggagctttcagaggcttttaagcaaaagacttctgagattttgtcacatgcacacgctgcattggatcagccacttcctaccactttgaagaagcaagaggaaaaggaaattcttaagtctcagttggattcacttttgggactttatcatcttttggattggttcgctgtggatgagtctaacgaggttgatccagagttttcagcaaggcttacaggtattaagttggagatggaaccttctttgtcattttacaacaaggctagaaactacgcaacaaagaagccatattctgtg

SEQ ID NO: 335 - DNA, 3948 bp, synthetic construct
  source 1..3948: mol_type = other DNA
actttgaagaagcaagaggaaaaggaaattcttaagtctcagttggattcacttttgggactttatcatcttttggattggttcgctgtggatgagtctaacgaggttgatccagagttttcagcaaggcttacaggtattaagttggagatggaaccttctttgtcattttacaacaaggctagaaactacgcaacaaagaagccatattctgtggagaagtttaagttgaacttccaaatgcctaccttggctaggggatgggatgtgaatagagaaaagaacaatggtgcaatccttttcgttaagaacggattgtactaccttggtattatgccaaagcagaagggaagatacaaggctttgtcttttgagcctactgaaaagacatcagaaggtttcgataagatgtactacgattacttcccagatgctgcaaagatgattcctaagtgttctactcaacttaaggctgttactgcacatttccagacacacacaaccccaatccttttgtcaaacaatttcatcgagcctcttgaaatcacaaaggaaatctatgatttgaacaatccagagaaggaacctaagaagttccaaaccgcttatgctaagaaaactggagatcagaagggttatagggaagctctttgcaagtggattgattttaccagagatttcttgtctaagtacactaagactacatcaattgatctttcttctcttagaccatcttctcaatacaaggatcttggagagtattacgctgaattgaaccctcttttgtaccacatttcttttcaaagaatcgctgagaaggaaattatggatgcagtggagactggaaagttgtatctttttcaaatctataacaaggatttcgcaaagggacatcatggaaagccaaatttgcataccctttactggactggacttttctctcctgagaacttggctaagacatctattaagttgaatggtcaggcagaattgttttataggccaaagtctaggatgaagaggatggctcatagacttggagaaaagatgcttaacaagaagttgaaggatcaaaagaccccaattcctgatactctttaccaggagttgtatgattacgttaatcataggctttctcacgatttgtcagatgaagctagagcacttttgcctaacgtgatcacaaaggaagtttctcacgaaattattaaggatagaaggttcacctctgataagtttttctttcatgtgccaatcactttgaactaccaagctgcaaattctccttcaaagtttaaccagagggttaatgcttatcttaaggagcatccagaaacccctattattggaattgatagaggtgagaggaacttgatctatatcacagtgattgattctaccggaaagattcttgagcaaagatcattgaataccattcaacagttcgattatcaaaagaagttggataacagagagaaggaaagggttgctgctagacaagcatggtctgttgtgggaactattaaggatcttaagcagggttacttgtcacaagtgattcatgagattgttgatttgatgattcactatcaggcagttgtggttttggaaaaccttaatttcggattcaagtctaagaggactggtattgctgagaaggcagtgtaccaacagttcgaaaagatgcttatcgataagttgaactgtttggttcttaaggattacccagctgagaaagtgggaggtgttcttaacccttatcagttgacagatcaattcacttcttttgctaagatgggaacacaatcaggttttcttttctatgttccagcaccttacacatctaagattgatccattgaccggatttgttgatccattcgtttggaaaactattaagaaccatgagtcaagaaagcacttccttgaaggatttgatttcttgcattacgatgttaagactggagatttcatcttgcacttcaagatgaacaggaatctttcttttcaaagaggattgccaggtttcatgcctgcttgggatattgtttttgagaagaacgaaactcagttcgatgctaagggaacaccattcattgcaggaaagagaattgtgcctgttattgagaatcacagattcactggtagatatagggatctttacccagctaacgaattgattgcacttttggaggaaaagggaattgtttttagggatggttctaacattcttcctaagttgcttgagaatgatgattcacatgctattgatactatggtggcacttattaggtctgttttgcaaatgagaaactcaaatgctgcaacaggagaggattacattaactctccagtgagggatttgaatggtgtttgctttgattcaagattccaaaacccagaatggcctatggatgctgatgcaaacggagcttatcatattgcacttaagggtcagcttttgcttaatcacttgaaggagtctaaggatttgaagttgcagaacggtatttcaaatcaagattggcttgcttacattcaggaattgagaaacggctcctctggcagctccggctctagcggcactcagtttgagggattcacaaatctttaccaagtgtctaagactttgaggttcgagcttattccacaaggaaagacattgaagcacattcaagaacagggttttattgaggaagataaggctaggaatgatcattataaggaacttaagcctattattgatagaatctataagacctacgcagatcaatgtttgcagcttgttcaacttgattgggagaacttgtctgctgcaattgattcatacaggaaggaaaagacagaggaaaccagaaacgctcttattgaggaacaagctacttacaggaatgcaattcacgattatttcattggaagaaccgataacttgactgatgctattaataagagacatgcagaaatctataagggtctttttaaggctgagctttttaacggaaaggtgttgaagcagcttggtacagttactacaaccgagcacgaaaacgcacttttgaggtcttttgataagttcactacatacttctcaggattctacagaaacaggaagaatgtgttctctgctgaggatatttcaaccgcaatcccacatagaatcgttcaagataacttccctaagttcaaggaaaactgccacatttttacaaggcttatcaccgctgtgccatctttgagagaacatttcgaaaacgttaagaaggcaatcggtatctttgtgtctacttcaatcgaggaagttttctcttttcctttctacaaccaacttttgacccaaactcagattgatctttacaaccagcttttgggaggtatttcaagggaggctggaaccgaaaagattaagggtttgaacgaggttttgaatcttgcaatccaaaagaatgatgaaactgctcatattattgcatcacttccacacaggtttattcctcttttcaagcagattttgtctgatagaaacactctttcttttattcttgaggagtttaagtctgatgaggaagtgattcaatcattttgcaagtataagacacttttgagaaacgagaatgttcttgagactgctgaagcattgttcaacgaacttaattctattgatttgacccatattttcatttcacacaagaagttggagactatttcttctgctttgtgcgatcactgggatacattgaggaatgcactttacgagagaaggatttctgaattgactggaaagattacaaagtctgctaaggaaaaggttcaaagatcacttaagcatgaggatattaacttgcaggaaattatttctgctgcaggaaaggagctttcagaggcttttaagcaaaagacttctgagattttgtcacatgcacacgctgcattggatcagccacttcctacc

SEQ ID NO: 336 - DNA, 3966 bp, synthetic construct
  source 1..3966: mol_type = other DNA
actttgaagaagcaagaggaaaaggaaattcttaagtctcagttggattcacttttgggactttatcatcttttggattggttcgctgtggatgagtctaacgaggttgatccagagttttcagcaaggcttacaggtattaagttggagatggaaccttctttgtcattttacaacaaggctagaaactacgcaacaaagaagccatattctgtggagaagtttaagttgaacttccaaatgcctaccttggctaggggatgggatgtgaatagagaaaagaacaatggtgcaatccttttcgttaagaacggattgtactaccttggtattatgccaaagcagaagggaagatacaaggctttgtcttttgagcctactgaaaagacatcagaaggtttcgataagatgtactacgattacttcccagatgctgcaaagatgattcctaagtgttctactcaacttaaggctgttactgcacatttccagacacacacaaccccaatccttttgtcaaacaatttcatcgagcctcttgaaatcacaaaggaaatctatgatttgaacaatccagagaaggaacctaagaagttccaaaccgcttatgctaagaaaactggagatcagaagggttatagggaagctctttgcaagtggattgattttaccagagatttcttgtctaagtacactaagactacatcaattgatctttcttctcttagaccatcttctcaatacaaggatcttggagagtattacgctgaattgaaccctcttttgtaccacatttcttttcaaagaatcgctgagaaggaaattatggatgcagtggagactggaaagttgtatctttttcaaatctataacaaggatttcgcaaagggacatcatggaaagccaaatttgcataccctttactggactggacttttctctcctgagaacttggctaagacatctattaagttgaatggtcaggcagaattgttttataggccaaagtctaggatgaagaggatggctcatagacttggagaaaagatgcttaacaagaagttgaaggatcaaaagaccccaattcctgatactctttaccaggagttgtatgattacgttaatcataggctttctcacgatttgtcagatgaagctagagcacttttgcctaacgtgatcacaaaggaagtttctcacgaaattattaaggatagaaggttcacctctgataagtttttctttcatgtgccaatcactttgaactaccaagctgcaaattctccttcaaagtttaaccagagggttaatgcttatcttaaggagcatccagaaacccctattattggaattgatagaggtgagaggaacttgatctatatcacagtgattgattctaccggaaagattcttgagcaaagatcattgaataccattcaacagttcgattatcaaaagaagttggataacagagagaaggaaagggttgctgctagacaagcatggtctgttgtgggaactattaaggatcttaagcagggttacttgtcacaagtgattcatgagattgttgatttgatgattcactatcaggcagttgtggttttggaaaaccttaatttcggattcaagtctaagaggactggtattgctgagaaggcagtgtaccaacagttcgaaaagatgcttatcgataagttgaactgtttggttcttaaggattacccagctgagaaagtgggaggtgttcttaacccttatcagttgacagatcaattcacttcttttgctaagatgggaacacaatcaggttttcttttctatgttccagcaccttacacatctaagattgatccattgaccggatttgttgatccattcgtttggaaaactattaagaaccatgagtcaagaaagcacttccttgaaggatttgatttcttgcattacgatgttaagactggagatttcatcttgcacttcaagatgaacaggaatctttcttttcaaagaggattgccaggtttcatgcctgcttgggatattgtttttgagaagaacgaaactcagttcgatgctaagggaacaccattcattgcaggaaagagaattgtgcctgttattgagaatcacagattcactggtagatatagggatctttacccagctaacgaattgattgcacttttggaggaaaagggaattgtttttagggatggttctaacattcttcctaagttgcttgagaatgatgattcacatgctattgatactatggtggcacttattaggtctgttttgcaaatgagaaactcaaatgctgcaacaggagaggattacattaactctccagtgagggatttgaatggtgtttgctttgattcaagattccaaaacccagaatggcctatggatgctgatgcaaacggagcttatcatattgcacttaagggtcagcttttgcttaatcacttgaaggagtctaaggatttgaagttgcagaacggtatttcaaatcaagattggcttgcttacattcaggaattgagaaacggctcctctggcagctccggctctagcggctcctctggcagctccggcactcagtttgagggattcacaaatctttaccaagtgtctaagactttgaggttcgagcttattccacaaggaaagacattgaagcacattcaagaacagggttttattgaggaagataaggctaggaatgatcattataaggaacttaagcctattattgatagaatctataagacctacgcagatcaatgtttgcagcttgttcaacttgattgggagaacttgtctgctgcaattgattcatacaggaaggaaaagacagaggaaaccagaaacgctcttattgaggaacaagctacttacaggaatgcaattcacgattatttcattggaagaaccgataacttgactgatgctattaataagagacatgcagaaatctataagggtctttttaaggctgagctttttaacggaaaggtgttgaagcagcttggtacagttactacaaccgagcacgaaaacgcacttttgaggtcttttgataagttcactacatacttctcaggattctacagaaacaggaagaatgtgttctctgctgaggatatttcaaccgcaatcccacatagaatcgttcaagataacttccctaagttcaaggaaaactgccacatttttacaaggcttatcaccgctgtgccatctttgagagaacatttcgaaaacgttaagaaggcaatcggtatctttgtgtctacttcaatcgaggaagttttctcttttcctttctacaaccaacttttgacccaaactcagattgatctttacaaccagcttttgggaggtatttcaagggaggctggaaccgaaaagattaagggtttgaacgaggttttgaatcttgcaatccaaaagaatgatgaaactgctcatattattgcatcacttccacacaggtttattcctcttttcaagcagattttgtctgatagaaacactctttcttttattcttgaggagtttaagtctgatgaggaagtgattcaatcattttgcaagtataagacacttttgagaaacgagaatgttcttgagactgctgaagcattgttcaacgaacttaattctattgatttgacccatattttcatttcacacaagaagttggagactatttcttctgctttgtgcgatcactgggatacattgaggaatgcactttacgagagaaggatttctgaattgactggaaagattacaaagtctgctaaggaaaaggttcaaagatcacttaagcatgaggatattaacttgcaggaaattatttctgctgcaggaaaggagctttcagaggcttttaagcaaaagacttctgagattttgtcacatgcacacgctgcattggatcagccacttcctacc

SEQ ID NO: 337 - DNA, 3948 bp, synthetic construct
  source 1..3948: mol_type = other DNA
gattcacatgctattgatactatggtggcacttattaggtctgttttgcaaatgagaaactcaaatgctgcaacaggagaggattacattaactctccagtgagggatttgaatggtgtttgctttgattcaagattccaaaacccagaatggcctatggatgctgatgcaaacggagcttatcatattgcacttaagggtcagcttttgcttaatcacttgaaggagtctaaggatttgaagttgcagaacggtatttcaaatcaagattggcttgcttacattcaggaattgagaaacggctcctctggcagctccggctctagcggcactcagtttgagggattcacaaatctttaccaagtgtctaagactttgaggttcgagcttattccacaaggaaagacattgaagcacattcaagaacagggttttattgaggaagataaggctaggaatgatcattataaggaacttaagcctattattgatagaatctataagacctacgcagatcaatgtttgcagcttgttcaacttgattgggagaacttgtctgctgcaattgattcatacaggaaggaaaagacagaggaaaccagaaacgctcttattgaggaacaagctacttacaggaatgcaattcacgattatttcattggaagaaccgataacttgactgatgctattaataagagacatgcagaaatctataagggtctttttaaggctgagctttttaacggaaaggtgttgaagcagcttggtacagttactacaaccgagcacgaaaacgcacttttgaggtcttttgataagttcactacatacttctcaggattctacagaaacaggaagaatgtgttctctgctgaggatatttcaaccgcaatcccacatagaatcgttcaagataacttccctaagttcaaggaaaactgccacatttttacaaggcttatcaccgctgtgccatctttgagagaacatttcgaaaacgttaagaaggcaatcggtatctttgtgtctacttcaatcgaggaagttttctcttttcctttctacaaccaacttttgacccaaactcagattgatctttacaaccagcttttgggaggtatttcaagggaggctggaaccgaaaagattaagggtttgaacgaggttttgaatcttgcaatccaaaagaatgatgaaactgctcatattattgcatcacttccacacaggtttattcctcttttcaagcagattttgtctgatagaaacactctttcttttattcttgaggagtttaagtctgatgaggaagtgattcaatcattttgcaagtataagacacttttgagaaacgagaatgttcttgagactgctgaagcattgttcaacgaacttaattctattgatttgacccatattttcatttcacacaagaagttggagactatttcttctgctttgtgcgatcactgggatacattgaggaatgcactttacgagagaaggatttctgaattgactggaaagattacaaagtctgctaaggaaaaggttcaaagatcacttaagcatgaggatattaacttgcaggaaattatttctgctgcaggaaaggagctttcagaggcttttaagcaaaagacttctgagattttgtcacatgcacacgctgcattggatcagccacttcctaccactttgaagaagcaagaggaaaaggaaattcttaagtctcagttggattcacttttgggactttatcatcttttggattggttcgctgtggatgagtctaacgaggttgatccagagttttcagcaaggcttacaggtattaagttggagatggaaccttctttgtcattttacaacaaggctagaaactacgcaacaaagaagccatattctgtggagaagtttaagttgaacttccaaatgcctaccttggctaggggatgggatgtgaatagagaaaagaacaatggtgcaatccttttcgttaagaacggattgtactaccttggtattatgccaaagcagaagggaagatacaaggctttgtcttttgagcctactgaaaagacatcagaaggtttcgataagatgtactacgattacttcccagatgctgcaaagatgattcctaagtgttctactcaacttaaggctgttactgcacatttccagacacacacaaccccaatccttttgtcaaacaatttcatcgagcctcttgaaatcacaaaggaaatctatgatttgaacaatccagagaaggaacctaagaagttccaaaccgcttatgctaagaaaactggagatcagaagggttatagggaagctctttgcaagtggattgattttaccagagatttcttgtctaagtacactaagactacatcaattgatctttcttctcttagaccatcttctcaatacaaggatcttggagagtattacgctgaattgaaccctcttttgtaccacatttcttttcaaagaatcgctgagaaggaaattatggatgcagtggagactggaaagttgtatctttttcaaatctataacaaggatttcgcaaagggacatcatggaaagccaaatttgcataccctttactggactggacttttctctcctgagaacttggctaagacatctattaagttgaatggtcaggcagaattgttttataggccaaagtctaggatgaagaggatggctcatagacttggagaaaagatgcttaacaagaagttgaaggatcaaaagaccccaattcctgatactctttaccaggagttgtatgattacgttaatcataggctttctcacgatttgtcagatgaagctagagcacttttgcctaacgtgatcacaaaggaagtttctcacgaaattattaaggatagaaggttcacctctgataagtttttctttcatgtgccaatcactttgaactaccaagctgcaaattctccttcaaagtttaaccagagggttaatgcttatcttaaggagcatccagaaacccctattattggaattgatagaggtgagaggaacttgatctatatcacagtgattgattctaccggaaagattcttgagcaaagatcattgaataccattcaacagttcgattatcaaaagaagttggataacagagagaaggaaagggttgctgctagacaagcatggtctgttgtgggaactattaaggatcttaagcagggttacttgtcacaagtgattcatgagattgttgatttgatgattcactatcaggcagttgtggttttggaaaaccttaatttcggattcaagtctaagaggactggtattgctgagaaggcagtgtaccaacagttcgaaaagatgcttatcgataagttgaactgtttggttcttaaggattacccagctgagaaagtgggaggtgttcttaacccttatcagttgacagatcaattcacttcttttgctaagatgggaacacaatcaggttttcttttctatgttccagcaccttacacatctaagattgatccattgaccggatttgttgatccattcgtttggaaaactattaagaaccatgagtcaagaaagcacttccttgaaggatttgatttcttgcattacgatgttaagactggagatttcatcttgcacttcaagatgaacaggaatctttcttttcaaagaggattgccaggtttcatgcctgcttgggatattgtttttgagaagaacgaaactcagttcgatgctaagggaacaccattcattgcaggaaagagaattgtgcctgttattgagaatcacagattcactggtagatatagggatctttacccagctaacgaattgattgcacttttggaggaaaagggaattgtttttagggatggttctaacattcttcctaagttgcttgagaatgat

SEQ ID NO: 338 - DNA, 3966 bp, synthetic construct
  source 1..3966: mol_type = other DNA
gattcacatgctattgatactatggtggcacttattaggtctgttttgcaaatgagaaactcaaatgctgcaacaggagaggattacattaactctccagtgagggatttgaatggtgtttgctttgattcaagattccaaaacccagaatggcctatggatgctgatgcaaacggagcttatcatattgcacttaagggtcagcttttgcttaatcacttgaaggagtctaaggatttgaagttgcagaacggtatttcaaatcaagattggcttgcttacattcaggaattgagaaacggctcctctggcagctccggctctagcggctcctctggcagctccggcactcagtttgagggattcacaaatctttaccaagtgtctaagactttgaggttcgagcttattccacaaggaaagacattgaagcacattcaagaacagggttttattgaggaagataaggctaggaatgatcattataaggaacttaagcctattattgatagaatctataagacctacgcagatcaatgtttgcagcttgttcaacttgattgggagaacttgtctgctgcaattgattcatacaggaaggaaaagacagaggaaaccagaaacgctcttattgaggaacaagctacttacaggaatgcaattcacgattatttcattggaagaaccgataacttgactgatgctattaataagagacatgcagaaatctataagggtctttttaaggctgagctttttaacggaaaggtgttgaagcagcttggtacagttactacaaccgagcacgaaaacgcacttttgaggtcttttgataagttcactacatacttctcaggattctacagaaacaggaagaatgtgttctctgctgaggatatttcaaccgcaatcccacatagaatcgttcaagataacttccctaagttcaaggaaaactgccacatttttacaaggcttatcaccgctgtgccatctttgagagaacatttcgaaaacgttaagaaggcaatcggtatctttgtgtctacttcaatcgaggaagttttctcttttcctttctacaaccaacttttgacccaaactcagattgatctttacaaccagcttttgggaggtatttcaagggaggctggaaccgaaaagattaagggtttgaacgaggttttgaatcttgcaatccaaaagaatgatgaaactgctcatattattgcatcacttccacacaggtttattcctcttttcaagcagattttgtctgatagaaacactctttcttttattcttgaggagtttaagtctgatgaggaagtgattcaatcattttgcaagtataagacacttttgagaaacgagaatgttcttgagactgctgaagcattgttcaacgaacttaattctattgatttgacccatattttcatttcacacaagaagttggagactatttcttctgctttgtgcgatcactgggatacattgaggaatgcactttacgagagaaggatttctgaattgactggaaagattacaaagtctgctaaggaaaaggttcaaagatcacttaagcatgaggatattaacttgcaggaaattatttctgctgcaggaaaggagctttcagaggcttttaagcaaaagacttctgagattttgtcacatgcacacgctgcattggatcagccacttcctaccactttgaagaagcaagaggaaaaggaaattcttaagtctcagttggattcacttttgggactttatcatcttttggattggttcgctgtggatgagtctaacgaggttgatccagagttttcagcaaggcttacaggtattaagttggagatggaaccttctttgtcattttacaacaaggctagaaactacgcaacaaagaagccatattctgtggagaagtttaagttgaacttccaaatgcctaccttggctaggggatgggatgtgaatagagaaaagaacaatggtgcaatccttttcgttaagaacggattgtactaccttggtattatgccaaagcagaagggaagatacaaggctttgtcttttgagcctactgaaaagacatcagaaggtttcgataagatgtactacgattacttcccagatgctgcaaagatgattcctaagtgttctactcaacttaaggctgttactgcacatttccagacacacacaaccccaatccttttgtcaaacaatttcatcgagcctcttgaaatcacaaaggaaatctatgatttgaacaatccagagaaggaacctaagaagttccaaaccgcttatgctaagaaaactggagatcagaagggttatagggaagctctttgcaagtggattgattttaccagagatttcttgtctaagtacactaagactacatcaattgatctttcttctcttagaccatcttctcaatacaaggatcttggagagtattacgctgaattgaaccctcttttgtaccacatttcttttcaaagaatcgctgagaaggaaattatggatgcagtggagactggaaagttgtatctttttcaaatctataacaaggatttcgcaaagggacatcatggaaagccaaatttgcataccctttactggactggacttttctctcctgagaacttggctaagacatctattaagttgaatggtcaggcagaattgttttataggccaaagtctaggatgaagaggatggctcatagacttggagaaaagatgcttaacaagaagttgaaggatcaaaagaccccaattcctgatactctttaccaggagttgtatgattacgttaatcataggctttctcacgatttgtcagatgaagctagagcacttttgcctaacgtgatcacaaaggaagtttctcacgaaattattaaggatagaaggttcacctctgataagtttttctttcatgtgccaatcactttgaactaccaagctgcaaattctccttcaaagtttaaccagagggttaatgcttatcttaaggagcatccagaaacccctattattggaattgatagaggtgagaggaacttgatctatatcacagtgattgattctaccggaaagattcttgagcaaagatcattgaataccattcaacagttcgattatcaaaagaagttggataacagagagaaggaaagggttgctgctagacaagcatggtctgttgtgggaactattaaggatcttaagcagggttacttgtcacaagtgattcatgagattgttgatttgatgattcactatcaggcagttgtggttttggaaaaccttaatttcggattcaagtctaagaggactggtattgctgagaaggcagtgtaccaacagttcgaaaagatgcttatcgataagttgaactgtttggttcttaaggattacccagctgagaaagtgggaggtgttcttaacccttatcagttgacagatcaattcacttcttttgctaagatgggaacacaatcaggttttcttttctatgttccagcaccttacacatctaagattgatccattgaccggatttgttgatccattcgtttggaaaactattaagaaccatgagtcaagaaagcacttccttgaaggatttgatttcttgcattacgatgttaagactggagatttcatcttgcacttcaagatgaacaggaatctttcttttcaaagaggattgccaggtttcatgcctgcttgggatattgtttttgagaagaacgaaactcagttcgatgctaagggaacaccattcattgcaggaaagagaattgtgcctgttattgagaatcacagattcactggtagatatagggatctttacccagctaacgaattgattgcacttttggaggaaaagggaattgtttttagggatggttctaacattcttcctaagttgcttgagaatgat

SEQ ID NO: 339-350 - skipped (12 entries)

SEQ ID NO: 351 - protein, 2026 aa, synthetic construct
TLNIEDEHRLHETSKEPDVSLGSTWLSDFPQAWAETGGMGLAVRQAPLIIPLKATSTPVSIKQYPMSQEARLGIKPHIQRLLDQGILVPCQSPWNTPLLPVKKPGTNDYRPVQDLREVNKRVEDIHPTVPNPYNLLSGLPPSHQWYTVLDLKDAFFCLRLHPTSQPLFAFEWRDPEMGISGQLTWTRLPQGFKNSPTLFNEALHRDLADFRIQHPDLILLQYVDDLLLAATSELDCQQGTRALLQTLGNLGYRASAKKAQICQKQVKYLGYLLKEGQRWLTEARKETVMGQPTPKTPRQLREFLGKAGFCRLFIPGFAEMAAPLYPLTKPGTLFNWGPDQQKAYQEIKQALLTAPALGLPDLTKPFELFVDEKQGYAKGVLTQKLGPWRRPVAYLSKKLDPVAAGWPPCLRMVAAIAVLTKDAGKLTMGQPLVILAPHAVEALVKQPPDRWLSNARMTHYQALLLDTDRVQFGPVVALNPATLLPLPEEGLQHNCLDILAEAHGTRPDLTDQPLPDADHTWYTDGSSLLQEGQRKAGAAVTTETEVIWAKALPAGTSAQRAELIALTQALKMAEGKKLNVYTDSRYAFATAHIHGEIYRRRGWLTSEGKEIKNKDEILALLKALFLPKRLSIIHCPGHQKGHSAEARGNRMADQAARKAAITETPDTSTLLIENSSPNSRLINSGGSSGGSSGSETPGTSESATPESSGGSSGGSRTEKENKELENLEINLRKEIAKAFKGNEGYKSLFKKDIIETILPEFLDDKDEIALVNSFNGFTTAFTGFFDNRENMFSEEAKSTSIAFRCINENLTRYISNMDIFEKVDAIFDKHEVQEIKEKILNSDYDVEDFFEGEFFNFVLTQEGIDVYNAIIGGFVTESGEKIKGLNEYINLYNQKTKQKLPKFKPLYKQVLSDRESLSFYGEGYTSDEEVLEVFRNTLNKNSEIFSSIKKLEKLFKNFDEYSSAGIFVKNGPAISTISKDIFGEWNVIRDKWNAEYDDIHLKKKAVVTEKYEDDRRKSFKKIGSFSLEQLQEYADADLSVVEKLKEIIIQKVDEIYKVYGSSEKLFDADFVLEKSLKKNDAVVAIMKDLLDSVKSFENYIKAFFGEGKETNRDESFYGDFVLAYDILLKVDHIYDAIRNYVTQKPYSKDKFKLYFQNPQFMGGWDKDKETDYRATILRYGSKYYLAIMDKKYAKCLQKIDKDDVNGNYEKINYKLLPGPNKMLPKVFFSKKWMAYYNPSEDIQKIYKNGTFKKGDMFNLNDCHKLIDFFKDSISRYPKWSNAYDFNFSETEKYKDIAGFYREVEEQGYKVSFESASKKEVDKLVEEGKLYMFQIYNKDFSDKSHGTPNLHTMYFKLLFDENNHGQIRLSGGAELFMRRASLKKEELVVHPANSPIANKNPDNPKKTTTLSYDVYKDKRFSEDQYELHIPIAINKCPKNIFKINTEVRVLLKHDDNPYVIGIDRGERNLLYIVVVDGKGNIVEQYSLNEIINNFNGIRIKTDYHSLLDKKEKERFEARQNWTSIENIKELKAGYISQVVHKICELVEKYDAVIALEDLNSGFKNSRVKVEKQVYQKFEKMLIDKLNYMVDKKSNPCATGGALKGYQITNKFESFKSMSTQNGFIFYIPAWLTSKIDPSTGFVNLLKTKYTSIADSKKFISSFDRIMYVPEEDLFEFALDYKNFSRTDADYIKKWKLYSYGNRIRIFRNPKKNNVFDWEEVCLTSAYKELFNKYGINYQQGDIRALLCEQSDKAFYSSFMALMSLMLQMRNSITGRTDVDFLISPVKNSDGIFYDSRNYEAQENAILPKNADANGAYNIARKVLWAIGQFKKAEDEKLDKVKIAISNKEWLEYAQTSVKHGSSGSSGSSGSSGSSGSKLEKFTNCYSLSKTLRFKAIPVGKTQENIDNKRLLVEDEKRAEDYKGVKKLLDRYYLSFINDVLHSIKLKNLNNYISLFRKKTSGGSSGGSSGSETPGTSESATPESSGGSSGGSALDFLSRLPLPPPVSPICTFVSPAAQKAFQPPRSCG

SEQ ID NO: 352 - protein, 2026 aa, synthetic construct
TLNIEDEHRLHETSKEPDVSLGSTWLSDFPQAWAETGGMGLAVRQAPLIIPLKATSTPVSIKQYPMSQEARLGIKPHIQRLLDQGILVPCQSPWNTPLLPVKKPGTNDYRPVQDLREVNKRVEDIHPTVPNPYNLLSGLPPSHQWYTVLDLKDAFFCLRLHPTSQPLFAFEWRDPEMGISGQLTWTRLPQGFKNSPTLFNEALHRDLADFRIQHPDLILLQYVDDLLLAATSELDCQQGTRALLQTLGNLGYRASAKKAQICQKQVKYLGYLLKEGQRWLTEARKETVMGQPTPKTPRQLREFLGKAGFCRLFIPGFAEMAAPLYPLTKPGTLFNWGPDQQKAYQEIKQALLTAPALGLPDLTKPFELFVDEKQGYAKGVLTQKLGPWRRPVAYLSKKLDPVAAGWPPCLRMVAAIAVLTKDAGKLTMGQPLVILAPHAVEALVKQPPDRWLSNARMTHYQALLLDTDRVQFGPVVALNPATLLPLPEEGLQHNCLDILAEAHGTRPDLTDQPLPDADHTWYTDGSSLLQEGQRKAGAAVTTETEVIWAKALPAGTSAQRAELIALTQALKMAEGKKLNVYTDSRYAFATAHIHGEIYRRRGWLTSEGKEIKNKDEILALLKALFLPKRLSIIHCPGHQKGHSAEARGNRMADQAARKAAITETPDTSTLLIENSSPNSRLINSGGSSGGSSGSETPGTSESATPESSGGSSGGSGYTSDEEVLEVFRNTLNKNSEIFSSIKKLEKLFKNFDEYSSAGIFVKNGPAISTISKDIFGEWNVIRDKWNAEYDDIHLKKKAVVTEKYEDDRRKSFKKIGSFSLEQLQEYADADLSVVEKLKEIIIQKVDEIYKVYGSSEKLFDADFVLEKSLKKNDAVVAIMKDLLDSVKSFENYIKAFFGEGKETNRDESFYGDFVLAYDILLKVDHIYDAIRNYVTQKPYSKDKFKLYFQNPQFMGGWDKDKETDYRATILRYGSKYYLAIMDKKYAKCLQKIDKDDVNGNYEKINYKLLPGPNKMLPKVFFSKKWMAYYNPSEDIQKIYKNGTFKKGDMFNLNDCHKLIDFFKDSISRYPKWSNAYDFNFSETEKYKDIAGFYREVEEQGYKVSFESASKKEVDKLVEEGKLYMFQIYNKDFSDKSHGTPNLHTMYFKLLFDENNHGQIRLSGGAELFMRRASLKKEELVVHPANSPIANKNPDNPKKTTTLSYDVYKDKRFSEDQYELHIPIAINKCPKNIFKINTEVRVLLKHDDNPYVIGIDRGERNLLYIVVVDGKGNIVEQYSLNEIINNFNGIRIKTDYHSLLDKKEKERFEARQNWTSIENIKELKAGYISQVVHKICELVEKYDAVIALEDLNSGFKNSRVKVEKQVYQKFEKMLIDKLNYMVDKKSNPCATGGALKGYQITNKFESFKSMSTQNGFIFYIPAWLTSKIDPSTGFVNLLKTKYTSIADSKKFISSFDRIMYVPEEDLFEFALDYKNFSRTDADYIKKWKLYSYGNRIRIFRNPKKNNVFDWEEVCLTSAYKELFNKYGINYQQGDIRALLCEQSDKAFYSSFMALMSLMLQMRNSITGRTDVDFLISPVKNSDGIFYDSRNYEAQENAILPKNADANGAYNIARKVLWAIGQFKKAEDEKLDKVKIAISNKEWLEYAQTSVKHGSSGSSGSSGSSGSSGSKLEKFTNCYSLSKTLRFKAIPVGKTQENIDNKRLLVEDEKRAEDYKGVKKLLDRYYLSFINDVLHSIKLKNLNNYISLFRKKTRTEKENKELENLEINLRKEIAKAFKGNEGYKSLFKKDIIETILPEFLDDKDEIALVNSFNGFTTAFTGFFDNRENMFSEEAKSTSIAFRCINENLTRYISNMDIFEKVDAIFDKHEVQEIKEKILNSDYDVEDFFEGEFFNFVLTQEGIDVYNAIIGGFVTESGEKIKGLNEYINLYNQKTKQKLPKFKPLYKQVLSDRESLSFYGESGGSSGGSSGSETPGTSESATPESSGGSSGGSALDFLSRLPLPPPVSPICTFVSPAAQKAFQPPRSCG

SEQ ID NO: 353 - protein, 2026 aa, synthetic construct
TLNIEDEHRLHETSKEPDVSLGSTWLSDFPQAWAETGGMGLAVRQAPLIIPLKATSTPVSIKQYPMSQEARLGIKPHIQRLLDQGILVPCQSPWNTPLLPVKKPGTNDYRPVQDLREVNKRVEDIHPTVPNPYNLLSGLPPSHQWYTVLDLKDAFFCLRLHPTSQPLFAFEWRDPEMGISGQLTWTRLPQGFKNSPTLFNEALHRDLADFRIQHPDLILLQYVDDLLLAATSELDCQQGTRALLQTLGNLGYRASAKKAQICQKQVKYLGYLLKEGQRWLTEARKETVMGQPTPKTPRQLREFLGKAGFCRLFIPGFAEMAAPLYPLTKPGTLFNWGPDQQKAYQEIKQALLTAPALGLPDLTKPFELFVDEKQGYAKGVLTQKLGPWRRPVAYLSKKLDPVAAGWPPCLRMVAAIAVLTKDAGKLTMGQPLVILAPHAVEALVKQPPDRWLSNARMTHYQALLLDTDRVQFGPVVALNPATLLPLPEEGLQHNCLDILAEAHGTRPDLTDQPLPDADHTWYTDGSSLLQEGQRKAGAAVTTETEVIWAKALPAGTSAQRAELIALTQALKMAEGKKLNVYTDSRYAFATAHIHGEIYRRRGWLTSEGKEIKNKDEILALLKALFLPKRLSIIHCPGHQKGHSAEARGNRMADQAARKAAITETPDTSTLLIENSSPNSRLINSGGSSGGSSGSETPGTSESATPESSGGSSGGSSDGIFYDSRNYEAQENAILPKNADANGAYNIARKVLWAIGQFKKAEDEKLDKVKIAISNKEWLEYAQTSVKHGSSGSSGSSGSSGSSGSKLEKFTNCYSLSKTLRFKAIPVGKTQENIDNKRLLVEDEKRAEDYKGVKKLLDRYYLSFINDVLHSIKLKNLNNYISLFRKKTRTEKENKELENLEINLRKEIAKAFKGNEGYKSLFKKDIIETILPEFLDDKDEIALVNSFNGFTTAFTGFFDNRENMFSEEAKSTSIAFRCINENLTRYISNMDIFEKVDAIFDKHEVQEIKEKILNSDYDVEDFFEGEFFNFVLTQEGIDVYNAIIGGFVTESGEKIKGLNEYINLYNQKTKQKLPKFKPLYKQVLSDRESLSFYGEGYTSDEEVLEVFRNTLNKNSEIFSSIKKLEKLFKNFDEYSSAGIFVKNGPAISTISKDIFGEWNVIRDKWNAEYDDIHLKKKAVVTEKYEDDRRKSFKKIGSFSLEQLQEYADADLSVVEKLKEIIIQKVDEIYKVYGSSEKLFDADFVLEKSLKKNDAVVAIMKDLLDSVKSFENYIKAFFGEGKETNRDESFYGDFVLAYDILLKVDHIYDAIRNYVTQKPYSKDKFKLYFQNPQFMGGWDKDKETDYRATILRYGSKYYLAIMDKKYAKCLQKIDKDDVNGNYEKINYKLLPGPNKMLPKVFFSKKWMAYYNPSEDIQKIYKNGTFKKGDMFNLNDCHKLIDFFKDSISRYPKWSNAYDFNFSETEKYKDIAGFYREVEEQGYKVSFESASKKEVDKLVEEGKLYMFQIYNKDFSDKSHGTPNLHTMYFKLLFDENNHGQIRLSGGAELFMRRASLKKEELVVHPANSPIANKNPDNPKKTTTLSYDVYKDKRFSEDQYELHIPIAINKCPKNIFKINTEVRVLLKHDDNPYVIGIDRGERNLLYIVVVDGKGNIVEQYSLNEIINNFNGIRIKTDYHSLLDKKEKERFEARQNWTSIENIKELKAGYISQVVHKICELVEKYDAVIALEDLNSGFKNSRVKVEKQVYQKFEKMLIDKLNYMVDKKSNPCATGGALKGYQITNKFESFKSMSTQNGFIFYIPAWLTSKIDPSTGFVNLLKTKYTSIADSKKFISSFDRIMYVPEEDLFEFALDYKNFSRTDADYIKKWKLYSYGNRIRIFRNPKKNNVFDWEEVCLTSAYKELFNKYGINYQQGDIRALLCEQSDKAFYSSFMALMSLMLQMRNSITGRTDVDFLISPVKNSGGSSGGSSGSETPGTSESATPESSGGSSGGSALDFLSRLPLPPPVSPICTFVSPAAQKAFQPPRSCG

SEQ ID NO: 354 - protein, 2026 aa, synthetic construct
TLNIEDEHRLHETSKEPDVSLGSTWLSDFPQAWAETGGMGLAVRQAPLIIPLKATSTPVSIKQYPMSQEARLGIKPHIQRLLDQGILVPCQSPWNTPLLPVKKPGTNDYRPVQDLREVNKRVEDIHPTVPNPYNLLSGLPPSHQWYTVLDLKDAFFCLRLHPTSQPLFAFEWRDPEMGISGQLTWTRLPQGFKNSPTLFNEALHRDLADFRIQHPDLILLQYVDDLLLAATSELDCQQGTRALLQTLGNLGYRASAKKAQICQKQVKYLGYLLKEGQRWLTEARKETVMGQPTPKTPRQLREFLGKAGFCRLFIPGFAEMAAPLYPLTKPGTLFNWGPDQQKAYQEIKQALLTAPALGLPDLTKPFELFVDEKQGYAKGVLTQKLGPWRRPVAYLSKKLDPVAAGWPPCLRMVAAIAVLTKDAGKLTMGQPLVILAPHAVEALVKQPPDRWLSNARMTHYQALLLDTDRVQFGPVVALNPATLLPLPEEGLQHNCLDILAEAHGTRPDLTDQPLPDADHTWYTDGSSLLQEGQRKAGAAVTTETEVIWAKALPAGTSAQRAELIALTQALKMAEGKKLNVYTDSRYAFATAHIHGEIYRRRGWLTSEGKEIKNKDEILALLKALFLPKRLSIIHCPGHQKGHSAEARGNRMADQAARKAAITETPDTSTLLIENSSPNSRLINSGGSSGGSSGSETPGTSESATPESSGGSSGGSKDKFKLYFQNPQFMGGWDKDKETDYRATILRYGSKYYLAIMDKKYAKCLQKIDKDDVNGNYEKINYKLLPGPNKMLPKVFFSKKWMAYYNPSEDIQKIYKNGTFKKGDMFNLNDCHKLIDFFKDSISRYPKWSNAYDFNFSETEKYKDIAGFYREVEEQGYKVSFESASKKEVDKLVEEGKLYMFQIYNKDFSDKSHGTPNLHTMYFKLLFDENNHGQIRLSGGAELFMRRASLKKEELVVHPANSPIANKNPDNPKKTTTLSYDVYKDKRFSEDQYELHIPIAINKCPKNIFKINTEVRVLLKHDDNPYVIGIDRGERNLLYIVVVDGKGNIVEQYSLNEIINNFNGIRIKTDYHSLLDKKEKERFEARQNWTSIENIKELKAGYISQVVHKICELVEKYDAVIALEDLNSGFKNSRVKVEKQVYQKFEKMLIDKLNYMVDKKSNPCATGGALKGYQITNKFESFKSMSTQNGFIFYIPAWLTSKIDPSTGFVNLLKTKYTSIADSKKFISSFDRIMYVPEEDLFEFALDYKNFSRTDADYIKKWKLYSYGNRIRIFRNPKKNNVFDWEEVCLTSAYKELFNKYGINYQQGDIRALLCEQSDKAFYSSFMALMSLMLQMRNSITGRTDVDFLISPVKNSDGIFYDSRNYEAQENAILPKNADANGAYNIARKVLWAIGQFKKAEDEKLDKVKIAISNKEWLEYAQTSVKHGSSGSSGSSGSSGSSGSKLEKFTNCYSLSKTLRFKAIPVGKTQENIDNKRLLVEDEKRAEDYKGVKKLLDRYYLSFINDVLHSIKLKNLNNYISLFRKKTRTEKENKELENLEINLRKEIAKAFKGNEGYKSLFKKDIIETILPEFLDDKDEIALVNSFNGFTTAFTGFFDNRENMFSEEAKSTSIAFRCINENLTRYISNMDIFEKVDAIFDKHEVQEIKEKILNSDYDVEDFFEGEFFNFVLTQEGIDVYNAIIGGFVTESGEKIKGLNEYINLYNQKTKQKLPKFKPLYKQVLSDRESLSFYGEGYTSDEEVLEVFRNTLNKNSEIFSSIKKLEKLFKNFDEYSSAGIFVKNGPAISTISKDIFGEWNVIRDKWNAEYDDIHLKKKAVVTEKYEDDRRKSFKKIGSFSLEQLQEYADADLSVVEKLKEIIIQKVDEIYKVYGSSEKLFDADFVLEKSLKKNDAVVAIMKDLLDSVKSFENYIKAFFGEGKETNRDESFYGDFVLAYDILLKVDHIYDAIRNYVTQKPYSSGGSSGGSSGSETPGTSESATPESSGGSSGGSALDFLSRLPLPPPVSPICTFVSPAAQKAFQPPRSCG

SEQ ID NO: 355 - protein, 2026 aa, synthetic construct
TLNIEDEHRLHETSKEPDVSLGSTWLSDFPQAWAETGGMGLAVRQAPLIIPLKATSTPVSIKQYPMSQEARLGIKPHIQRLLDQGILVPCQSPWNTPLLPVKKPGTNDYRPVQDLREVNKRVEDIHPTVPNPYNLLSGLPPSHQWYTVLDLKDAFFCLRLHPTSQPLFAFEWRDPEMGISGQLTWTRLPQGFKNSPTLFNEALHRDLADFRIQHPDLILLQYVDDLLLAATSELDCQQGTRALLQTLGNLGYRASAKKAQICQKQVKYLGYLLKEGQRWLTEARKETVMGQPTPKTPRQLREFLGKAGFCRLFIPGFAEMAAPLYPLTKPGTLFNWGPDQQKAYQEIKQALLTAPALGLPDLTKPFELFVDEKQGYAKGVLTQKLGPWRRPVAYLSKKLDPVAAGWPPCLRMVAAIAVLTKDAGKLTMGQPLVILAPHAVEALVKQPPDRWLSNARMTHYQALLLDTDRVQFGPVVALNPATLLPLPEEGLQHNCLDILAEAHGTRPDLTDQPLPDADHTWYTDGSSLLQEGQRKAGAAVTTETEVIWAKALPAGTSAQRAELIALTQALKMAEGKKLNVYTDSRYAFATAHIHGEIYRRRGWLTSEGKEIKNKDEILALLKALFLPKRLSIIHCPGHQKGHSAEARGNRMADQAARKAAITETPDTSTLLIENSSPNSRLINSGGSSGGSSGSETPGTSESATPESSGGSSGGSKSLKKNDAVVAIMKDLLDSVKSFENYIKAFFGEGKETNRDESFYGDFVLAYDILLKVDHIYDAIRNYVTQKPYSKDKFKLYFQNPQFMGGWDKDKETDYRATILRYGSKYYLAIMDKKYAKCLQKIDKDDVNGNYEKINYKLLPGPNKMLPKVFFSKKWMAYYNPSEDIQKIYKNGTFKKGDMFNLNDCHKLIDFFKDSISRYPKWSNAYDFNFSETEKYKDIAGFYREVEEQGYKVSFESASKKEVDKLVEEGKLYMFQIYNKDFSDKSHGTPNLHTMYFKLLFDENNHGQIRLSGGAELFMRRASLKKEELVVHPANSPIANKNPDNPKKTTTLSYDVYKDKRFSEDQYELHIPIAINKCPKNIFKINTEVRVLLKHDDNPYVIGIDRGERNLLYIVVVDGKGNIVEQYSLNEIINNFNGIRIKTDYHSLLDKKEKERFEARQNWTSIENIKELKAGYISQVVHKICELVEKYDAVIALEDLNSGFKNSRVKVEKQVYQKFEKMLIDKLNYMVDKKSNPCATGGALKGYQITNKFESFKSMSTQNGFIFYIPAWLTSKIDPSTGFVNLLKTKYTSIADSKKFISSFDRIMYVPEEDLFEFALDYKNFSRTDADYIKKWKLYSYGNRIRIFRNPKKNNVFDWEEVCLTSAYKELFNKYGINYQQGDIRALLCEQSDKAFYSSFMALMSLMLQMRNSITGRTDVDFLISPVKNSDGIFYDSRNYEAQENAILPKNADANGAYNIARKVLWAIGQFKKAEDEKLDKVKIAISNKEWLEYAQTSVKHGSSGSSGSSGSSGSSGSKLEKFTNCYSLSKTLRFKAIPVGKTQENIDNKRLLVEDEKRAEDYKGVKKLLDRYYLSFINDVLHSIKLKNLNNYISLFRKKTRTEKENKELENLEINLRKEIAKAFKGNEGYKSLFKKDIIETILPEFLDDKDEIALVNSFNGFTTAFTGFFDNRENMFSEEAKSTSIAFRCINENLTRYISNMDIFEKVDAIFDKHEVQEIKEKILNSDYDVEDFFEGEFFNFVLTQEGIDVYNAIIGGFVTESGEKIKGLNEYINLYNQKTKQKLPKFKPLYKQVLSDRESLSFYGEGYTSDEEVLEVFRNTLNKNSEIFSSIKKLEKLFKNFDEYSSAGIFVKNGPAISTISKDIFGEWNVIRDKWNAEYDDIHLKKKAVVTEKYEDDRRKSFKKIGSFSLEQLQEYADADLSVVEKLKEIIIQKVDEIYKVYGSSEKLFDADFVLESGGSSGGSSGSETPGTSESATPESSGGSSGGSALDFLSRLPLPPPVSPICTFVSPAAQKAFQPPRSCG

SEQ ID NO: 356 - protein, 2026 aa, synthetic construct
TLNIEDEHRLHETSKEPDVSLGSTWLSDFPQAWAETGGMGLAVRQAPLIIPLKATSTPVSIKQYPMSQEARLGIKPHIQRLLDQGILVPCQSPWNTPLLPVKKPGTNDYRPVQDLREVNKRVEDIHPTVPNPYNLLSGLPPSHQWYTVLDLKDAFFCLRLHPTSQPLFAFEWRDPEMGISGQLTWTRLPQGFKNSPTLFNEALHRDLADFRIQHPDLILLQYVDDLLLAATSELDCQQGTRALLQTLGNLGYRASAKKAQICQKQVKYLGYLLKEGQRWLTEARKETVMGQPTPKTPRQLREFLGKAGFCRLFIPGFAEMAAPLYPLTKPGTLFNWGPDQQKAYQEIKQALLTAPALGLPDLTKPFELFVDEKQGYAKGVLTQKLGPWRRPVAYLSKKLDPVAAGWPPCLRMVAAIAVLTKDAGKLTMGQPLVILAPHAVEALVKQPPDRWLSNARMTHYQALLLDTDRVQFGPVVALNPATLLPLPEEGLQHNCLDILAEAHGTRPDLTDQPLPDADHTWYTDGSSLLQEGQRKAGAAVTTETEVIWAKALPAGTSAQRAELIALTQALKMAEGKKLNVYTDSRYAFATAHIHGEIYRRRGWLTSEGKEIKNKDEILALLKALFLPKRLSIIHCPGHQKGHSAEARGNRMADQAARKAAITETPDTSTLLIENSSPNSRLINSGGSSGGSSGSETPGTSESATPESSGGSSGGSSDKAFYSSFMALMSLMLQMRNSITGRTDVDFLISPVKNSDGIFYDSRNYEAQENAILPKNADANGAYNIARKVLWAIGQFKKAEDEKLDKVKIAISNKEWLEYAQTSVKHGSSGSSGSSGSSGSSGSKLEKFTNCYSLSKTLRFKAIPVGKTQENIDNKRLLVEDEKRAEDYKGVKKLLDRYYLSFINDVLHSIKLKNLNNYISLFRKKTRTEKENKELENLEINLRKEIAKAFKGNEGYKSLFKKDIIETILPEFLDDKDEIALVNSFNGFTTAFTGFFDNRENMFSEEAKSTSIAFRCINENLTRYISNMDIFEKVDAIFDKHEVQEIKEKILNSDYDVEDFFEGEFFNFVLTQEGIDVYNAIIGGFVTESGEKIKGLNEYINLYNQKTKQKLPKFKPLYKQVLSDRESLSFYGEGYTSDEEVLEVFRNTLNKNSEIFSSIKKLEKLFKNFDEYSSAGIFVKNGPAISTISKDIFGEWNVIRDKWNAEYDDIHLKKKAVVTEKYEDDRRKSFKKIGSFSLEQLQEYADADLSVVEKLKEIIIQKVDEIYKVYGSSEKLFDADFVLEKSLKKNDAVVAIMKDLLDSVKSFENYIKAFFGEGKETNRDESFYGDFVLAYDILLKVDHIYDAIRNYVTQKPYSKDKFKLYFQNPQFMGGWDKDKETDYRATILRYGSKYYLAIMDKKYAKCLQKIDKDDVNGNYEKINYKLLPGPNKMLPKVFFSKKWMAYYNPSEDIQKIYKNGTFKKGDMFNLNDCHKLIDFFKDSISRYPKWSNAYDFNFSETEKYKDIAGFYREVEEQGYKVSFESASKKEVDKLVEEGKLYMFQIYNKDFSDKSHGTPNLHTMYFKLLFDENNHGQIRLSGGAELFMRRASLKKEELVVHPANSPIANKNPDNPKKTTTLSYDVYKDKRFSEDQYELHIPIAINKCPKNIFKINTEVRVLLKHDDNPYVIGIDRGERNLLYIVVVDGKGNIVEQYSLNEIINNFNGIRIKTDYHSLLDKKEKERFEARQNWTSIENIKELKAGYISQVVHKICELVEKYDAVIALEDLNSGFKNSRVKVEKQVYQKFEKMLIDKLNYMVDKKSNPCATGGALKGYQITNKFESFKSMSTQNGFIFYIPAWLTSKIDPSTGFVNLLKTKYTSIADSKKFISSFDRIMYVPEEDLFEFALDYKNFSRTDADYIKKWKLYSYGNRIRIFRNPKKNNVFDWEEVCLTSAYKELFNKYGINYQQGDIRALLCEQSGGSSGGSSGSETPGTSESATPESSGGSSGGSALDFLSRLPLPPPVSPICTFVSPAAQKAFQPPRSCG

SEQ ID NO: 357 - protein, 2026 aa, synthetic construct
ALDFLSRLPLPPPVSPICTFVSPAAQKAFQPPRSCGSGGSSGGSSGSETPGTSESATPESSGGSSGGSRTEKENKELENLEINLRKEIAKAFKGNEGYKSLFKKDIIETILPEFLDDKDEIALVNSFNGFTTAFTGFFDNRENMFSEEAKSTSIAFRCINENLTRYISNMDIFEKVDAIFDKHEVQEIKEKILNSDYDVEDFFEGEFFNFVLTQEGIDVYNAIIGGFVTESGEKIKGLNEYINLYNQKTKQKLPKFKPLYKQVLSDRESLSFYGEGYTSDEEVLEVFRNTLNKNSEIFSSIKKLEKLFKNFDEYSSAGIFVKNGPAISTISKDIFGEWNVIRDKWNAEYDDIHLKKKAVVTEKYEDDRRKSFKKIGSFSLEQLQEYADADLSVVEKLKEIIIQKVDEIYKVYGSSEKLFDADFVLEKSLKKNDAVVAIMKDLLDSVKSFENYIKAFFGEGKETNRDESFYGDFVLAYDILLKVDHIYDAIRNYVTQKPYSKDKFKLYFQNPQFMGGWDKDKETDYRATILRYGSKYYLAIMDKKYAKCLQKIDKDDVNGNYEKINYKLLPGPNKMLPKVFFSKKWMAYYNPSEDIQKIYKNGTFKKGDMFNLNDCHKLIDFFKDSISRYPKWSNAYDFNFSETEKYKDIAGFYREVEEQGYKVSFESASKKEVDKLVEEGKLYMFQIYNKDFSDKSHGTPNLHTMYFKLLFDENNHGQIRLSGGAELFMRRASLKKEELVVHPANSPIANKNPDNPKKTTTLSYDVYKDKRFSEDQYELHIPIAINKCPKNIFKINTEVRVLLKHDDNPYVIGIDRGERNLLYIVVVDGKGNIVEQYSLNEIINNFNGIRIKTDYHSLLDKKEKERFEARQNWTSIENIKELKAGYISQVVHKICELVEKYDAVIALEDLNSGFKNSRVKVEKQVYQKFEKMLIDKLNYMVDKKSNPCATGGALKGYQITNKFESFKSMSTQNGFIFYIPAWLTSKIDPSTGFVNLLKTKYTSIADSKKFISSFDRIMYVPEEDLFEFALDYKNFSRTDADYIKKWKLYSYGNRIRIFRNPKKNNVFDWEEVCLTSAYKELFNKYGINYQQGDIRALLCEQSDKAFYSSFMALMSLMLQMRNSITGRTDVDFLISPVKNSDGIFYDSRNYEAQENAILPKNADANGAYNIARKVLWAIGQFKKAEDEKLDKVKIAISNKEWLEYAQTSVKHGSSGSSGSSGSSGSSGSKLEKFTNCYSLSKTLRFKAIPVGKTQENIDNKRLLVEDEKRAEDYKGVKKLLDRYYLSFINDVLHSIKLKNLNNYISLFRKKTSGGSSGGSSGSETPGTSESATPESSGGSSGGSTLNIEDEHRLHETSKEPDVSLGSTWLSDFPQAWAETGGMGLAVRQAPLIIPLKATSTPVSIKQYPMSQEARLGIKPHIQRLLDQGILVPCQSPWNTPLLPVKKPGTNDYRPVQDLREVNKRVEDIHPTVPNPYNLLSGLPPSHQWYTVLDLKDAFFCLRLHPTSQPLFAFEWRDPEMGISGQLTWTRLPQGFKNSPTLFNEALHRDLADFRIQHPDLILLQYVDDLLLAATSELDCQQGTRALLQTLGNLGYRASAKKAQICQKQVKYLGYLLKEGQRWLTEARKETVMGQPTPKTPRQLREFLGKAGFCRLFIPGFAEMAAPLYPLTKPGTLFNWGPDQQKAYQEIKQALLTAPALGLPDLTKPFELFVDEKQGYAKGVLTQKLGPWRRPVAYLSKKLDPVAAGWPPCLRMVAAIAVLTKDAGKLTMGQPLVILAPHAVEALVKQPPDRWLSNARMTHYQALLLDTDRVQFGPVVALNPATLLPLPEEGLQHNCLDILAEAHGTRPDLTDQPLPDADHTWYTDGSSLLQEGQRKAGAAVTTETEVIWAKALPAGTSAQRAELIALTQALKMAEGKKLNVYTDSRYAFATAHIHGEIYRRRGWLTSEGKEIKNKDEILALLKALFLPKRLSIIHCPGHQKGHSAEARGNRMADQAARKAAITETPDTSTLLIENSSPNSRLIN

SEQ ID NO: 358 - protein, 2026 aa, synthetic construct
ALDFLSRLPLPPPVSPICTFVSPAAQKAFQPPRSCGSGGSSGGSSGSETPGTSESATPESSGGSSGGSGYTSDEEVLEVFRNTLNKNSEIFSSIKKLEKLFKNFDEYSSAGIFVKNGPAISTISKDIFGEWNVIRDKWNAEYDDIHLKKKAVVTEKYEDDRRKSFKKIGSFSLEQLQEYADADLSVVEKLKEIIIQKVDEIYKVYGSSEKLFDADFVLEKSLKKNDAVVAIMKDLLDSVKSFENYIKAFFGEGKETNRDESFYGDFVLAYDILLKVDHIYDAIRNYVTQKPYSKDKFKLYFQNPQFMGGWDKDKETDYRATILRYGSKYYLAIMDKKYAKCLQKIDKDDVNGNYEKINYKLLPGPNKMLPKVFFSKKWMAYYNPSEDIQKIYKNGTFKKGDMFNLNDCHKLIDFFKDSISRYPKWSNAYDFNFSETEKYKDIAGFYREVEEQGYKVSFESASKKEVDKLVEEGKLYMFQIYNKDFSDKSHGTPNLHTMYFKLLFDENNHGQIRLSGGAELFMRRASLKKEELVVHPANSPIANKNPDNPKKTTTLSYDVYKDKRFSEDQYELHIPIAINKCPKNIFKINTEVRVLLKHDDNPYVIGIDRGERNLLYIVVVDGKGNIVEQYSLNEIINNFNGIRIKTDYHSLLDKKEKERFEARQNWTSIENIKELKAGYISQVVHKICELVEKYDAVIALEDLNSGFKNSRVKVEKQVYQKFEKMLIDKLNYMVDKKSNPCATGGALKGYQITNKFESFKSMSTQNGFIFYIPAWLTSKIDPSTGFVNLLKTKYTSIADSKKFISSFDRIMYVPEEDLFEFALDYKNFSRTDADYIKKWKLYSYGNRIRIFRNPKKNNVFDWEEVCLTSAYKELFNKYGINYQQGDIRALLCEQSDKAFYSSFMALMSLMLQMRNSITGRTDVDFLISPVKNSDGIFYDSRNYEAQENAILPKNADANGAYNIARKVLWAIGQFKKAEDEKLDKVKIAISNKEWLEYAQTSVKHGSSGSSGSSGSSGSSGSKLEKFTNCYSLSKTLRFKAIPVGKTQENIDNKRLLVEDEKRAEDYKGVKKLLDRYYLSFINDVLHSIKLKNLNNYISLFRKKTRTEKENKELENLEINLRKEIAKAFKGNEGYKSLFKKDIIETILPEFLDDKDEIALVNSFNGFTTAFTGFFDNRENMFSEEAKSTSIAFRCINENLTRYISNMDIFEKVDAIFDKHEVQEIKEKILNSDYDVEDFFEGEFFNFVLTQEGIDVYNAIIGGFVTESGEKIKGLNEYINLYNQKTKQKLPKFKPLYKQVLSDRESLSFYGESGGSSGGSSGSETPGTSESATPESSGGSSGGSTLNIEDEHRLHETSKEPDVSLGSTWLSDFPQAWAETGGMGLAVRQAPLIIPLKATSTPVSIKQYPMSQEARLGIKPHIQRLLDQGILVPCQSPWNTPLLPVKKPGTNDYRPVQDLREVNKRVEDIHPTVPNPYNLLSGLPPSHQWYTVLDLKDAFFCLRLHPTSQPLFAFEWRDPEMGISGQLTWTRLPQGFKNSPTLFNEALHRDLADFRIQHPDLILLQYVDDLLLAATSELDCQQGTRALLQTLGNLGYRASAKKAQICQKQVKYLGYLLKEGQRWLTEARKETVMGQPTPKTPRQLREFLGKAGFCRLFIPGFAEMAAPLYPLTKPGTLFNWGPDQQKAYQEIKQALLTAPALGLPDLTKPFELFVDEKQGYAKGVLTQKLGPWRRPVAYLSKKLDPVAAGWPPCLRMVAAIAVLTKDAGKLTMGQPLVILAPHAVEALVKQPPDRWLSNARMTHYQALLLDTDRVQFGPVVALNPATLLPLPEEGLQHNCLDILAEAHGTRPDLTDQPLPDADHTWYTDGSSLLQEGQRKAGAAVTTETEVIWAKALPAGTSAQRAELIALTQALKMAEGKKLNVYTDSRYAFATAHIHGEIYRRRGWLTSEGKEIKNKDEILALLKALFLPKRLSIIHCPGHQKGHSAEARGNRMADQAARKAAITETPDTSTLLIENSSPNSRLIN

SEQ ID NO: 359 - protein, 2026 aa, synthetic construct
ALDFLSRLPLPPPVSPICTFVSPAAQKAFQPPRSCGSGGSSGGSSGSETPGTSESATPESSGGSSGGSSDGIFYDSRNYEAQENAILPKNADANGAYNIARKVLWAIGQFKKAEDEKLDKVKIAISNKEWLEYAQTSVKHGSSGSSGSSGSSGSSGSKLEKFTNCYSLSKTLRFKAIPVGKTQENIDNKRLLVEDEKRAEDYKGVKKLLDRYYLSFINDVLHSIKLKNLNNYISLFRKKTRTEKENKELENLEINLRKEIAKAFKGNEGYKSLFKKDIIETILPEFLDDKDEIALVNSFNGFTTAFTGFFDNRENMFSEEAKSTSIAFRCINENLTRYISNMDIFEKVDAIFDKHEVQEIKEKILNSDYDVEDFFEGEFFNFVLTQEGIDVYNAIIGGFVTESGEKIKGLNEYINLYNQKTKQKLPKFKPLYKQVLSDRESLSFYGEGYTSDEEVLEVFRNTLNKNSEIFSSIKKLEKLFKNFDEYSSAGIFVKNGPAISTISKDIFGEWNVIRDKWNAEYDDIHLKKKAVVTEKYEDDRRKSFKKIGSFSLEQLQEYADADLSVVEKLKEIIIQKVDEIYKVYGSSEKLFDADFVLEKSLKKNDAVVAIMKDLLDSVKSFENYIKAFFGEGKETNRDESFYGDFVLAYDILLKVDHIYDAIRNYVTQKPYSKDKFKLYFQNPQFMGGWDKDKETDYRATILRYGSKYYLAIMDKKYAKCLQKIDKDDVNGNYEKINYKLLPGPNKMLPKVFFSKKWMAYYNPSEDIQKIYKNGTFKKGDMFNLNDCHKLIDFFKDSISRYPKWSNAYDFNFSETEKYKDIAGFYREVEEQGYKVSFESASKKEVDKLVEEGKLYMFQIYNKDFSDKSHGTPNLHTMYFKLLFDENNHGQIRLSGGAELFMRRASLKKEELVVHPANSPIANKNPDNPKKTTTLSYDVYKDKRFSEDQYELHIPIAINKCPKNIFKINTEVRVLLKHDDNPYVIGIDRGERNLLYIVVVDGKGNIVEQYSLNEIINNFNGIRIKTDYHSLLDKKEKERFEARQNWTSIENIKELKAGYISQVVHKICELVEKYDAVIALEDLNSGFKNSRVKVEKQVYQKFEKMLIDKLNYMVDKKSNPCATGGALKGYQITNKFESFKSMSTQNGFIFYIPAWLTSKIDPSTGFVNLLKTKYTSIADSKKFISSFDRIMYVPEEDLFEFALDYKNFSRTDADYIKKWKLYSYGNRIRIFRNPKKNNVFDWEEVCLTSAYKELFNKYGINYQQGDIRALLCEQSDKAFYSSFMALMSLMLQMRNSITGRTDVDFLISPVKNSGGSSGGSSGSETPGTSESATPESSGGSSGGSTLNIEDEHRLHETSKEPDVSLGSTWLSDFPQAWAETGGMGLAVRQAPLIIPLKATSTPVSIKQYPMSQEARLGIKPHIQRLLDQGILVPCQSPWNTPLLPVKKPGTNDYRPVQDLREVNKRVEDIHPTVPNPYNLLSGLPPSHQWYTVLDLKDAFFCLRLHPTSQPLFAFEWRDPEMGISGQLTWTRLPQGFKNSPTLFNEALHRDLADFRIQHPDLILLQYVDDLLLAATSELDCQQGTRALLQTLGNLGYRASAKKAQICQKQVKYLGYLLKEGQRWLTEARKETVMGQPTPKTPRQLREFLGKAGFCRLFIPGFAEMAAPLYPLTKPGTLFNWGPDQQKAYQEIKQALLTAPALGLPDLTKPFELFVDEKQGYAKGVLTQKLGPWRRPVAYLSKKLDPVAAGWPPCLRMVAAIAVLTKDAGKLTMGQPLVILAPHAVEALVKQPPDRWLSNARMTHYQALLLDTDRVQFGPVVALNPATLLPLPEEGLQHNCLDILAEAHGTRPDLTDQPLPDADHTWYTDGSSLLQEGQRKAGAAVTTETEVIWAKALPAGTSAQRAELIALTQALKMAEGKKLNVYTDSRYAFATAHIHGEIYRRRGWLTSEGKEIKNKDEILALLKALFLPKRLSIIHCPGHQKGHSAEARGNRMADQAARKAAITETPDTSTLLIENSSPNSRLIN

SEQ ID NO: 360 - protein, 2026 aa, synthetic construct
ALDFLSRLPLPPPVSPICTFVSPAAQKAFQPPRSCGSGGSSGGSSGSETPGTSESATPESSGGSSGGSKDKFKLYFQNPQFMGGWDKDKETDYRATILRYGSKYYLAIMDKKYAKCLQKIDKDDVNGNYEKINYKLLPGPNKMLPKVFFSKKWMAYYNPSEDIQKIYKNGTFKKGDMFNLNDCHKLIDFFKDSISRYPKWSNAYDFNFSETEKYKDIAGFYREVEEQGYKVSFESASKKEVDKLVEEGKLYMFQIYNKDFSDKSHGTPNLHTMYFKLLFDENNHGQIRLSGGAELFMRRASLKKEELVVHPANSPIANKNPDNPKKTTTLSYDVYKDKRFSEDQYELHIPIAINKCPKNIFKINTEVRVLLKHDDNPYVIGIDRGERNLLYIVVVDGKGNIVEQYSLNEIINNFNGIRIKTDYHSLLDKKEKERFEARQNWTSIENIKELKAGYISQVVHKICELVEKYDAVIALEDLNSGFKNSRVKVEKQVYQKFEKMLIDKLNYMVDKKSNPCATGGALKGYQITNKFESFKSMSTQNGFIFYIPAWLTSKIDPSTGFVNLLKTKYTSIADSKKFISSFDRIMYVPEEDLFEFALDYKNFSRTDADYIKKWKLYSYGNRIRIFRNPKKNNVFDWEEVCLTSAYKELFNKYGINYQQGDIRALLCEQSDKAFYSSFMALMSLMLQMRNSITGRTDVDFLISPVKNSDGIFYDSRNYEAQENAILPKNADANGAYNIARKVLWAIGQFKKAEDEKLDKVKIAISNKEWLEYAQTSVKHGSSGSSGSSGSSGSSGSKLEKFTNCYSLSKTLRFKAIPVGKTQENIDNKRLLVEDEKRAEDYKGVKKLLDRYYLSFINDVLHSIKLKNLNNYISLFRKKTRTEKENKELENLEINLRKEIAKAFKGNEGYKSLFKKDIIETILPEFLDDKDEIALVNSFNGFTTAFTGFFDNRENMFSEEAKSTSIAFRCINENLTRYISNMDIFEKVDAIFDKHEVQEIKEKILNSDYDVEDFFEGEFFNFVLTQEGIDVYNAIIGGFVTESGEKIKGLNEYINLYNQKTKQKLPKFKPLYKQVLSDRESLSFYGEGYTSDEEVLEVFRNTLNKNSEIFSSIKKLEKLFKNFDEYSSAGIFVKNGPAISTISKDIFGEWNVIRDKWNAEYDDIHLKKKAVVTEKYEDDRRKSFKKIGSFSLEQLQEYADADLSVVEKLKEIIIQKVDEIYKVYGSSEKLFDADFVLEKSLKKNDAVVAIMKDLLDSVKSFENYIKAFFGEGKETNRDESFYGDFVLAYDILLKVDHIYDAIRNYVTQKPYSSGGSSGGSSGSETPGTSESATPESSGGSSGGSTLNIEDEHRLHETSKEPDVSLGSTWLSDFPQAWAETGGMGLAVRQAPLIIPLKATSTPVSIKQYPMSQEARLGIKPHIQRLLDQGILVPCQSPWNTPLLPVKKPGTNDYRPVQDLREVNKRVEDIHPTVPNPYNLLSGLPPSHQWYTVLDLKDAFFCLRLHPTSQPLFAFEWRDPEMGISGQLTWTRLPQGFKNSPTLFNEALHRDLADFRIQHPDLILLQYVDDLLLAATSELDCQQGTRALLQTLGNLGYRASAKKAQICQKQVKYLGYLLKEGQRWLTEARKETVMGQPTPKTPRQLREFLGKAGFCRLFIPGFAEMAAPLYPLTKPGTLFNWGPDQQKAYQEIKQALLTAPALGLPDLTKPFELFVDEKQGYAKGVLTQKLGPWRRPVAYLSKKLDPVAAGWPPCLRMVAAIAVLTKDAGKLTMGQPLVILAPHAVEALVKQPPDRWLSNARMTHYQALLLDTDRVQFGPVVALNPATLLPLPEEGLQHNCLDILAEAHGTRPDLTDQPLPDADHTWYTDGSSLLQEGQRKAGAAVTTETEVIWAKALPAGTSAQRAELIALTQALKMAEGKKLNVYTDSRYAFATAHIHGEIYRRRGWLTSEGKEIKNKDEILALLKALFLPKRLSIIHCPGHQKGHSAEARGNRMADQAARKAAITETPDTSTLLIENSSPNSRLIN

SEQ ID NO: 361 - protein, 2026 aa, synthetic construct
ALDFLSRLPLPPPVSPICTFVSPAAQKAFQPPRSCGSGGSSGGSSGSETPGTSESATPESSGGSSGGSKSLKKNDAVVAIMKDLLDSVKSFENYIKAFFGEGKETNRDESFYGDFVLAYDILLKVDHIYDAIRNYVTQKPYSKDKFKLYFQNPQFMGGWDKDKETDYRATILRYGSKYYLAIMDKKYAKCLQKIDKDDVNGNYEKINYKLLPGPNKMLPKVFFSKKWMAYYNPSEDIQKIYKNGTFKKGDMFNLNDCHKLIDFFKDSISRYPKWSNAYDFNFSETEKYKDIAGFYREVEEQGYKVSFESASKKEVDKLVEEGKLYMFQIYNKDFSDKSHGTPNLHTMYFKLLFDENNHGQIRLSGGAELFMRRASLKKEELVVHPANSPIANKNPDNPKKTTTLSYDVYKDKRFSEDQYELHIPIAINKCPKNIFKINTEVRVLLKHDDNPYVIGIDRGERNLLYIVVVDGKGNIVEQYSLNEIINNFNGIRIKTDYHSLLDKKEKERFEARQNWTSIENIKELKAGYISQVVHKICELVEKYDAVIALEDLNSGFKNSRVKVEKQVYQKFEKMLIDKLNYMVDKKSNPCATGGALKGYQITNKFESFKSMSTQNGFIFYIPAWLTSKIDPSTGFVNLLKTKYTSIADSKKFISSFDRIMYVPEEDLFEFALDYKNFSRTDADYIKKWKLYSYGNRIRIFRNPKKNNVFDWEEVCLTSAYKELFNKYGINYQQGDIRALLCEQSDKAFYSSFMALMSLMLQMRNSITGRTDVDFLISPVKNSDGIFYDSRNYEAQENAILPKNADANGAYNIARKVLWAIGQFKKAEDEKLDKVKIAISNKEWLEYAQTSVKHGSSGSSGSSGSSGSSGSKLEKFTNCYSLSKTLRFKAIPVGKTQENIDNKRLLVEDEKRAEDYKGVKKLLDRYYLSFINDVLHSIKLKNLNNYISLFRKKTRTEKENKELENLEINLRKEIAKAFKGNEGYKSLFKKDIIETILPEFLDDKDEIALVNSFNGFTTAFTGFFDNRENMFSEEAKSTSIAFRCINENLTRYISNMDIFEKVDAIFDKHEVQEIKEKILNSDYDVEDFFEGEFFNFVLTQEGIDVYNAIIGGFVTESGEKIKGLNEYINLYNQKTKQKLPKFKPLYKQVLSDRESLSFYGEGYTSDEEVLEVFRNTLNKNSEIFSSIKKLEKLFKNFDEYSSAGIFVKNGPAISTISKDIFGEWNVIRDKWNAEYDDIHLKKKAVVTEKYEDDRRKSFKKIGSFSLEQLQEYADADLSVVEKLKEIIIQKVDEIYKVYGSSEKLFDADFVLESGGSSGGSSGSETPGTSESATPESSGGSSGGSTLNIEDEHRLHETSKEPDVSLGSTWLSDFPQAWAETGGMGLAVRQAPLIIPLKATSTPVSIKQYPMSQEARLGIKPHIQRLLDQGILVPCQSPWNTPLLPVKKPGTNDYRPVQDLREVNKRVEDIHPTVPNPYNLLSGLPPSHQWYTVLDLKDAFFCLRLHPTSQPLFAFEWRDPEMGISGQLTWTRLPQGFKNSPTLFNEALHRDLADFRIQHPDLILLQYVDDLLLAATSELDCQQGTRALLQTLGNLGYRASAKKAQICQKQVKYLGYLLKEGQRWLTEARKETVMGQPTPKTPRQLREFLGKAGFCRLFIPGFAEMAAPLYPLTKPGTLFNWGPDQQKAYQEIKQALLTAPALGLPDLTKPFELFVDEKQGYAKGVLTQKLGPWRRPVAYLSKKLDPVAAGWPPCLRMVAAIAVLTKDAGKLTMGQPLVILAPHAVEALVKQPPDRWLSNARMTHYQALLLDTDRVQFGPVVALNPATLLPLPEEGLQHNCLDILAEAHGTRPDLTDQPLPDADHTWYTDGSSLLQEGQRKAGAAVTTETEVIWAKALPAGTSAQRAELIALTQALKMAEGKKLNVYTDSRYAFATAHIHGEIYRRRGWLTSEGKEIKNKDEILALLKALFLPKRLSIIHCPGHQKGHSAEARGNRMADQAARKAAITETPDTSTLLIENSSPNSRLIN

SEQ ID NO: 362 - protein, 2026 aa, synthetic construct
ALDFLSRLPLPPPVSPICTFVSPAAQKAFQPPRSCGSGGSSGGSSGSETPGTSESATPESSGGSSGGSSDKAFYSSFMALMSLMLQMRNSITGRTDVDFLISPVKNSDGIFYDSRNYEAQENAILPKNADANGAYNIARKVLWAIGQFKKAEDEKLDKVKIAISNKEWLEYAQTSVKHGSSGSSGSSGSSGSSGSKLEKFTNCYSLSKTLRFKAIPVGKTQENIDNKRLLVEDEKRAEDYKGVKKLLDRYYLSFINDVLHSIKLKNLNNYISLFRKKTRTEKENKELENLEINLRKEIAKAFKGNEGYKSLFKKDIIETILPEFLDDKDEIALVNSFNGFTTAFTGFFDNRENMFSEEAKSTSIAFRCINENLTRYISNMDIFEKVDAIFDKHEVQEIKEKILNSDYDVEDFFEGEFFNFVLTQEGIDVYNAIIGGFVTESGEKIKGLNEYINLYNQKTKQKLPKFKPLYKQVLSDRESLSFYGEGYTSDEEVLEVFRNTLNKNSEIFSSIKKLEKLFKNFDEYSSAGIFVKNGPAISTISKDIFGEWNVIRDKWNAEYDDIHLKKKAVVTEKYEDDRRKSFKKIGSFSLEQLQEYADADLSVVEKLKEIIIQKVDEIYKVYGSSEKLFDADFVLEKSLKKNDAVVAIMKDLLDSVKSFENYIKAFFGEGKETNRDESFYGDFVLAYDILLKVDHIYDAIRNYVTQKPYSKDKFKLYFQNPQFMGGWDKDKETDYRATILRYGSKYYLAIMDKKYAKCLQKIDKDDVNGNYEKINYKLLPGPNKMLPKVFFSKKWMAYYNPSEDIQKIYKNGTFKKGDMFNLNDCHKLIDFFKDSISRYPKWSNAYDFNFSETEKYKDIAGFYREVEEQGYKVSFESASKKEVDKLVEEGKLYMFQIYNKDFSDKSHGTPNLHTMYFKLLFDENNHGQIRLSGGAELFMRRASLKKEELVVHPANSPIANKNPDNPKKTTTLSYDVYKDKRFSEDQYELHIPIAINKCPKNIFKINTEVRVLLKHDDNPYVIGIDRGERNLLYIVVVDGKGNIVEQYSLNEIINNFNGIRIKTDYHSLLDKKEKERFEARQNWTSIENIKELKAGYISQVVHKICELVEKYDAVIALEDLNSGFKNSRVKVEKQVYQKFEKMLIDKLNYMVDKKSNPCATGGALKGYQITNKFESFKSMSTQNGFIFYIPAWLTSKIDPSTGFVNLLKTKYTSIADSKKFISSFDRIMYVPEEDLFEFALDYKNFSRTDADYIKKWKLYSYGNRIRIFRNPKKNNVFDWEEVCLTSAYKELFNKYGINYQQGDIRALLCEQSGGSSGGSSGSETPGTSESATPESSGGSSGGSTLNIEDEHRLHETSKEPDVSLGSTWLSDFPQAWAETGGMGLAVRQAPLIIPLKATSTPVSIKQYPMSQEARLGIKPHIQRLLDQGILVPCQSPWNTPLLPVKKPGTNDYRPVQDLREVNKRVEDIHPTVPNPYNLLSGLPPSHQWYTVLDLKDAFFCLRLHPTSQPLFAFEWRDPEMGISGQLTWTRLPQGFKNSPTLFNEALHRDLADFRIQHPDLILLQYVDDLLLAATSELDCQQGTRALLQTLGNLGYRASAKKAQICQKQVKYLGYLLKEGQRWLTEARKETVMGQPTPKTPRQLREFLGKAGFCRLFIPGFAEMAAPLYPLTKPGTLFNWGPDQQKAYQEIKQALLTAPALGLPDLTKPFELFVDEKQGYAKGVLTQKLGPWRRPVAYLSKKLDPVAAGWPPCLRMVAAIAVLTKDAGKLTMGQPLVILAPHAVEALVKQPPDRWLSNARMTHYQALLLDTDRVQFGPVVALNPATLLPLPEEGLQHNCLDILAEAHGTRPDLTDQPLPDADHTWYTDGSSLLQEGQRKAGAAVTTETEVIWAKALPAGTSAQRAELIALTQALKMAEGKKLNVYTDSRYAFATAHIHGEIYRRRGWLTSEGKEIKNKDEILALLKALFLPKRLSIIHCPGHQKGHSAEARGNRMADQAARKAAITETPDTSTLLIENSSPNSRLIN

SEQ ID NO: 363 - protein, 2010 aa, synthetic construct
ALDFLSRLPLPPPVSPICTFVSPAAQKAFQPPRSCGSGGSSGGSSGSETPGTSESATPESSGGSSGGSSKLEKFTNCYSLSKTLRFKAIPVGKTQENIDNKRLLVEDEKRAEDYKGVKKLLDRYYLSFINDVLHSIKLKNLNNYISLFRKKTRTEKENKELENLEINLRKEIAKAFKGNEGYKSLFKKDIIETILPEFLDDKDEIALVNSFNGFTTAFTGFFDNRENMFSEEAKSTSIAFRCINENLTRYISNMDIFEKVDAIFDKHEVQEIKEKILNSDYDVEDFFEGEFFNFVLTQEGIDVYNAIIGGFVTESGEKIKGLNEYINLYNQKTKQKLPKFKPLYKQVLSDRESLSFYGEGYTSDEEVLEVFRNTLNKNSEIFSSIKKLEKLFKNFDEYSSAGIFVKNGPAISTISKDIFGEWNVIRDKWNAEYDDIHLKKKAVVTEKYEDDRRKSFKKIGSFSLEQLQEYADADLSVVEKLKEIIIQKVDEIYKVYGSSEKLFDADFVLEKSLKKNDAVVAIMKDLLDSVKSFENYIKAFFGEGKETNRDESFYGDFVLAYDILLKVDHIYDAIRNYVTQKPYSKDKFKLYFQNPQFMGGWDKDKETDYRATILRYGSKYYLAIMDKKYAKCLQKIDKDDVNGNYEKINYKLLPGPNKMLPKVFFSKKWMAYYNPSEDIQKIYKNGTFKKGDMFNLNDCHKLIDFFKDSISRYPKWSNAYDFNFSETEKYKDIAGFYREVEEQGYKVSFESASKKEVDKLVEEGKLYMFQIYNKDFSDKSHGTPNLHTMYFKLLFDENNHGQIRLSGGAELFMRRASLKKEELVVHPANSPIANKNPDNPKKTTTLSYDVYKDKRFSEDQYELHIPIAINKCPKNIFKINTEVRVLLKHDDNPYVIGIDRGERNLLYIVVVDGKGNIVEQYSLNEIINNFNGIRIKTDYHSLLDKKEKERFEARQNWTSIENIKELKAGYISQVVHKICELVEKYDAVIALEDLNSGFKNSRVKVEKQVYQKFEKMLIDKLNYMVDKKSNPCATGGALKGYQITNKFESFKSMSTQNGFIFYIPAWLTSKIDPSTGFVNLLKTKYTSIADSKKFISSFDRIMYVPEEDLFEFALDYKNFSRTDADYIKKWKLYSYGNRIRIFRNPKKNNVFDWEEVCLTSAYKELFNKYGINYQQGDIRALLCEQSDKAFYSSFMALMSLMLQMRNSITGRTDVDFLISPVKNSDGIFYDSRNYEAQENAILPKNADANGAYNIARKVLWAIGQFKKAEDEKLDKVKIAISNKEWLEYAQTSVKHSGGSSGGSSGSETPGTSESATPESSGGSSGGSTLNIEDEHRLHETSKEPDVSLGSTWLSDFPQAWAETGGMGLAVRQAPLIIPLKATSTPVSIKQYPMSQEARLGIKPHIQRLLDQGILVPCQSPWNTPLLPVKKPGTNDYRPVQDLREVNKRVEDIHPTVPNPYNLLSGLPPSHQWYTVLDLKDAFFCLRLHPTSQPLFAFEWRDPEMGISGQLTWTRLPQGFKNSPTLFNEALHRDLADFRIQHPDLILLQYVDDLLLAATSELDCQQGTRALLQTLGNLGYRASAKKAQICQKQVKYLGYLLKEGQRWLTEARKETVMGQPTPKTPRQLREFLGKAGFCRLFIPGFAEMAAPLYPLTKPGTLFNWGPDQQKAYQEIKQALLTAPALGLPDLTKPFELFVDEKQGYAKGVLTQKLGPWRRPVAYLSKKLDPVAAGWPPCLRMVAAIAVLTKDAGKLTMGQPLVILAPHAVEALVKQPPDRWLSNARMTHYQALLLDTDRVQFGPVVALNPATLLPLPEEGLQHNCLDILAEAHGTRPDLTDQPLPDADHTWYTDGSSLLQEGQRKAGAAVTTETEVIWAKALPAGTSAQRAELIALTQALKMAEGKKLNVYTDSRYAFATAHIHGEIYRRRGWLTSEGKEIKNKDEILALLKALFLPKRLSIIHCPGHQKGHSAEARGNRMADQAARKAAITETPDTSTLLIENSSPNSRLIN

SEQ ID NO: 364 - DNA, 6078 bp, synthetic construct
  source 1..6078: mol_type = other DNA
acacttaatattgaggatgaacatagattgcacgagacctctaaggaacctgatgtttctcttggatcaacttggttgtcagatttcccacaagcatgggcagagaccggaggtatgggtcttgctgttaggcaggcaccacttattattcctttgaaggcaacctctactcctgtgtcaattaagcaatatccaatgtctcaggaagctaggcttggaattaagcctcacattcaaagacttttggatcagggtattttggtgccatgtcaatcaccttggaacacaccacttttgcctgttaagaagcctggaactaatgattacagaccagtgcaagatttgagggaggttaacaagagagtggaagatattcacccaactgttccaaacccttataatcttttgtctggattgccaccttcacatcaatggtacactgtgcttgatttgaaggatgcatttttctgccttaggttgcatccaacatctcagcctctttttgctttcgagtggagagatcctgaaatgggaatttctggtcaacttacatggaccaggttgcctcagggtttcaagaactcaccaaccttgtttaatgaggcacttcacagggatttggctgattttaggattcaacatcctgatcttatccttttgcagtatgttgatgatcttttgcttgctgcaacttctgaattggattgtcaacagggaactagggcattgcttcaaacacttggaaatttgggttacagagcttcagcaaagaaggctcagatttgccaaaagcaggttaagtatcttggatacttgcttaaggaaggacaaaggtggttgaccgaggctagaaaggaaactgtgatgggtcaaccaacacctaagacccctaggcagcttagagagttcttgggaaaggcaggtttttgtaggcttttcattccaggatttgctgaaatggctgcaccactttatcctttgaccaagcctggaactttgtttaactggggtccagatcaacagaaggcataccaagaaattaagcaggctttgcttactgctccagcacttggtttgcctgatcttacaaagccatttgagttgttcgttgatgaaaagcaaggatatgcaaagggtgtgcttacccagaagttgggaccttggagaaggcctgttgcttacctttctaagaaacttgatccagtggctgcaggttggccaccttgtcttagaatggttgctgcaattgcagtgcttacaaaggatgctggaaagttgactatgggacaacctcttgttattttggcaccacacgctgttgaggcacttgtgaagcagccacctgataggtggttgtcaaacgcaagaatgacccattatcaagctcttcttttggatactgatagggtgcagttcggtcctgttgtggctttgaatccagcaacacttttgccacttcctgaggaaggattgcaacacaactgccttgatattttggctgaggcacatggtacaagacctgatcttaccgatcagccattgcctgatgctgatcacacttggtacacagatggatcttcacttttgcaagaaggacagaggaaggctggtgctgcagttactacagagactgaagtgatttgggctaaggcacttccagctggaacatctgctcaaagagcagagcttattgctttgacccaggcacttaagatggctgaaggaaagaagttgaacgtttacactgattctaggtatgctttcgcaacagctcatattcacggagaaatctatagaaggagaggatggttgacatcagagggaaaggaaattaagaacaaggatgaaattcttgcacttttgaaggctctttttcttcctaagagattgtctattattcattgcccaggacaccaaaagggtcattcagcagaagctaggggaaatagaatggctgatcaggctgcaagaaaggctgcaattactgagacacctgatacctctactcttttgatcgaaaactcttcaccaaattcaaggcttattaactctggtggttcaagcggaggctcatctggcagcgaaactccgggcacttccgagtcagctactcctgagtctagcggcgggtcgtcaggagggtctcgcaccgagaaggagaacaaggagctggagaacctggagatcaacctccgcaaggaaatcgccaaagcgttcaagggcaatgaagggtacaagagcctcttcaagaaagacatcatcgaaactatcctcccagagtttctcgatgacaaggacgagatcgcgctggtgaactcctttaacgggttcacaaccgcgtttaccggcttctttgataacagggaaaatatgttctccgaggaggccaagtccaccagcatcgccttcaggtgtatcaacgagaacctcacccgctacatttccaatatggacattttcgagaaggtggatgcgatcttcgataagcacgaggtgcaggagatcaaagagaagattctcaattccgattatgacgtcgaggatttcttcgaaggggagttctttaattttgtgctcacacaagagggcattgacgtgtacaacgcgattatcgggggcttcgtcacagagtccggggagaagattaaggggctgaatgagtacatcaatctgtacaatcagaagaccaagcagaaactgccgaaattcaagccgctctacaagcaagtcctgtccgatagggaaagcctctccttctacggcgagggctataccagcgacgaggaggtgctggaagtcttccgcaacacactgaataagaatagcgagattttctcctccatcaagaagctcgagaagctctttaagaactttgacgagtacagctccgccgggattttcgtgaagaacgggccggcgatcagcaccatctccaaggacatctttggcgagtggaacgtcatcagggacaagtggaacgccgagtacgacgacatccacctgaagaagaaggcggtggtgaccgagaagtatgaggacgatcgcaggaagtccttcaaaaaaatcggctccttcagcctcgaacagctccaggagtatgccgatgcggatctgtccgtcgtcgagaagctgaaggaaatcatcattcagaaggtcgacgagatctataaagtgtacgggtccagcgagaagctgttcgacgccgactttgtgctcgagaagtccctcaaaaagaatgacgccgtggtggccattatgaaagacctgctcgactccgtgaagtccttcgaaaattacattaaagcgttctttggggaggggaaggaaactaacagggatgagtccttctatggcgactttgtcctcgcgtacgacatcctgctgaaggtcgaccacatttacgacgcgatccgcaactacgtgacacagaagccgtactccaaagacaagttcaagctgtacttccagaacccgcaatttatggggggctgggacaaggataaagagacagactaccgcgcgacaattctccgctatggctccaaatactatctggccatcatggacaagaagtacgcgaagtgcctgcagaagatcgacaaagacgacgtcaatggcaactatgaaaagatcaactacaagctgctgccgggcccgaacaagatgctcccgaaggtgttcttcagcaagaagtggatggcctactacaatccaagcgaggatattcagaaaatctataaaaacgggaccttcaagaagggggacatgtttaacctcaacgactgccacaagctcattgatttcttcaaggatagcatttcccgctacccgaaatggtccaatgcgtacgattttaacttctccgagacagaaaagtacaaagacatcgcgggcttttacagggaggtggaggagcaagggtataaagtttcttttgaatccgcgagcaagaaggaagtcgacaagctcgtcgaggagggcaagctctacatgttccaaatttataacaaggacttttccgacaagagccatgggaccccaaacctccacaccatgtacttcaaactgctctttgacgagaacaaccacgggcaaatcaggctgagcggcggcgccgaattattcatgcgcagggcctccctcaagaaggaagagctggtcgtccatccagccaattccccgatcgcgaacaagaacccggacaatccgaaaaagaccaccaccctgtcctacgacgtctacaaggacaaacgcttcagcgaagaccagtacgaattacacatcccaattgcgattaataagtgcccaaagaatatcttcaaaattaatacagaggtcagggtgctgctcaaacacgacgacaatccgtatgtcatcggcattgacaggggcgagcgcaatctgctctatatcgtggtcgtggatgggaagggcaatattgtggagcagtactccctgaacgagattatcaacaacttcaatgggattaggattaagaccgactatcacagcctgctcgacaagaaagaaaaagagaggtttgaggcccgccaaaactggacctccattgagaatatcaaagaattaaaggccggctatatttcccaagtcgtccacaagatctgcgagctggtggagaaatatgacgccgtgattgcgctcgaagacttaaattctgggttcaagaactcccgcgtgaaggtggaaaaacaggtgtatcagaaattcgagaaaatgctgatcgacaaactcaattatatggtggataagaagtccaacccgtgtgccacagggggcgcgctgaagggctatcagatcaccaacaagttcgagagcttcaagagcatgagcacccagaacgggtttattttctacatcccggcgtggctcacctccaagattgacccgagcaccggcttcgtgaacctcctgaagacaaagtatacctccattgccgacagcaagaagtttatctcctccttcgaccgcattatgtatgtgccggaggaggacctcttcgagttcgccctcgactacaaaaacttcagccgcacagatgcggattacatcaagaagtggaagctgtactcctacgggaacaggatccgcatcttcaggaatccaaaaaaaaataacgtctttgactgggaggaagtgtgcctgacatccgcctacaaggaactgttcaataaatacggcatcaattaccagcagggcgacattcgcgccctcctctgtgagcagtccgacaaagcgttttactccagcttcatggccctcatgtccctgatgctccaaatgaggaatagcatcacagggcgcaccgacgtcgacttcctcatcagcccggtgaagaactccgacgggatcttttacgactcccgcaactatgaggcgcaagagaatgcgatcctcccgaagaacgccgatgcgaacggggcctataatatcgccaggaaagtgctctgggccatcgggcagttcaaaaaggcggaggatgagaagctcgacaaggtgaaaattgccatttccaacaaggagtggctggagtacgcgcagacctccgtgaagcacggctcctctggcagctccggctctagcggctcctctggcagctccggctccaagctggagaagtttacaaactgttacagcctctccaaaaccctcaggtttaaagcgatcccggtgggcaagacccaggagaacatcgacaacaagaggctcctggtggaagacgagaagcgcgccgaagactacaagggcgtgaagaagctgctcgataggtactacctcagctttattaacgacgtgctgcacagcatcaaactcaagaatctcaacaactacatctccctcttccgcaaaaagacctctggtggttcaagcggaggctcatctggcagcgaaactccgggcacttccgagtcagctactcctgagtctagcggcgggtcgtcaggagggtctgctcttgattttctttctaggcttccattgccacctccagtttctccaatttgtacttttgtgtcacctgctgcacaaaaggcattccagcctccaaggtcatgcgga

SEQ ID NO: 365 - DNA, 6078 bp, synthetic construct
  source 1..6078: mol_type = other DNA
acacttaatattgaggatgaacatagattgcacgagacctctaaggaacctgatgtttctcttggatcaacttggttgtcagatttcccacaagcatgggcagagaccggaggtatgggtcttgctgttaggcaggcaccacttattattcctttgaaggcaacctctactcctgtgtcaattaagcaatatccaatgtctcaggaagctaggcttggaattaagcctcacattcaaagacttttggatcagggtattttggtgccatgtcaatcaccttggaacacaccacttttgcctgttaagaagcctggaactaatgattacagaccagtgcaagatttgagggaggttaacaagagagtggaagatattcacccaactgttccaaacccttataatcttttgtctggattgccaccttcacatcaatggtacactgtgcttgatttgaaggatgcatttttctgccttaggttgcatccaacatctcagcctctttttgctttcgagtggagagatcctgaaatgggaatttctggtcaacttacatggaccaggttgcctcagggtttcaagaactcaccaaccttgtttaatgaggcacttcacagggatttggctgattttaggattcaacatcctgatcttatccttttgcagtatgttgatgatcttttgcttgctgcaacttctgaattggattgtcaacagggaactagggcattgcttcaaacacttggaaatttgggttacagagcttcagcaaagaaggctcagatttgccaaaagcaggttaagtatcttggatacttgcttaaggaaggacaaaggtggttgaccgaggctagaaaggaaactgtgatgggtcaaccaacacctaagacccctaggcagcttagagagttcttgggaaaggcaggtttttgtaggcttttcattccaggatttgctgaaatggctgcaccactttatcctttgaccaagcctggaactttgtttaactggggtccagatcaacagaaggcataccaagaaattaagcaggctttgcttactgctccagcacttggtttgcctgatcttacaaagccatttgagttgttcgttgatgaaaagcaaggatatgcaaagggtgtgcttacccagaagttgggaccttggagaaggcctgttgcttacctttctaagaaacttgatccagtggctgcaggttggccaccttgtcttagaatggttgctgcaattgcagtgcttacaaaggatgctggaaagttgactatgggacaacctcttgttattttggcaccacacgctgttgaggcacttgtgaagcagccacctgataggtggttgtcaaacgcaagaatgacccattatcaagctcttcttttggatactgatagggtgcagttcggtcctgttgtggctttgaatccagcaacacttttgccacttcctgaggaaggattgcaacacaactgccttgatattttggctgaggcacatggtacaagacctgatcttaccgatcagccattgcctgatgctgatcacacttggtacacagatggatcttcacttttgcaagaaggacagaggaaggctggtgctgcagttactacagagactgaagtgatttgggctaaggcacttccagctggaacatctgctcaaagagcagagcttattgctttgacccaggcacttaagatggctgaaggaaagaagttgaacgtttacactgattctaggtatgctttcgcaacagctcatattcacggagaaatctatagaaggagaggatggttgacatcagagggaaaggaaattaagaacaaggatgaaattcttgcacttttgaaggctctttttcttcctaagagattgtctattattcattgcccaggacaccaaaagggtcattcagcagaagctaggggaaatagaatggctgatcaggctgcaagaaaggctgcaattactgagacacctgatacctctactcttttgatcgaaaactcttcaccaaattcaaggcttattaactctggtggttcaagcggaggctcatctggcagcgaaactccgggcacttccgagtcagctactcctgagtctagcggcgggtcgtcaggagggtctggctataccagcgacgaggaggtgctggaagtcttccgcaacacactgaataagaatagcgagattttctcctccatcaagaagctcgagaagctctttaagaactttgacgagtacagctccgccgggattttcgtgaagaacgggccggcgatcagcaccatctccaaggacatctttggcgagtggaacgtcatcagggacaagtggaacgccgagtacgacgacatccacctgaagaagaaggcggtggtgaccgagaagtatgaggacgatcgcaggaagtccttcaaaaaaatcggctccttcagcctcgaacagctccaggagtatgccgatgcggatctgtccgtcgtcgagaagctgaaggaaatcatcattcagaaggtcgacgagatctataaagtgtacgggtccagcgagaagctgttcgacgccgactttgtgctcgagaagtccctcaaaaagaatgacgccgtggtggccattatgaaagacctgctcgactccgtgaagtccttcgaaaattacattaaagcgttctttggggaggggaaggaaactaacagggatgagtccttctatggcgactttgtcctcgcgtacgacatcctgctgaaggtcgaccacatttacgacgcgatccgcaactacgtgacacagaagccgtactccaaagacaagttcaagctgtacttccagaacccgcaatttatggggggctgggacaaggataaagagacagactaccgcgcgacaattctccgctatggctccaaatactatctggccatcatggacaagaagtacgcgaagtgcctgcagaagatcgacaaagacgacgtcaatggcaactatgaaaagatcaactacaagctgctgccgggcccgaacaagatgctcccgaaggtgttcttcagcaagaagtggatggcctactacaatccaagcgaggatattcagaaaatctataaaaacgggaccttcaagaagggggacatgtttaacctcaacgactgccacaagctcattgatttcttcaaggatagcatttcccgctacccgaaatggtccaatgcgtacgattttaacttctccgagacagaaaagtacaaagacatcgcgggcttttacagggaggtggaggagcaagggtataaagtttcttttgaatccgcgagcaagaaggaagtcgacaagctcgtcgaggagggcaagctctacatgttccaaatttataacaaggacttttccgacaagagccatgggaccccaaacctccacaccatgtacttcaaactgctctttgacgagaacaaccacgggcaaatcaggctgagcggcggcgccgaattattcatgcgcagggcctccctcaagaaggaagagctggtcgtccatccagccaattccccgatcgcgaacaagaacccggacaatccgaaaaagaccaccaccctgtcctacgacgtctacaaggacaaacgcttcagcgaagaccagtacgaattacacatcccaattgcgattaataagtgcccaaagaatatcttcaaaattaatacagaggtcagggtgctgctcaaacacgacgacaatccgtatgtcatcggcattgacaggggcgagcgcaatctgctctatatcgtggtcgtggatgggaagggcaatattgtggagcagtactccctgaacgagattatcaacaacttcaatgggattaggattaagaccgactatcacagcctgctcgacaagaaagaaaaagagaggtttgaggcccgccaaaactggacctccattgagaatatcaaagaattaaaggccggctatatttcccaagtcgtccacaagatctgcgagctggtggagaaatatgacgccgtgattgcgctcgaagacttaaattctgggttcaagaactcccgcgtgaaggtggaaaaacaggtgtatcagaaattcgagaaaatgctgatcgacaaactcaattatatggtggataagaagtccaacccgtgtgccacagggggcgcgctgaagggctatcagatcaccaacaagttcgagagcttcaagagcatgagcacccagaacgggtttattttctacatcccggcgtggctcacctccaagattgacccgagcaccggcttcgtgaacctcctgaagacaaagtatacctccattgccgacagcaagaagtttatctcctccttcgaccgcattatgtatgtgccggaggaggacctcttcgagttcgccctcgactacaaaaacttcagccgcacagatgcggattacatcaagaagtggaagctgtactcctacgggaacaggatccgcatcttcaggaatccaaaaaaaaataacgtctttgactgggaggaagtgtgcctgacatccgcctacaaggaactgttcaataaatacggcatcaattaccagcagggcgacattcgcgccctcctctgtgagcagtccgacaaagcgttttactccagcttcatggccctcatgtccctgatgctccaaatgaggaatagcatcacagggcgcaccgacgtcgacttcctcatcagcccggtgaagaactccgacgggatcttttacgactcccgcaactatgaggcgcaagagaatgcgatcctcccgaagaacgccgatgcgaacggggcctataatatcgccaggaaagtgctctgggccatcgggcagttcaaaaaggcggaggatgagaagctcgacaaggtgaaaattgccatttccaacaaggagtggctggagtacgcgcagacctccgtgaagcacggctcctctggcagctccggctctagcggctcctctggcagctccggctccaagctggagaagtttacaaactgttacagcctctccaaaaccctcaggtttaaagcgatcccggtgggcaagacccaggagaacatcgacaacaagaggctcctggtggaagacgagaagcgcgccgaagactacaagggcgtgaagaagctgctcgataggtactacctcagctttattaacgacgtgctgcacagcatcaaactcaagaatctcaacaactacatctccctcttccgcaaaaagacccgcaccgagaaggagaacaaggagctggagaacctggagatcaacctccgcaaggaaatcgccaaagcgttcaagggcaatgaagggtacaagagcctcttcaagaaagacatcatcgaaactatcctcccagagtttctcgatgacaaggacgagatcgcgctggtgaactcctttaacgggttcacaaccgcgtttaccggcttctttgataacagggaaaatatgttctccgaggaggccaagtccaccagcatcgccttcaggtgtatcaacgagaacctcacccgctacatttccaatatggacattttcgagaaggtggatgcgatcttcgataagcacgaggtgcaggagatcaaagagaagattctcaattccgattatgacgtcgaggatttcttcgaaggggagttctttaattttgtgctcacacaagagggcattgacgtgtacaacgcgattatcgggggcttcgtcacagagtccggggagaagattaaggggctgaatgagtacatcaatctgtacaatcagaagaccaagcagaaactgccgaaattcaagccgctctacaagcaagtcctgtccgatagggaaagcctctccttctacggcgagtctggtggttcaagcggaggctcatctggcagcgaaactccgggcacttccgagtcagctactcctgagtctagcggcgggtcgtcaggagggtctgctcttgattttctttctaggcttccattgccacctccagtttctccaatttgtacttttgtgtcacctgctgcacaaaaggcattccagcctccaaggtcatgcgga

SEQ ID NO: 366 - DNA, 6078 bp, synthetic construct
  source 1..6078: mol_type = other DNA
acacttaatattgaggatgaacatagattgcacgagacctctaaggaacctgatgtttctcttggatcaacttggttgtcagatttcccacaagcatgggcagagaccggaggtatgggtcttgctgttaggcaggcaccacttattattcctttgaaggcaacctctactcctgtgtcaattaagcaatatccaatgtctcaggaagctaggcttggaattaagcctcacattcaaagacttttggatcagggtattttggtgccatgtcaatcaccttggaacacaccacttttgcctgttaagaagcctggaactaatgattacagaccagtgcaagatttgagggaggttaacaagagagtggaagatattcacccaactgttccaaacccttataatcttttgtctggattgccaccttcacatcaatggtacactgtgcttgatttgaaggatgcatttttctgccttaggttgcatccaacatctcagcctctttttgctttcgagtggagagatcctgaaatgggaatttctggtcaacttacatggaccaggttgcctcagggtttcaagaactcaccaaccttgtttaatgaggcacttcacagggatttggctgattttaggattcaacatcctgatcttatccttttgcagtatgttgatgatcttttgcttgctgcaacttctgaattggattgtcaacagggaactagggcattgcttcaaacacttggaaatttgggttacagagcttcagcaaagaaggctcagatttgccaaaagcaggttaagtatcttggatacttgcttaaggaaggacaaaggtggttgaccgaggctagaaaggaaactgtgatgggtcaaccaacacctaagacccctaggcagcttagagagttcttgggaaaggcaggtttttgtaggcttttcattccaggatttgctgaaatggctgcaccactttatcctttgaccaagcctggaactttgtttaactggggtccagatcaacagaaggcataccaagaaattaagcaggctttgcttactgctccagcacttggtttgcctgatcttacaaagccatttgagttgttcgttgatgaaaagcaaggatatgcaaagggtgtgcttacccagaagttgggaccttggagaaggcctgttgcttacctttctaagaaacttgatccagtggctgcaggttggccaccttgtcttagaatggttgctgcaattgcagtgcttacaaaggatgctggaaagttgactatgggacaacctcttgttattttggcaccacacgctgttgaggcacttgtgaagcagccacctgataggtggttgtcaaacgcaagaatgacccattatcaagctcttcttttggatactgatagggtgcagttcggtcctgttgtggctttgaatccagcaacacttttgccacttcctgaggaaggattgcaacacaactgccttgatattttggctgaggcacatggtacaagacctgatcttaccgatcagccattgcctgatgctgatcacacttggtacacagatggatcttcacttttgcaagaaggacagaggaaggctggtgctgcagttactacagagactgaagtgatttgggctaaggcacttccagctggaacatctgctcaaagagcagagcttattgctttgacccaggcacttaagatggctgaaggaaagaagttgaacgtttacactgattctaggtatgctttcgcaacagctcatattcacggagaaatctatagaaggagaggatggttgacatcagagggaaaggaaattaagaacaaggatgaaattcttgcacttttgaaggctctttttcttcctaagagattgtctattattcattgcccaggacaccaaaagggtcattcagcagaagctaggggaaatagaatggctgatcaggctgcaagaaaggctgcaattactgagacacctgatacctctactcttttgatcgaaaactcttcaccaaattcaaggcttattaactctggtggttcaagcggaggctcatctggcagcgaaactccgggcacttccgagtcagctactcctgagtctagcggcgggtcgtcaggagggtcttccgacgggatcttttacgactcccgcaactatgaggcgcaagagaatgcgatcctcccgaagaacgccgatgcgaacggggcctataatatcgccaggaaagtgctctgggccatcgggcagttcaaaaaggcggaggatgagaagctcgacaaggtgaaaattgccatttccaacaaggagtggctggagtacgcgcagacctccgtgaagcacggctcctctggcagctccggctctagcggctcctctggcagctccggctccaagctggagaagtttacaaactgttacagcctctccaaaaccctcaggtttaaagcgatcccggtgggcaagacccaggagaacatcgacaacaagaggctcctggtggaagacgagaagcgcgccgaagactacaagggcgtgaagaagctgctcgataggtactacctcagctttattaacgacgtgctgcacagcatcaaactcaagaatctcaacaactacatctccctcttccgcaaaaagacccgcaccgagaaggagaacaaggagctggagaacctggagatcaacctccgcaaggaaatcgccaaagcgttcaagggcaatgaagggtacaagagcctcttcaagaaagacatcatcgaaactatcctcccagagtttctcgatgacaaggacgagatcgcgctggtgaactcctttaacgggttcacaaccgcgtttaccggcttctttgataacagggaaaatatgttctccgaggaggccaagtccaccagcatcgccttcaggtgtatcaacgagaacctcacccgctacatttccaatatggacattttcgagaaggtggatgcgatcttcgataagcacgaggtgcaggagatcaaagagaagattctcaattccgattatgacgtcgaggatttcttcgaaggggagttctttaattttgtgctcacacaagagggcattgacgtgtacaacgcgattatcgggggcttcgtcacagagtccggggagaagattaaggggctgaatgagtacatcaatctgtacaatcagaagaccaagcagaaactgccgaaattcaagccgctctacaagcaagtcctgtccgatagggaaagcctctccttctacggcgagggctataccagcgacgaggaggtgctggaagtcttccgcaacacactgaataagaatagcgagattttctcctccatcaagaagctcgagaagctctttaagaactttgacgagtacagctccgccgggattttcgtgaagaacgggccggcgatcagcaccatctccaaggacatctttggcgagtggaacgtcatcagggacaagtggaacgccgagtacgacgacatccacctgaagaagaaggcggtggtgaccgagaagtatgaggacgatcgcaggaagtccttcaaaaaaatcggctccttcagcctcgaacagctccaggagtatgccgatgcggatctgtccgtcgtcgagaagctgaaggaaatcatcattcagaaggtcgacgagatctataaagtgtacgggtccagcgagaagctgttcgacgccgactttgtgctcgagaagtccctcaaaaagaatgacgccgtggtggccattatgaaagacctgctcgactccgtgaagtccttcgaaaattacattaaagcgttctttggggaggggaaggaaactaacagggatgagtccttctatggcgactttgtcctcgcgtacgacatcctgctgaaggtcgaccacatttacgacgcgatccgcaactacgtgacacagaagccgtactccaaagacaagttcaagctgtacttccagaacccgcaatttatggggggctgggacaaggataaagagacagactaccgcgcgacaattctccgctatggctccaaatactatctggccatcatggacaagaagtacgcgaagtgcctgcagaagatcgacaaagacgacgtcaatggcaactatgaaaagatcaactacaagctgctgccgggcccgaacaagatgctcccgaaggtgttcttcagcaagaagtggatggcctactacaatccaagcgaggatattcagaaaatctataaaaacgggaccttcaagaagggggacatgtttaacctcaacgactgccacaagctcattgatttcttcaaggatagcatttcccgctacccgaaatggtccaatgcgtacgattttaacttctccgagacagaaaagtacaaagacatcgcgggcttttacagggaggtggaggagcaagggtataaagtttcttttgaatccgcgagcaagaaggaagtcgacaagctcgtcgaggagggcaagctctacatgttccaaatttataacaaggacttttccgacaagagccatgggaccccaaacctccacaccatgtacttcaaactgctctttgacgagaacaaccacgggcaaatcaggctgagcggcggcgccgaattattcatgcgcagggcctccctcaagaaggaagagctggtcgtccatccagccaattccccgatcgcgaacaagaacccggacaatccgaaaaagaccaccaccctgtcctacgacgtctacaaggacaaacgcttcagcgaagaccagtacgaattacacatcccaattgcgattaataagtgcccaaagaatatcttcaaaattaatacagaggtcagggtgctgctcaaacacgacgacaatccgtatgtcatcggcattgacaggggcgagcgcaatctgctctatatcgtggtcgtggatgggaagggcaatattgtggagcagtactccctgaacgagattatcaacaacttcaatgggattaggattaagaccgactatcacagcctgctcgacaagaaagaaaaagagaggtttgaggcccgccaaaactggacctccattgagaatatcaaagaattaaaggccggctatatttcccaagtcgtccacaagatctgcgagctggtggagaaatatgacgccgtgattgcgctcgaagacttaaattctgggttcaagaactcccgcgtgaaggtggaaaaacaggtgtatcagaaattcgagaaaatgctgatcgacaaactcaattatatggtggataagaagtccaacccgtgtgccacagggggcgcgctgaagggctatcagatcaccaacaagttcgagagcttcaagagcatgagcacccagaacgggtttattttctacatcccggcgtggctcacctccaagattgacccgagcaccggcttcgtgaacctcctgaagacaaagtatacctccattgccgacagcaagaagtttatctcctccttcgaccgcattatgtatgtgccggaggaggacctcttcgagttcgccctcgactacaaaaacttcagccgcacagatgcggattacatcaagaagtggaagctgtactcctacgggaacaggatccgcatcttcaggaatccaaaaaaaaataacgtctttgactgggaggaagtgtgcctgacatccgcctacaaggaactgttcaataaatacggcatcaattaccagcagggcgacattcgcgccctcctctgtgagcagtccgacaaagcgttttactccagcttcatggccctcatgtccctgatgctccaaatgaggaatagcatcacagggcgcaccgacgtcgacttcctcatcagcccggtgaagaactctggtggttcaagcggaggctcatctggcagcgaaactccgggcacttccgagtcagctactcctgagtctagcggcgggtcgtcaggagggtctgctcttgattttctttctaggcttccattgccacctccagtttctccaatttgtacttttgtgtcacctgctgcacaaaaggcattccagcctccaaggtcatgcgga

SEQ ID NO: 367 - DNA, 6078 bp, synthetic construct
  source 1..6078: mol_type = other DNA
acacttaatattgaggatgaacatagattgcacgagacctctaaggaacctgatgtttctcttggatcaacttggttgtcagatttcccacaagcatgggcagagaccggaggtatgggtcttgctgttaggcaggcaccacttattattcctttgaaggcaacctctactcctgtgtcaattaagcaatatccaatgtctcaggaagctaggcttggaattaagcctcacattcaaagacttttggatcagggtattttggtgccatgtcaatcaccttggaacacaccacttttgcctgttaagaagcctggaactaatgattacagaccagtgcaagatttgagggaggttaacaagagagtggaagatattcacccaactgttccaaacccttataatcttttgtctggattgccaccttcacatcaatggtacactgtgcttgatttgaaggatgcatttttctgccttaggttgcatccaacatctcagcctctttttgctttcgagtggagagatcctgaaatgggaatttctggtcaacttacatggaccaggttgcctcagggtttcaagaactcaccaaccttgtttaatgaggcacttcacagggatttggctgattttaggattcaacatcctgatcttatccttttgcagtatgttgatgatcttttgcttgctgcaacttctgaattggattgtcaacagggaactagggcattgcttcaaacacttggaaatttgggttacagagcttcagcaaagaaggctcagatttgccaaaagcaggttaagtatcttggatacttgcttaaggaaggacaaaggtggttgaccgaggctagaaaggaaactgtgatgggtcaaccaacacctaagacccctaggcagcttagagagttcttgggaaaggcaggtttttgtaggcttttcattccaggatttgctgaaatggctgcaccactttatcctttgaccaagcctggaactttgtttaactggggtccagatcaacagaaggcataccaagaaattaagcaggctttgcttactgctccagcacttggtttgcctgatcttacaaagccatttgagttgttcgttgatgaaaagcaaggatatgcaaagggtgtgcttacccagaagttgggaccttggagaaggcctgttgcttacctttctaagaaacttgatccagtggctgcaggttggccaccttgtcttagaatggttgctgcaattgcagtgcttacaaaggatgctggaaagttgactatgggacaacctcttgttattttggcaccacacgctgttgaggcacttgtgaagcagccacctgataggtggttgtcaaacgcaagaatgacccattatcaagctcttcttttggatactgatagggtgcagttcggtcctgttgtggctttgaatccagcaacacttttgccacttcctgaggaaggattgcaacacaactgccttgatattttggctgaggcacatggtacaagacctgatcttaccgatcagccattgcctgatgctgatcacacttggtacacagatggatcttcacttttgcaagaaggacagaggaaggctggtgctgcagttactacagagactgaagtgatttgggctaaggcacttccagctggaacatctgctcaaagagcagagcttattgctttgacccaggcacttaagatggctgaaggaaagaagttgaacgtttacactgattctaggtatgctttcgcaacagctcatattcacggagaaatctatagaaggagaggatggttgacatcagagggaaaggaaattaagaacaaggatgaaattcttgcacttttgaaggctctttttcttcctaagagattgtctattattcattgcccaggacaccaaaagggtcattcagcagaagctaggggaaatagaatggctgatcaggctgcaagaaaggctgcaattactgagacacctgatacctctactcttttgatcgaaaactcttcaccaaattcaaggcttattaactctggtggttcaagcggaggctcatctggcagcgaaactccgggcacttccgagtcagctactcctgagtctagcggcgggtcgtcaggagggtctaaagacaagttcaagctgtacttccagaacccgcaatttatggggggctgggacaaggataaagagacagactaccgcgcgacaattctccgctatggctccaaatactatctggccatcatggacaagaagtacgcgaagtgcctgcagaagatcgacaaagacgacgtcaatggcaactatgaaaagatcaactacaagctgctgccgggcccgaacaagatgctcccgaaggtgttcttcagcaagaagtggatggcctactacaatccaagcgaggatattcagaaaatctataaaaacgggaccttcaagaagggggacatgtttaacctcaacgactgccacaagctcattgatttcttcaaggatagcatttcccgctacccgaaatggtccaatgcgtacgattttaacttctccgagacagaaaagtacaaagacatcgcgggcttttacagggaggtggaggagcaagggtataaagtttcttttgaatccgcgagcaagaaggaagtcgacaagctcgtcgaggagggcaagctctacatgttccaaatttataacaaggacttttccgacaagagccatgggaccccaaacctccacaccatgtacttcaaactgctctttgacgagaacaaccacgggcaaatcaggctgagcggcggcgccgaattattcatgcgcagggcctccctcaagaaggaagagctggtcgtccatccagccaattccccgatcgcgaacaagaacccggacaatccgaaaaagaccaccaccctgtcctacgacgtctacaaggacaaacgcttcagcgaagaccagtacgaattacacatcccaattgcgattaataagtgcccaaagaatatcttcaaaattaatacagaggtcagggtgctgctcaaacacgacgacaatccgtatgtcatcggcattgacaggggcgagcgcaatctgctctatatcgtggtcgtggatgggaagggcaatattgtggagcagtactccctgaacgagattatcaacaacttcaatgggattaggattaagaccgactatcacagcctgctcgacaagaaagaaaaagagaggtttgaggcccgccaaaactggacctccattgagaatatcaaagaattaaaggccggctatatttcccaagtcgtccacaagatctgcgagctggtggagaaatatgacgccgtgattgcgctcgaagacttaaattctgggttcaagaactcccgcgtgaaggtggaaaaacaggtgtatcagaaattcgagaaaatgctgatcgacaaactcaattatatggtggataagaagtccaacccgtgtgccacagggggcgcgctgaagggctatcagatcaccaacaagttcgagagcttcaagagcatgagcacccagaacgggtttattttctacatcccggcgtggctcacctccaagattgacccgagcaccggcttcgtgaacctcctgaagacaaagtatacctccattgccgacagcaagaagtttatctcctccttcgaccgcattatgtatgtgccggaggaggacctcttcgagttcgccctcgactacaaaaacttcagccgcacagatgcggattacatcaagaagtggaagctgtactcctacgggaacaggatccgcatcttcaggaatccaaaaaaaaataacgtctttgactgggaggaagtgtgcctgacatccgcctacaaggaactgttcaataaatacggcatcaattaccagcagggcgacattcgcgccctcctctgtgagcagtccgacaaagcgttttactccagcttcatggccctcatgtccctgatgctccaaatgaggaatagcatcacagggcgcaccgacgtcgacttcctcatcagcccggtgaagaactccgacgggatcttttacgactcccgcaactatgaggcgcaagagaatgcgatcctcccgaagaacgccgatgcgaacggggcctataatatcgccaggaaagtgctctgggccatcgggcagttcaaaaaggcggaggatgagaagctcgacaaggtgaaaattgccatttccaacaaggagtggctggagtacgcgcagacctccgtgaagcacggctcctctggcagctccggctctagcggctcctctggcagctccggctccaagctggagaagtttacaaactgttacagcctctccaaaaccctcaggtttaaagcgatcccggtgggcaagacccaggagaacatcgacaacaagaggctcctggtggaagacgagaagcgcgccgaagactacaagggcgtgaagaagctgctcgataggtactacctcagctttattaacgacgtgctgcacagcatcaaactcaagaatctcaacaactacatctccctcttccgcaaaaagacccgcaccgagaaggagaacaaggagctggagaacctggagatcaacctccgcaaggaaatcgccaaagcgttcaagggcaatgaagggtacaagagcctcttcaagaaagacatcatcgaaactatcctcccagagtttctcgatgacaaggacgagatcgcgctggtgaactcctttaacgggttcacaaccgcgtttaccggcttctttgataacagggaaaatatgttctccgaggaggccaagtccaccagcatcgccttcaggtgtatcaacgagaacctcacccgctacatttccaatatggacattttcgagaaggtggatgcgatcttcgataagcacgaggtgcaggagatcaaagagaagattctcaattccgattatgacgtcgaggatttcttcgaaggggagttctttaattttgtgctcacacaagagggcattgacgtgtacaacgcgattatcgggggcttcgtcacagagtccggggagaagattaaggggctgaatgagtacatcaatctgtacaatcagaagaccaagcagaaactgccgaaattcaagccgctctacaagcaagtcctgtccgatagggaaagcctctccttctacggcgagggctataccagcgacgaggaggtgctggaagtcttccgcaacacactgaataagaatagcgagattttctcctccatcaagaagctcgagaagctctttaagaactttgacgagtacagctccgccgggattttcgtgaagaacgggccggcgatcagcaccatctccaaggacatctttggcgagtggaacgtcatcagggacaagtggaacgccgagtacgacgacatccacctgaagaagaaggcggtggtgaccgagaagtatgaggacgatcgcaggaagtccttcaaaaaaatcggctccttcagcctcgaacagctccaggagtatgccgatgcggatctgtccgtcgtcgagaagctgaaggaaatcatcattcagaaggtcgacgagatctataaagtgtacgggtccagcgagaagctgttcgacgccgactttgtgctcgagaagtccctcaaaaagaatgacgccgtggtggccattatgaaagacctgctcgactccgtgaagtccttcgaaaattacattaaagcgttctttggggaggggaaggaaactaacagggatgagtccttctatggcgactttgtcctcgcgtacgacatcctgctgaaggtcgaccacatttacgacgcgatccgcaactacgtgacacagaagccgtactcctctggtggttcaagcggaggctcatctggcagcgaaactccgggcacttccgagtcagctactcctgagtctagcggcgggtcgtcaggagggtctgctcttgattttctttctaggcttccattgccacctccagtttctccaatttgtacttttgtgtcacctgctgcacaaaaggcattccagcctccaaggtcatgcgga

SEQ ID NO: 368 - DNA, 6078 bp, synthetic construct
  source 1..6078: mol_type = other DNA
acacttaatattgaggatgaacatagattgcacgagacctctaaggaacctgatgtttctcttggatcaacttggttgtcagatttcccacaagcatgggcagagaccggaggtatgggtcttgctgttaggcaggcaccacttattattcctttgaaggcaacctctactcctgtgtcaattaagcaatatccaatgtctcaggaagctaggcttggaattaagcctcacattcaaagacttttggatcagggtattttggtgccatgtcaatcaccttggaacacaccacttttgcctgttaagaagcctggaactaatgattacagaccagtgcaagatttgagggaggttaacaagagagtggaagatattcacccaactgttccaaacccttataatcttttgtctggattgccaccttcacatcaatggtacactgtgcttgatttgaaggatgcatttttctgccttaggttgcatccaacatctcagcctctttttgctttcgagtggagagatcctgaaatgggaatttctggtcaacttacatggaccaggttgcctcagggtttcaagaactcaccaaccttgtttaatgaggcacttcacagggatttggctgattttaggattcaacatcctgatcttatccttttgcagtatgttgatgatcttttgcttgctgcaacttctgaattggattgtcaacagggaactagggcattgcttcaaacacttggaaatttgggttacagagcttcagcaaagaaggctcagatttgccaaaagcaggttaagtatcttggatacttgcttaaggaaggacaaaggtggttgaccgaggctagaaaggaaactgtgatgggtcaaccaacacctaagacccctaggcagcttagagagttcttgggaaaggcaggtttttgtaggcttttcattccaggatttgctgaaatggctgcaccactttatcctttgaccaagcctggaactttgtttaactggggtccagatcaacagaaggcataccaagaaattaagcaggctttgcttactgctccagcacttggtttgcctgatcttacaaagccatttgagttgttcgttgatgaaaagcaaggatatgcaaagggtgtgcttacccagaagttgggaccttggagaaggcctgttgcttacctttctaagaaacttgatccagtggctgcaggttggccaccttgtcttagaatggttgctgcaattgcagtgcttacaaaggatgctggaaagttgactatgggacaacctcttgttattttggcaccacacgctgttgaggcacttgtgaagcagccacctgataggtggttgtcaaacgcaagaatgacccattatcaagctcttcttttggatactgatagggtgcagttcggtcctgttgtggctttgaatccagcaacacttttgccacttcctgaggaaggattgcaacacaactgccttgatattttggctgaggcacatggtacaagacctgatcttaccgatcagccattgcctgatgctgatcacacttggtacacagatggatcttcacttttgcaagaaggacagaggaaggctggtgctgcagttactacagagactgaagtgatttgggctaaggcacttccagctggaacatctgctcaaagagcagagcttattgctttgacccaggcacttaagatggctgaaggaaagaagttgaacgtttacactgattctaggtatgctttcgcaacagctcatattcacggagaaatctatagaaggagaggatggttgacatcagagggaaaggaaattaagaacaaggatgaaattcttgcacttttgaaggctctttttcttcctaagagattgtctattattcattgcccaggacaccaaaagggtcattcagcagaagctaggggaaatagaatggctgatcaggctgcaagaaaggctgcaattactgagacacctgatacctctactcttttgatcgaaaactcttcaccaaattcaaggcttattaactctggtggttcaagcggaggctcatctggcagcgaaactccgggcacttccgagtcagctactcctgagtctagcggcgggtcgtcaggagggtctaagtccctcaaaaagaatgacgccgtggtggccattatgaaagacctgctcgactccgtgaagtccttcgaaaattacattaaagcgttctttggggaggggaaggaaactaacagggatgagtccttctatggcgactttgtcctcgcgtacgacatcctgctgaaggtcgaccacatttacgacgcgatccgcaactacgtgacacagaagccgtactccaaagacaagttcaagctgtacttccagaacccgcaatttatggggggctgggacaaggataaagagacagactaccgcgcgacaattctccgctatggctccaaatactatctggccatcatggacaagaagtacgcgaagtgcctgcagaagatcgacaaagacgacgtcaatggcaactatgaaaagatcaactacaagctgctgccgggcccgaacaagatgctcccgaaggtgttcttcagcaagaagtggatggcctactacaatccaagcgaggatattcagaaaatctataaaaacgggaccttcaagaagggggacatgtttaacctcaacgactgccacaagctcattgatttcttcaaggatagcatttcccgctacccgaaatggtccaatgcgtacgattttaacttctccgagacagaaaagtacaaagacatcgcgggcttttacagggaggtggaggagcaagggtataaagtttcttttgaatccgcgagcaagaaggaagtcgacaagctcgtcgaggagggcaagctctacatgttccaaatttataacaaggacttttccgacaagagccatgggaccccaaacctccacaccatgtacttcaaactgctctttgacgagaacaaccacgggcaaatcaggctgagcggcggcgccgaattattcatgcgcagggcctccctcaagaaggaagagctggtcgtccatccagccaattccccgatcgcgaacaagaacccggacaatccgaaaaagaccaccaccctgtcctacgacgtctacaaggacaaacgcttcagcgaagaccagtacgaattacacatcccaattgcgattaataagtgcccaaagaatatcttcaaaattaatacagaggtcagggtgctgctcaaacacgacgacaatccgtatgtcatcggcattgacaggggcgagcgcaatctgctctatatcgtggtcgtggatgggaagggcaatattgtggagcagtactccctgaacgagattatcaacaacttcaatgggattaggattaagaccgactatcacagcctgctcgacaagaaagaaaaagagaggtttgaggcccgccaaaactggacctccattgagaatatcaaagaattaaaggccggctatatttcccaagtcgtccacaagatctgcgagctggtggagaaatatgacgccgtgattgcgctcgaagacttaaattctgggttcaagaactcccgcgtgaaggtggaaaaacaggtgtatcagaaattcgagaaaatgctgatcgacaaactcaattatatggtggataagaagtccaacccgtgtgccacagggggcgcgctgaagggctatcagatcaccaacaagttcgagagcttcaagagcatgagcacccagaacgggtttattttctacatcccggcgtggctcacctccaagattgacccgagcaccggcttcgtgaacctcctgaagacaaagtatacctccattgccgacagcaagaagtttatctcctccttcgaccgcattatgtatgtgccggaggaggacctcttcgagttcgccctcgactacaaaaacttcagccgcacagatgcggattacatcaagaagtggaagctgtactcctacgggaacaggatccgcatcttcaggaatccaaaaaaaaataacgtctttgactgggaggaagtgtgcctgacatccgcctacaaggaactgttcaataaatacggcatcaattaccagcagggcgacattcgcgccctcctctgtgagcagtccgacaaagcgttttactccagcttcatggccctcatgtccctgatgctccaaatgaggaatagcatcacagggcgcaccgacgtcgacttcctcatcagcccggtgaagaactccgacgggatcttttacgactcccgcaactatgaggcgcaagagaatgcgatcctcccgaagaacgccgatgcgaacggggcctataatatcgccaggaaagtgctctgggccatcgggcagttcaaaaaggcggaggatgagaagctcgacaaggtgaaaattgccatttccaacaaggagtggctggagtacgcgcagacctccgtgaagcacggctcctctggcagctccggctctagcggctcctctggcagctccggctccaagctggagaagtttacaaactgttacagcctctccaaaaccctcaggtttaaagcgatcccggtgggcaagacccaggagaacatcgacaacaagaggctcctggtggaagacgagaagcgcgccgaagactacaagggcgtgaagaagctgctcgataggtactacctcagctttattaacgacgtgctgcacagcatcaaactcaagaatctcaacaactacatctccctcttccgcaaaaagacccgcaccgagaaggagaacaaggagctggagaacctggagatcaacctccgcaaggaaatcgccaaagcgttcaagggcaatgaagggtacaagagcctcttcaagaaagacatcatcgaaactatcctcccagagtttctcgatgacaaggacgagatcgcgctggtgaactcctttaacgggttcacaaccgcgtttaccggcttctttgataacagggaaaatatgttctccgaggaggccaagtccaccagcatcgccttcaggtgtatcaacgagaacctcacccgctacatttccaatatggacattttcgagaaggtggatgcgatcttcgataagcacgaggtgcaggagatcaaagagaagattctcaattccgattatgacgtcgaggatttcttcgaaggggagttctttaattttgtgctcacacaagagggcattgacgtgtacaacgcgattatcgggggcttcgtcacagagtccggggagaagattaaggggctgaatgagtacatcaatctgtacaatcagaagaccaagcagaaactgccgaaattcaagccgctctacaagcaagtcctgtccgatagggaaagcctctccttctacggcgagggctataccagcgacgaggaggtgctggaagtcttccgcaacacactgaataagaatagcgagattttctcctccatcaagaagctcgagaagctctttaagaactttgacgagtacagctccgccgggattttcgtgaagaacgggccggcgatcagcaccatctccaaggacatctttggcgagtggaacgtcatcagggacaagtggaacgccgagtacgacgacatccacctgaagaagaaggcggtggtgaccgagaagtatgaggacgatcgcaggaagtccttcaaaaaaatcggctccttcagcctcgaacagctccaggagtatgccgatgcggatctgtccgtcgtcgagaagctgaaggaaatcatcattcagaaggtcgacgagatctataaagtgtacgggtccagcgagaagctgttcgacgccgactttgtgctcgagtctggtggttcaagcggaggctcatctggcagcgaaactccgggcacttccgagtcagctactcctgagtctagcggcgggtcgtcaggagggtctgctcttgattttctttctaggcttccattgccacctccagtttctccaatttgtacttttgtgtcacctgctgcacaaaaggcattccagcctccaaggtcatgcgga

SEQ ID NO: 369 - DNA, 6078 bp, synthetic construct
  source 1..6078: mol_type = other DNA
acacttaatattgaggatgaacatagattgcacgagacctctaaggaacctgatgtttctcttggatcaacttggttgtcagatttcccacaagcatgggcagagaccggaggtatgggtcttgctgttaggcaggcaccacttattattcctttgaaggcaacctctactcctgtgtcaattaagcaatatccaatgtctcaggaagctaggcttggaattaagcctcacattcaaagacttttggatcagggtattttggtgccatgtcaatcaccttggaacacaccacttttgcctgttaagaagcctggaactaatgattacagaccagtgcaagatttgagggaggttaacaagagagtggaagatattcacccaactgttccaaacccttataatcttttgtctggattgccaccttcacatcaatggtacactgtgcttgatttgaaggatgcatttttctgccttaggttgcatccaacatctcagcctctttttgctttcgagtggagagatcctgaaatgggaatttctggtcaacttacatggaccaggttgcctcagggtttcaagaactcaccaaccttgtttaatgaggcacttcacagggatttggctgattttaggattcaacatcctgatcttatccttttgcagtatgttgatgatcttttgcttgctgcaacttctgaattggattgtcaacagggaactagggcattgcttcaaacacttggaaatttgggttacagagcttcagcaaagaaggctcagatttgccaaaagcaggttaagtatcttggatacttgcttaaggaaggacaaaggtggttgaccgaggctagaaaggaaactgtgatgggtcaaccaacacctaagacccctaggcagcttagagagttcttgggaaaggcaggtttttgtaggcttttcattccaggatttgctgaaatggctgcaccactttatcctttgaccaagcctggaactttgtttaactggggtccagatcaacagaaggcataccaagaaattaagcaggctttgcttactgctccagcacttggtttgcctgatcttacaaagccatttgagttgttcgttgatgaaaagcaaggatatgcaaagggtgtgcttacccagaagttgggaccttggagaaggcctgttgcttacctttctaagaaacttgatccagtggctgcaggttggccaccttgtcttagaatggttgctgcaattgcagtgcttacaaaggatgctggaaagttgactatgggacaacctcttgttattttggcaccacacgctgttgaggcacttgtgaagcagccacctgataggtggttgtcaaacgcaagaatgacccattatcaagctcttcttttggatactgatagggtgcagttcggtcctgttgtggctttgaatccagcaacacttttgccacttcctgaggaaggattgcaacacaactgccttgatattttggctgaggcacatggtacaagacctgatcttaccgatcagccattgcctgatgctgatcacacttggtacacagatggatcttcacttttgcaagaaggacagaggaaggctggtgctgcagttactacagagactgaagtgatttgggctaaggcacttccagctggaacatctgctcaaagagcagagcttattgctttgacccaggcacttaagatggctgaaggaaagaagttgaacgtttacactgattctaggtatgctttcgcaacagctcatattcacggagaaatctatagaaggagaggatggttgacatcagagggaaaggaaattaagaacaaggatgaaattcttgcacttttgaaggctctttttcttcctaagagattgtctattattcattgcccaggacaccaaaagggtcattcagcagaagctaggggaaatagaatggctgatcaggctgcaagaaaggctgcaattactgagacacctgatacctctactcttttgatcgaaaactcttcaccaaattcaaggcttattaactctggtggttcaagcggaggctcatctggcagcgaaactccgggcacttccgagtcagctactcctgagtctagcggcgggtcgtcaggagggtcttccgacaaagcgttttactccagcttcatggccctcatgtccctgatgctccaaatgaggaatagcatcacagggcgcaccgacgtcgacttcctcatcagcccggtgaagaactccgacgggatcttttacgactcccgcaactatgaggcgcaagagaatgcgatcctcccgaagaacgccgatgcgaacggggcctataatatcgccaggaaagtgctctgggccatcgggcagttcaaaaaggcggaggatgagaagctcgacaaggtgaaaattgccatttccaacaaggagtggctggagtacgcgcagacctccgtgaagcacggctcctctggcagctccggctctagcggctcctctggcagctccggctccaagctggagaagtttacaaactgttacagcctctccaaaaccctcaggtttaaagcgatcccggtgggcaagacccaggagaacatcgacaacaagaggctcctggtggaagacgagaagcgcgccgaagactacaagggcgtgaagaagctgctcgataggtactacctcagctttattaacgacgtgctgcacagcatcaaactcaagaatctcaacaactacatctccctcttccgcaaaaagacccgcaccgagaaggagaacaaggagctggagaacctggagatcaacctccgcaaggaaatcgccaaagcgttcaagggcaatgaagggtacaagagcctcttcaagaaagacatcatcgaaactatcctcccagagtttctcgatgacaaggacgagatcgcgctggtgaactcctttaacgggttcacaaccgcgtttaccggcttctttgataacagggaaaatatgttctccgaggaggccaagtccaccagcatcgccttcaggtgtatcaacgagaacctcacccgctacatttccaatatggacattttcgagaaggtggatgcgatcttcgataagcacgaggtgcaggagatcaaagagaagattctcaattccgattatgacgtcgaggatttcttcgaaggggagttctttaattttgtgctcacacaagagggcattgacgtgtacaacgcgattatcgggggcttcgtcacagagtccggggagaagattaaggggctgaatgagtacatcaatctgtacaatcagaagaccaagcagaaactgccgaaattcaagccgctctacaagcaagtcctgtccgatagggaaagcctctccttctacggcgagggctataccagcgacgaggaggtgctggaagtcttccgcaacacactgaataagaatagcgagattttctcctccatcaagaagctcgagaagctctttaagaactttgacgagtacagctccgccgggattttcgtgaagaacgggccggcgatcagcaccatctccaaggacatctttggcgagtggaacgtcatcagggacaagtggaacgccgagtacgacgacatccacctgaagaagaaggcggtggtgaccgagaagtatgaggacgatcgcaggaagtccttcaaaaaaatcggctccttcagcctcgaacagctccaggagtatgccgatgcggatctgtccgtcgtcgagaagctgaaggaaatcatcattcagaaggtcgacgagatctataaagtgtacgggtccagcgagaagctgttcgacgccgactttgtgctcgagaagtccctcaaaaagaatgacgccgtggtggccattatgaaagacctgctcgactccgtgaagtccttcgaaaattacattaaagcgttctttggggaggggaaggaaactaacagggatgagtccttctatggcgactttgtcctcgcgtacgacatcctgctgaaggtcgaccacatttacgacgcgatccgcaactacgtgacacagaagccgtactccaaagacaagttcaagctgtacttccagaacccgcaatttatggggggctgggacaaggataaagagacagactaccgcgcgacaattctccgctatggctccaaatactatctggccatcatggacaagaagtacgcgaagtgcctgcagaagatcgacaaagacgacgtcaatggcaactatgaaaagatcaactacaagctgctgccgggcccgaacaagatgctcccgaaggtgttcttcagcaagaagtggatggcctactacaatccaagcgaggatattcagaaaatctataaaaacgggaccttcaagaagggggacatgtttaacctcaacgactgccacaagctcattgatttcttcaaggatagcatttcccgctacccgaaatggtccaatgcgtacgattttaacttctccgagacagaaaagtacaaagacatcgcgggcttttacagggaggtggaggagcaagggtataaagtttcttttgaatccgcgagcaagaaggaagtcgacaagctcgtcgaggagggcaagctctacatgttccaaatttataacaaggacttttccgacaagagccatgggaccccaaacctccacaccatgtacttcaaactgctctttgacgagaacaaccacgggcaaatcaggctgagcggcggcgccgaattattcatgcgcagggcctccctcaagaaggaagagctggtcgtccatccagccaattccccgatcgcgaacaagaacccggacaatccgaaaaagaccaccaccctgtcctacgacgtctacaaggacaaacgcttcagcgaagaccagtacgaattacacatcccaattgcgattaataagtgcccaaagaatatcttcaaaattaatacagaggtcagggtgctgctcaaacacgacgacaatccgtatgtcatcggcattgacaggggcgagcgcaatctgctctatatcgtggtcgtggatgggaagggcaatattgtggagcagtactccctgaacgagattatcaacaacttcaatgggattaggattaagaccgactatcacagcctgctcgacaagaaagaaaaagagaggtttgaggcccgccaaaactggacctccattgagaatatcaaagaattaaaggccggctatatttcccaagtcgtccacaagatctgcgagctggtggagaaatatgacgccgtgattgcgctcgaagacttaaattctgggttcaagaactcccgcgtgaaggtggaaaaacaggtgtatcagaaattcgagaaaatgctgatcgacaaactcaattatatggtggataagaagtccaacccgtgtgccacagggggcgcgctgaagggctatcagatcaccaacaagttcgagagcttcaagagcatgagcacccagaacgggtttattttctacatcccggcgtggctcacctccaagattgacccgagcaccggcttcgtgaacctcctgaagacaaagtatacctccattgccgacagcaagaagtttatctcctccttcgaccgcattatgtatgtgccggaggaggacctcttcgagttcgccctcgactacaaaaacttcagccgcacagatgcggattacatcaagaagtggaagctgtactcctacgggaacaggatccgcatcttcaggaatccaaaaaaaaataacgtctttgactgggaggaagtgtgcctgacatccgcctacaaggaactgttcaataaatacggcatcaattaccagcagggcgacattcgcgccctcctctgtgagcagtctggtggttcaagcggaggctcatctggcagcgaaactccgggcacttccgagtcagctactcctgagtctagcggcgggtcgtcaggagggtctgctcttgattttctttctaggcttccattgccacctccagtttctccaatttgtacttttgtgtcacctgctgcacaaaaggcattccagcctccaaggtcatgcgga

SEQ ID NO: 370 - DNA, 6078 bp, synthetic construct
  source 1..6078: mol_type = other DNA
gctcttgattttctttctaggcttccattgccacctccagtttctccaatttgtacttttgtgtcacctgctgcacaaaaggcattccagcctccaaggtcatgcggatctggtggttcaagcggaggctcatctggcagcgaaactccgggcacttccgagtcagctactcctgagtctagcggcgggtcgtcaggagggtctcgcaccgagaaggagaacaaggagctggagaacctggagatcaacctccgcaaggaaatcgccaaagcgttcaagggcaatgaagggtacaagagcctcttcaagaaagacatcatcgaaactatcctcccagagtttctcgatgacaaggacgagatcgcgctggtgaactcctttaacgggttcacaaccgcgtttaccggcttctttgataacagggaaaatatgttctccgaggaggccaagtccaccagcatcgccttcaggtgtatcaacgagaacctcacccgctacatttccaatatggacattttcgagaaggtggatgcgatcttcgataagcacgaggtgcaggagatcaaagagaagattctcaattccgattatgacgtcgaggatttcttcgaaggggagttctttaattttgtgctcacacaagagggcattgacgtgtacaacgcgattatcgggggcttcgtcacagagtccggggagaagattaaggggctgaatgagtacatcaatctgtacaatcagaagaccaagcagaaactgccgaaattcaagccgctctacaagcaagtcctgtccgatagggaaagcctctccttctacggcgagggctataccagcgacgaggaggtgctggaagtcttccgcaacacactgaataagaatagcgagattttctcctccatcaagaagctcgagaagctctttaagaactttgacgagtacagctccgccgggattttcgtgaagaacgggccggcgatcagcaccatctccaaggacatctttggcgagtggaacgtcatcagggacaagtggaacgccgagtacgacgacatccacctgaagaagaaggcggtggtgaccgagaagtatgaggacgatcgcaggaagtccttcaaaaaaatcggctccttcagcctcgaacagctccaggagtatgccgatgcggatctgtccgtcgtcgagaagctgaaggaaatcatcattcagaaggtcgacgagatctataaagtgtacgggtccagcgagaagctgttcgacgccgactttgtgctcgagaagtccctcaaaaagaatgacgccgtggtggccattatgaaagacctgctcgactccgtgaagtccttcgaaaattacattaaagcgttctttggggaggggaaggaaactaacagggatgagtccttctatggcgactttgtcctcgcgtacgacatcctgctgaaggtcgaccacatttacgacgcgatccgcaactacgtgacacagaagccgtactccaaagacaagttcaagctgtacttccagaacccgcaatttatggggggctgggacaaggataaagagacagactaccgcgcgacaattctccgctatggctccaaatactatctggccatcatggacaagaagtacgcgaagtgcctgcagaagatcgacaaagacgacgtcaatggcaactatgaaaagatcaactacaagctgctgccgggcccgaacaagatgctcccgaaggtgttcttcagcaagaagtggatggcctactacaatccaagcgaggatattcagaaaatctataaaaacgggaccttcaagaagggggacatgtttaacctcaacgactgccacaagctcattgatttcttcaaggatagcatttcccgctacccgaaatggtccaatgcgtacgattttaacttctccgagacagaaaagtacaaagacatcgcgggcttttacagggaggtggaggagcaagggtataaagtttcttttgaatccgcgagcaagaaggaagtcgacaagctcgtcgaggagggcaagctctacatgttccaaatttataacaaggacttttccgacaagagccatgggaccccaaacctccacaccatgtacttcaaactgctctttgacgagaacaaccacgggcaaatcaggctgagcggcggcgccgaattattcatgcgcagggcctccctcaagaaggaagagctggtcgtccatccagccaattccccgatcgcgaacaagaacccggacaatccgaaaaagaccaccaccctgtcctacgacgtctacaaggacaaacgcttcagcgaagaccagtacgaattacacatcccaattgcgattaataagtgcccaaagaatatcttcaaaattaatacagaggtcagggtgctgctcaaacacgacgacaatccgtatgtcatcggcattgacaggggcgagcgcaatctgctctatatcgtggtcgtggatgggaagggcaatattgtggagcagtactccctgaacgagattatcaacaacttcaatgggattaggattaagaccgactatcacagcctgctcgacaagaaagaaaaagagaggtttgaggcccgccaaaactggacctccattgagaatatcaaagaattaaaggccggctatatttcccaagtcgtccacaagatctgcgagctggtggagaaatatgacgccgtgattgcgctcgaagacttaaattctgggttcaagaactcccgcgtgaaggtggaaaaacaggtgtatcagaaattcgagaaaatgctgatcgacaaactcaattatatggtggataagaagtccaacccgtgtgccacagggggcgcgctgaagggctatcagatcaccaacaagttcgagagcttcaagagcatgagcacccagaacgggtttattttctacatcccggcgtggctcacctccaagattgacccgagcaccggcttcgtgaacctcctgaagacaaagtatacctccattgccgacagcaagaagtttatctcctccttcgaccgcattatgtatgtgccggaggaggacctcttcgagttcgccctcgactacaaaaacttcagccgcacagatgcggattacatcaagaagtggaagctgtactcctacgggaacaggatccgcatcttcaggaatccaaaaaaaaataacgtctttgactgggaggaagtgtgcctgacatccgcctacaaggaactgttcaataaatacggcatcaattaccagcagggcgacattcgcgccctcctctgtgagcagtccgacaaagcgttttactccagcttcatggccctcatgtccctgatgctccaaatgaggaatagcatcacagggcgcaccgacgtcgacttcctcatcagcccggtgaagaactccgacgggatcttttacgactcccgcaactatgaggcgcaagagaatgcgatcctcccgaagaacgccgatgcgaacggggcctataatatcgccaggaaagtgctctgggccatcgggcagttcaaaaaggcggaggatgagaagctcgacaaggtgaaaattgccatttccaacaaggagtggctggagtacgcgcagacctccgtgaagcacggctcctctggcagctccggctctagcggctcctctggcagctccggctccaagctggagaagtttacaaactgttacagcctctccaaaaccctcaggtttaaagcgatcccggtgggcaagacccaggagaacatcgacaacaagaggctcctggtggaagacgagaagcgcgccgaagactacaagggcgtgaagaagctgctcgataggtactacctcagctttattaacgacgtgctgcacagcatcaaactcaagaatctcaacaactacatctccctcttccgcaaaaagacctctggtggttcaagcggaggctcatctggcagcgaaactccgggcacttccgagtcagctactcctgagtctagcggcgggtcgtcaggagggtctacacttaatattgaggatgaacatagattgcacgagacctctaaggaacctgatgtttctcttggatcaacttggttgtcagatttcccacaagcatgggcagagaccggaggtatgggtcttgctgttaggcaggcaccacttattattcctttgaaggcaacctctactcctgtgtcaattaagcaatatccaatgtctcaggaagctaggcttggaattaagcctcacattcaaagacttttggatcagggtattttggtgccatgtcaatcaccttggaacacaccacttttgcctgttaagaagcctggaactaatgattacagaccagtgcaagatttgagggaggttaacaagagagtggaagatattcacccaactgttccaaacccttataatcttttgtctggattgccaccttcacatcaatggtacactgtgcttgatttgaaggatgcatttttctgccttaggttgcatccaacatctcagcctctttttgctttcgagtggagagatcctgaaatgggaatttctggtcaacttacatggaccaggttgcctcagggtttcaagaactcaccaaccttgtttaatgaggcacttcacagggatttggctgattttaggattcaacatcctgatcttatccttttgcagtatgttgatgatcttttgcttgctgcaacttctgaattggattgtcaacagggaactagggcattgcttcaaacacttggaaatttgggttacagagcttcagcaaagaaggctcagatttgccaaaagcaggttaagtatcttggatacttgcttaaggaaggacaaaggtggttgaccgaggctagaaaggaaactgtgatgggtcaaccaacacctaagacccctaggcagcttagagagttcttgggaaaggcaggtttttgtaggcttttcattccaggatttgctgaaatggctgcaccactttatcctttgaccaagcctggaactttgtttaactggggtccagatcaacagaaggcataccaagaaattaagcaggctttgcttactgctccagcacttggtttgcctgatcttacaaagccatttgagttgttcgttgatgaaaagcaaggatatgcaaagggtgtgcttacccagaagttgggaccttggagaaggcctgttgcttacctttctaagaaacttgatccagtggctgcaggttggccaccttgtcttagaatggttgctgcaattgcagtgcttacaaaggatgctggaaagttgactatgggacaacctcttgttattttggcaccacacgctgttgaggcacttgtgaagcagccacctgataggtggttgtcaaacgcaagaatgacccattatcaagctcttcttttggatactgatagggtgcagttcggtcctgttgtggctttgaatccagcaacacttttgccacttcctgaggaaggattgcaacacaactgccttgatattttggctgaggcacatggtacaagacctgatcttaccgatcagccattgcctgatgctgatcacacttggtacacagatggatcttcacttttgcaagaaggacagaggaaggctggtgctgcagttactacagagactgaagtgatttgggctaaggcacttccagctggaacatctgctcaaagagcagagcttattgctttgacccaggcacttaagatggctgaaggaaagaagttgaacgtttacactgattctaggtatgctttcgcaacagctcatattcacggagaaatctatagaaggagaggatggttgacatcagagggaaaggaaattaagaacaaggatgaaattcttgcacttttgaaggctctttttcttcctaagagattgtctattattcattgcccaggacaccaaaagggtcattcagcagaagctaggggaaatagaatggctgatcaggctgcaagaaaggctgcaattactgagacacctgatacctctactcttttgatcgaaaactcttcaccaaattcaaggcttattaac

SEQ ID NO: 371 - DNA, 6078 bp, synthetic construct
  source 1..6078: mol_type = other DNA
gctcttgattttctttctaggcttccattgccacctccagtttctccaatttgtacttttgtgtcacctgctgcacaaaaggcattccagcctccaaggtcatgcggatctggtggttcaagcggaggctcatctggcagcgaaactccgggcacttccgagtcagctactcctgagtctagcggcgggtcgtcaggagggtctggctataccagcgacgaggaggtgctggaagtcttccgcaacacactgaataagaatagcgagattttctcctccatcaagaagctcgagaagctctttaagaactttgacgagtacagctccgccgggattttcgtgaagaacgggccggcgatcagcaccatctccaaggacatctttggcgagtggaacgtcatcagggacaagtggaacgccgagtacgacgacatccacctgaagaagaaggcggtggtgaccgagaagtatgaggacgatcgcaggaagtccttcaaaaaaatcggctccttcagcctcgaacagctccaggagtatgccgatgcggatctgtccgtcgtcgagaagctgaaggaaatcatcattcagaaggtcgacgagatctataaagtgtacgggtccagcgagaagctgttcgacgccgactttgtgctcgagaagtccctcaaaaagaatgacgccgtggtggccattatgaaagacctgctcgactccgtgaagtccttcgaaaattacattaaagcgttctttggggaggggaaggaaactaacagggatgagtccttctatggcgactttgtcctcgcgtacgacatcctgctgaaggtcgaccacatttacgacgcgatccgcaactacgtgacacagaagccgtactccaaagacaagttcaagctgtacttccagaacccgcaatttatggggggctgggacaaggataaagagacagactaccgcgcgacaattctccgctatggctccaaatactatctggccatcatggacaagaagtacgcgaagtgcctgcagaagatcgacaaagacgacgtcaatggcaactatgaaaagatcaactacaagctgctgccgggcccgaacaagatgctcccgaaggtgttcttcagcaagaagtggatggcctactacaatccaagcgaggatattcagaaaatctataaaaacgggaccttcaagaagggggacatgtttaacctcaacgactgccacaagctcattgatttcttcaaggatagcatttcccgctacccgaaatggtccaatgcgtacgattttaacttctccgagacagaaaagtacaaagacatcgcgggcttttacagggaggtggaggagcaagggtataaagtttcttttgaatccgcgagcaagaaggaagtcgacaagctcgtcgaggagggcaagctctacatgttccaaatttataacaaggacttttccgacaagagccatgggaccccaaacctccacaccatgtacttcaaactgctctttgacgagaacaaccacgggcaaatcaggctgagcggcggcgccgaattattcatgcgcagggcctccctcaagaaggaagagctggtcgtccatccagccaattccccgatcgcgaacaagaacccggacaatccgaaaaagaccaccaccctgtcctacgacgtctacaaggacaaacgcttcagcgaagaccagtacgaattacacatcccaattgcgattaataagtgcccaaagaatatcttcaaaattaatacagaggtcagggtgctgctcaaacacgacgacaatccgtatgtcatcggcattgacaggggcgagcgcaatctgctctatatcgtggtcgtggatgggaagggcaatattgtggagcagtactccctgaacgagattatcaacaacttcaatgggattaggattaagaccgactatcacagcctgctcgacaagaaagaaaaagagaggtttgaggcccgccaaaactggacctccattgagaatatcaaagaattaaaggccggctatatttcccaagtcgtccacaagatctgcgagctggtggagaaatatgacgccgtgattgcgctcgaagacttaaattctgggttcaagaactcccgcgtgaaggtggaaaaacaggtgtatcagaaattcgagaaaatgctgatcgacaaactcaattatatggtggataagaagtccaacccgtgtgccacagggggcgcgctgaagggctatcagatcaccaacaagttcgagagcttcaagagcatgagcacccagaacgggtttattttctacatcccggcgtggctcacctccaagattgacccgagcaccggcttcgtgaacctcctgaagacaaagtatacctccattgccgacagcaagaagtttatctcctccttcgaccgcattatgtatgtgccggaggaggacctcttcgagttcgccctcgactacaaaaacttcagccgcacagatgcggattacatcaagaagtggaagctgtactcctacgggaacaggatccgcatcttcaggaatccaaaaaaaaataacgtctttgactgggaggaagtgtgcctgacatccgcctacaaggaactgttcaataaatacggcatcaattaccagcagggcgacattcgcgccctcctctgtgagcagtccgacaaagcgttttactccagcttcatggccctcatgtccctgatgctccaaatgaggaatagcatcacagggcgcaccgacgtcgacttcctcatcagcccggtgaagaactccgacgggatcttttacgactcccgcaactatgaggcgcaagagaatgcgatcctcccgaagaacgccgatgcgaacggggcctataatatcgccaggaaagtgctctgggccatcgggcagttcaaaaaggcggaggatgagaagctcgacaaggtgaaaattgccatttccaacaaggagtggctggagtacgcgcagacctccgtgaagcacggctcctctggcagctccggctctagcggctcctctggcagctccggctccaagctggagaagtttacaaactgttacagcctctccaaaaccctcaggtttaaagcgatcccggtgggcaagacccaggagaacatcgacaacaagaggctcctggtggaagacgagaagcgcgccgaagactacaagggcgtgaagaagctgctcgataggtactacctcagctttattaacgacgtgctgcacagcatcaaactcaagaatctcaacaactacatctccctcttccgcaaaaagacccgcaccgagaaggagaacaaggagctggagaacctggagatcaacctccgcaaggaaatcgccaaagcgttcaagggcaatgaagggtacaagagcctcttcaagaaagacatcatcgaaactatcctcccagagtttctcgatgacaaggacgagatcgcgctggtgaactcctttaacgggttcacaaccgcgtttaccggcttctttgataacagggaaaatatgttctccgaggaggccaagtccaccagcatcgccttcaggtgtatcaacgagaacctcacccgctacatttccaatatggacattttcgagaaggtggatgcgatcttcgataagcacgaggtgcaggagatcaaagagaagattctcaattccgattatgacgtcgaggatttcttcgaaggggagttctttaattttgtgctcacacaagagggcattgacgtgtacaacgcgattatcgggggcttcgtcacagagtccggggagaagattaaggggctgaatgagtacatcaatctgtacaatcagaagaccaagcagaaactgccgaaattcaagccgctctacaagcaagtcctgtccgatagggaaagcctctccttctacggcgagtctggtggttcaagcggaggctcatctggcagcgaaactccgggcacttccgagtcagctactcctgagtctagcggcgggtcgtcaggagggtctacacttaatattgaggatgaacatagattgcacgagacctctaaggaacctgatgtttctcttggatcaacttggttgtcagatttcccacaagcatgggcagagaccggaggtatgggtcttgctgttaggcaggcaccacttattattcctttgaaggcaacctctactcctgtgtcaattaagcaatatccaatgtctcaggaagctaggcttggaattaagcctcacattcaaagacttttggatcagggtattttggtgccatgtcaatcaccttggaacacaccacttttgcctgttaagaagcctggaactaatgattacagaccagtgcaagatttgagggaggttaacaagagagtggaagatattcacccaactgttccaaacccttataatcttttgtctggattgccaccttcacatcaatggtacactgtgcttgatttgaaggatgcatttttctgccttaggttgcatccaacatctcagcctctttttgctttcgagtggagagatcctgaaatgggaatttctggtcaacttacatggaccaggttgcctcagggtttcaagaactcaccaaccttgtttaatgaggcacttcacagggatttggctgattttaggattcaacatcctgatcttatccttttgcagtatgttgatgatcttttgcttgctgcaacttctgaattggattgtcaacagggaactagggcattgcttcaaacacttggaaatttgggttacagagcttcagcaaagaaggctcagatttgccaaaagcaggttaagtatcttggatacttgcttaaggaaggacaaaggtggttgaccgaggctagaaaggaaactgtgatgggtcaaccaacacctaagacccctaggcagcttagagagttcttgggaaaggcaggtttttgtaggcttttcattccaggatttgctgaaatggctgcaccactttatcctttgaccaagcctggaactttgtttaactggggtccagatcaacagaaggcataccaagaaattaagcaggctttgcttactgctccagcacttggtttgcctgatcttacaaagccatttgagttgttcgttgatgaaaagcaaggatatgcaaagggtgtgcttacccagaagttgggaccttggagaaggcctgttgcttacctttctaagaaacttgatccagtggctgcaggttggccaccttgtcttagaatggttgctgcaattgcagtgcttacaaaggatgctggaaagttgactatgggacaacctcttgttattttggcaccacacgctgttgaggcacttgtgaagcagccacctgataggtggttgtcaaacgcaagaatgacccattatcaagctcttcttttggatactgatagggtgcagttcggtcctgttgtggctttgaatccagcaacacttttgccacttcctgaggaaggattgcaacacaactgccttgatattttggctgaggcacatggtacaagacctgatcttaccgatcagccattgcctgatgctgatcacacttggtacacagatggatcttcacttttgcaagaaggacagaggaaggctggtgctgcagttactacagagactgaagtgatttgggctaaggcacttccagctggaacatctgctcaaagagcagagcttattgctttgacccaggcacttaagatggctgaaggaaagaagttgaacgtttacactgattctaggtatgctttcgcaacagctcatattcacggagaaatctatagaaggagaggatggttgacatcagagggaaaggaaattaagaacaaggatgaaattcttgcacttttgaaggctctttttcttcctaagagattgtctattattcattgcccaggacaccaaaagggtcattcagcagaagctaggggaaatagaatggctgatcaggctgcaagaaaggctgcaattactgagacacctgatacctctactcttttgatcgaaaactcttcaccaaattcaaggcttattaac

SEQ ID NO: 372 - DNA, 6078 bp, synthetic construct
  source 1..6078: mol_type = other DNA
gctcttgattttctttctaggcttccattgccacctccagtttctccaatttgtacttttgtgtcacctgctgcacaaaaggcattccagcctccaaggtcatgcggatctggtggttcaagcggaggctcatctggcagcgaaactccgggcacttccgagtcagctactcctgagtctagcggcgggtcgtcaggagggtcttccgacgggatcttttacgactcccgcaactatgaggcgcaagagaatgcgatcctcccgaagaacgccgatgcgaacggggcctataatatcgccaggaaagtgctctgggccatcgggcagttcaaaaaggcggaggatgagaagctcgacaaggtgaaaattgccatttccaacaaggagtggctggagtacgcgcagacctccgtgaagcacggctcctctggcagctccggctctagcggctcctctggcagctccggctccaagctggagaagtttacaaactgttacagcctctccaaaaccctcaggtttaaagcgatcccggtgggcaagacccaggagaacatcgacaacaagaggctcctggtggaagacgagaagcgcgccgaagactacaagggcgtgaagaagctgctcgataggtactacctcagctttattaacgacgtgctgcacagcatcaaactcaagaatctcaacaactacatctccctcttccgcaaaaagacccgcaccgagaaggagaacaaggagctggagaacctggagatcaacctccgcaaggaaatcgccaaagcgttcaagggcaatgaagggtacaagagcctcttcaagaaagacatcatcgaaactatcctcccagagtttctcgatgacaaggacgagatcgcgctggtgaactcctttaacgggttcacaaccgcgtttaccggcttctttgataacagggaaaatatgttctccgaggaggccaagtccaccagcatcgccttcaggtgtatcaacgagaacctcacccgctacatttccaatatggacattttcgagaaggtggatgcgatcttcgataagcacgaggtgcaggagatcaaagagaagattctcaattccgattatgacgtcgaggatttcttcgaaggggagttctttaattttgtgctcacacaagagggcattgacgtgtacaacgcgattatcgggggcttcgtcacagagtccggggagaagattaaggggctgaatgagtacatcaatctgtacaatcagaagaccaagcagaaactgccgaaattcaagccgctctacaagcaagtcctgtccgatagggaaagcctctccttctacggcgagggctataccagcgacgaggaggtgctggaagtcttccgcaacacactgaataagaatagcgagattttctcctccatcaagaagctcgagaagctctttaagaactttgacgagtacagctccgccgggattttcgtgaagaacgggccggcgatcagcaccatctccaaggacatctttggcgagtggaacgtcatcagggacaagtggaacgccgagtacgacgacatccacctgaagaagaaggcggtggtgaccgagaagtatgaggacgatcgcaggaagtccttcaaaaaaatcggctccttcagcctcgaacagctccaggagtatgccgatgcggatctgtccgtcgtcgagaagctgaaggaaatcatcattcagaaggtcgacgagatctataaagtgtacgggtccagcgagaagctgttcgacgccgactttgtgctcgagaagtccctcaaaaagaatgacgccgtggtggccattatgaaagacctgctcgactccgtgaagtccttcgaaaattacattaaagcgttctttggggaggggaaggaaactaacagggatgagtccttctatggcgactttgtcctcgcgtacgacatcctgctgaaggtcgaccacatttacgacgcgatccgcaactacgtgacacagaagccgtactccaaagacaagttcaagctgtacttccagaacccgcaatttatggggggctgggacaaggataaagagacagactaccgcgcgacaattctccgctatggctccaaatactatctggccatcatggacaagaagtacgcgaagtgcctgcagaagatcgacaaagacgacgtcaatggcaactatgaaaagatcaactacaagctgctgccgggcccgaacaagatgctcccgaaggtgttcttcagcaagaagtggatggcctactacaatccaagcgaggatattcagaaaatctataaaaacgggaccttcaagaagggggacatgtttaacctcaacgactgccacaagctcattgatttcttcaaggatagcatttcccgctacccgaaatggtccaatgcgtacgattttaacttctccgagacagaaaagtacaaagacatcgcgggcttttacagggaggtggaggagcaagggtataaagtttcttttgaatccgcgagcaagaaggaagtcgacaagctcgtcgaggagggcaagctctacatgttccaaatttataacaaggacttttccgacaagagccatgggaccccaaacctccacaccatgtacttcaaactgctctttgacgagaacaaccacgggcaaatcaggctgagcggcggcgccgaattattcatgcgcagggcctccctcaagaaggaagagctggtcgtccatccagccaattccccgatcgcgaacaagaacccggacaatccgaaaaagaccaccaccctgtcctacgacgtctacaaggacaaacgcttcagcgaagaccagtacgaattacacatcccaattgcgattaataagtgcccaaagaatatcttcaaaattaatacagaggtcagggtgctgctcaaacacgacgacaatccgtatgtcatcggcattgacaggggcgagcgcaatctgctctatatcgtggtcgtggatgggaagggcaatattgtggagcagtactccctgaacgagattatcaacaacttcaatgggattaggattaagaccgactatcacagcctgctcgacaagaaagaaaaagagaggtttgaggcccgccaaaactggacctccattgagaatatcaaagaattaaaggccggctatatttcccaagtcgtccacaagatctgcgagctggtggagaaatatgacgccgtgattgcgctcgaagacttaaattctgggttcaagaactcccgcgtgaaggtggaaaaacaggtgtatcagaaattcgagaaaatgctgatcgacaaactcaattatatggtggataagaagtccaacccgtgtgccacagggggcgcgctgaagggctatcagatcaccaacaagttcgagagcttcaagagcatgagcacccagaacgggtttattttctacatcccggcgtggctcacctccaagattgacccgagcaccggcttcgtgaacctcctgaagacaaagtatacctccattgccgacagcaagaagtttatctcctccttcgaccgcattatgtatgtgccggaggaggacctcttcgagttcgccctcgactacaaaaacttcagccgcacagatgcggattacatcaagaagtggaagctgtactcctacgggaacaggatccgcatcttcaggaatccaaaaaaaaataacgtctttgactgggaggaagtgtgcctgacatccgcctacaaggaactgttcaataaatacggcatcaattaccagcagggcgacattcgcgccctcctctgtgagcagtccgacaaagcgttttactccagcttcatggccctcatgtccctgatgctccaaatgaggaatagcatcacagggcgcaccgacgtcgacttcctcatcagcccggtgaagaactctggtggttcaagcggaggctcatctggcagcgaaactccgggcacttccgagtcagctactcctgagtctagcggcgggtcgtcaggagggtctacacttaatattgaggatgaacatagattgcacgagacctctaaggaacctgatgtttctcttggatcaacttggttgtcagatttcccacaagcatgggcagagaccggaggtatgggtcttgctgttaggcaggcaccacttattattcctttgaaggcaacctctactcctgtgtcaattaagcaatatccaatgtctcaggaagctaggcttggaattaagcctcacattcaaagacttttggatcagggtattttggtgccatgtcaatcaccttggaacacaccacttttgcctgttaagaagcctggaactaatgattacagaccagtgcaagatttgagggaggttaacaagagagtggaagatattcacccaactgttccaaacccttataatcttttgtctggattgccaccttcacatcaatggtacactgtgcttgatttgaaggatgcatttttctgccttaggttgcatccaacatctcagcctctttttgctttcgagtggagagatcctgaaatgggaatttctggtcaacttacatggaccaggttgcctcagggtttcaagaactcaccaaccttgtttaatgaggcacttcacagggatttggctgattttaggattcaacatcctgatcttatccttttgcagtatgttgatgatcttttgcttgctgcaacttctgaattggattgtcaacagggaactagggcattgcttcaaacacttggaaatttgggttacagagcttcagcaaagaaggctcagatttgccaaaagcaggttaagtatcttggatacttgcttaaggaaggacaaaggtggttgaccgaggctagaaaggaaactgtgatgggtcaaccaacacctaagacccctaggcagcttagagagttcttgggaaaggcaggtttttgtaggcttttcattccaggatttgctgaaatggctgcaccactttatcctttgaccaagcctggaactttgtttaactggggtccagatcaacagaaggcataccaagaaattaagcaggctttgcttactgctccagcacttggtttgcctgatcttacaaagccatttgagttgttcgttgatgaaaagcaaggatatgcaaagggtgtgcttacccagaagttgggaccttggagaaggcctgttgcttacctttctaagaaacttgatccagtggctgcaggttggccaccttgtcttagaatggttgctgcaattgcagtgcttacaaaggatgctggaaagttgactatgggacaacctcttgttattttggcaccacacgctgttgaggcacttgtgaagcagccacctgataggtggttgtcaaacgcaagaatgacccattatcaagctcttcttttggatactgatagggtgcagttcggtcctgttgtggctttgaatccagcaacacttttgccacttcctgaggaaggattgcaacacaactgccttgatattttggctgaggcacatggtacaagacctgatcttaccgatcagccattgcctgatgctgatcacacttggtacacagatggatcttcacttttgcaagaaggacagaggaaggctggtgctgcagttactacagagactgaagtgatttgggctaaggcacttccagctggaacatctgctcaaagagcagagcttattgctttgacccaggcacttaagatggctgaaggaaagaagttgaacgtttacactgattctaggtatgctttcgcaacagctcatattcacggagaaatctatagaaggagaggatggttgacatcagagggaaaggaaattaagaacaaggatgaaattcttgcacttttgaaggctctttttcttcctaagagattgtctattattcattgcccaggacaccaaaagggtcattcagcagaagctaggggaaatagaatggctgatcaggctgcaagaaaggctgcaattactgagacacctgatacctctactcttttgatcgaaaactcttcaccaaattcaaggcttattaac

SEQ ID NO: 373 - DNA, 6078 bp, synthetic construct
  source 1..6078: mol_type = other DNA
gctcttgattttctttctaggcttccattgccacctccagtttctccaatttgtacttttgtgtcacctgctgcacaaaaggcattccagcctccaaggtcatgcggatctggtggttcaagcggaggctcatctggcagcgaaactccgggcacttccgagtcagctactcctgagtctagcggcgggtcgtcaggagggtctaaagacaagttcaagctgtacttccagaacccgcaatttatggggggctgggacaaggataaagagacagactaccgcgcgacaattctccgctatggctccaaatactatctggccatcatggacaagaagtacgcgaagtgcctgcagaagatcgacaaagacgacgtcaatggcaactatgaaaagatcaactacaagctgctgccgggcccgaacaagatgctcccgaaggtgttcttcagcaagaagtggatggcctactacaatccaagcgaggatattcagaaaatctataaaaacgggaccttcaagaagggggacatgtttaacctcaacgactgccacaagctcattgatttcttcaaggatagcatttcccgctacccgaaatggtccaatgcgtacgattttaacttctccgagacagaaaagtacaaagacatcgcgggcttttacagggaggtggaggagcaagggtataaagtttcttttgaatccgcgagcaagaaggaagtcgacaagctcgtcgaggagggcaagctctacatgttccaaatttataacaaggacttttccgacaagagccatgggaccccaaacctccacaccatgtacttcaaactgctctttgacgagaacaaccacgggcaaatcaggctgagcggcggcgccgaattattcatgcgcagggcctccctcaagaaggaagagctggtcgtccatccagccaattccccgatcgcgaacaagaacccggacaatccgaaaaagaccaccaccctgtcctacgacgtctacaaggacaaacgcttcagcgaagaccagtacgaattacacatcccaattgcgattaataagtgcccaaagaatatcttcaaaattaatacagaggtcagggtgctgctcaaacacgacgacaatccgtatgtcatcggcattgacaggggcgagcgcaatctgctctatatcgtggtcgtggatgggaagggcaatattgtggagcagtactccctgaacgagattatcaacaacttcaatgggattaggattaagaccgactatcacagcctgctcgacaagaaagaaaaagagaggtttgaggcccgccaaaactggacctccattgagaatatcaaagaattaaaggccggctatatttcccaagtcgtccacaagatctgcgagctggtggagaaatatgacgccgtgattgcgctcgaagacttaaattctgggttcaagaactcccgcgtgaaggtggaaaaacaggtgtatcagaaattcgagaaaatgctgatcgacaaactcaattatatggtggataagaagtccaacccgtgtgccacagggggcgcgctgaagggctatcagatcaccaacaagttcgagagcttcaagagcatgagcacccagaacgggtttattttctacatcccggcgtggctcacctccaagattgacccgagcaccggcttcgtgaacctcctgaagacaaagtatacctccattgccgacagcaagaagtttatctcctccttcgaccgcattatgtatgtgccggaggaggacctcttcgagttcgccctcgactacaaaaacttcagccgcacagatgcggattacatcaagaagtggaagctgtactcctacgggaacaggatccgcatcttcaggaatccaaaaaaaaataacgtctttgactgggaggaagtgtgcctgacatccgcctacaaggaactgttcaataaatacggcatcaattaccagcagggcgacattcgcgccctcctctgtgagcagtccgacaaagcgttttactccagcttcatggccctcatgtccctgatgctccaaatgaggaatagcatcacagggcgcaccgacgtcgacttcctcatcagcccggtgaagaactccgacgggatcttttacgactcccgcaactatgaggcgcaagagaatgcgatcctcccgaagaacgccgatgcgaacggggcctataatatcgccaggaaagtgctctgggccatcgggcagttcaaaaaggcggaggatgagaagctcgacaaggtgaaaattgccatttccaacaaggagtggctggagtacgcgcagacctccgtgaagcacggctcctctggcagctccggctctagcggctcctctggcagctccggctccaagctggagaagtttacaaactgttacagcctctccaaaaccctcaggtttaaagcgatcccggtgggcaagacccaggagaacatcgacaacaagaggctcctggtggaagacgagaagcgcgccgaagactacaagggcgtgaagaagctgctcgataggtactacctcagctttattaacgacgtgctgcacagcatcaaactcaagaatctcaacaactacatctccctcttccgcaaaaagacccgcaccgagaaggagaacaaggagctggagaacctggagatcaacctccgcaaggaaatcgccaaagcgttcaagggcaatgaagggtacaagagcctcttcaagaaagacatcatcgaaactatcctcccagagtttctcgatgacaaggacgagatcgcgctggtgaactcctttaacgggttcacaaccgcgtttaccggcttctttgataacagggaaaatatgttctccgaggaggccaagtccaccagcatcgccttcaggtgtatcaacgagaacctcacccgctacatttccaatatggacattttcgagaaggtggatgcgatcttcgataagcacgaggtgcaggagatcaaagagaagattctcaattccgattatgacgtcgaggatttcttcgaaggggagttctttaattttgtgctcacacaagagggcattgacgtgtacaacgcgattatcgggggcttcgtcacagagtccggggagaagattaaggggctgaatgagtacatcaatctgtacaatcagaagaccaagcagaaactgccgaaattcaagccgctctacaagcaagtcctgtccgatagggaaagcctctccttctacggcgagggctataccagcgacgaggaggtgctggaagtcttccgcaacacactgaataagaatagcgagattttctcctccatcaagaagctcgagaagctctttaagaactttgacgagtacagctccgccgggattttcgtgaagaacgggccggcgatcagcaccatctccaaggacatctttggcgagtggaacgtcatcagggacaagtggaacgccgagtacgacgacatccacctgaagaagaaggcggtggtgaccgagaagtatgaggacgatcgcaggaagtccttcaaaaaaatcggctccttcagcctcgaacagctccaggagtatgccgatgcggatctgtccgtcgtcgagaagctgaaggaaatcatcattcagaaggtcgacgagatctataaagtgtacgggtccagcgagaagctgttcgacgccgactttgtgctcgagaagtccctcaaaaagaatgacgccgtggtggccattatgaaagacctgctcgactccgtgaagtccttcgaaaattacattaaagcgttctttggggaggggaaggaaactaacagggatgagtccttctatggcgactttgtcctcgcgtacgacatcctgctgaaggtcgaccacatttacgacgcgatccgcaactacgtgacacagaagccgtactcctctggtggttcaagcggaggctcatctggcagcgaaactccgggcacttccgagtcagctactcctgagtctagcggcgggtcgtcaggagggtctacacttaatattgaggatgaacatagattgcacgagacctctaaggaacctgatgtttctcttggatcaacttggttgtcagatttcccacaagcatgggcagagaccggaggtatgggtcttgctgttaggcaggcaccacttattattcctttgaaggcaacctctactcctgtgtcaattaagcaatatccaatgtctcaggaagctaggcttggaattaagcctcacattcaaagacttttggatcagggtattttggtgccatgtcaatcaccttggaacacaccacttttgcctgttaagaagcctggaactaatgattacagaccagtgcaagatttgagggaggttaacaagagagtggaagatattcacccaactgttccaaacccttataatcttttgtctggattgccaccttcacatcaatggtacactgtgcttgatttgaaggatgcatttttctgccttaggttgcatccaacatctcagcctctttttgctttcgagtggagagatcctgaaatgggaatttctggtcaacttacatggaccaggttgcctcagggtttcaagaactcaccaaccttgtttaatgaggcacttcacagggatttggctgattttaggattcaacatcctgatcttatccttttgcagtatgttgatgatcttttgcttgctgcaacttctgaattggattgtcaacagggaactagggcattgcttcaaacacttggaaatttgggttacagagcttcagcaaagaaggctcagatttgccaaaagcaggttaagtatcttggatacttgcttaaggaaggacaaaggtggttgaccgaggctagaaaggaaactgtgatgggtcaaccaacacctaagacccctaggcagcttagagagttcttgggaaaggcaggtttttgtaggcttttcattccaggatttgctgaaatggctgcaccactttatcctttgaccaagcctggaactttgtttaactggggtccagatcaacagaaggcataccaagaaattaagcaggctttgcttactgctccagcacttggtttgcctgatcttacaaagccatttgagttgttcgttgatgaaaagcaaggatatgcaaagggtgtgcttacccagaagttgggaccttggagaaggcctgttgcttacctttctaagaaacttgatccagtggctgcaggttggccaccttgtcttagaatggttgctgcaattgcagtgcttacaaaggatgctggaaagttgactatgggacaacctcttgttattttggcaccacacgctgttgaggcacttgtgaagcagccacctgataggtggttgtcaaacgcaagaatgacccattatcaagctcttcttttggatactgatagggtgcagttcggtcctgttgtggctttgaatccagcaacacttttgccacttcctgaggaaggattgcaacacaactgccttgatattttggctgaggcacatggtacaagacctgatcttaccgatcagccattgcctgatgctgatcacacttggtacacagatggatcttcacttttgcaagaaggacagaggaaggctggtgctgcagttactacagagactgaagtgatttgggctaaggcacttccagctggaacatctgctcaaagagcagagcttattgctttgacccaggcacttaagatggctgaaggaaagaagttgaacgtttacactgattctaggtatgctttcgcaacagctcatattcacggagaaatctatagaaggagaggatggttgacatcagagggaaaggaaattaagaacaaggatgaaattcttgcacttttgaaggctctttttcttcctaagagattgtctattattcattgcccaggacaccaaaagggtcattcagcagaagctaggggaaatagaatggctgatcaggctgcaagaaaggctgcaattactgagacacctgatacctctactcttttgatcgaaaactcttcaccaaattcaaggcttattaac

SEQ ID NO: 374 - DNA, 6078 bp, synthetic construct
  source 1..6078: mol_type = other DNA
gctcttgattttctttctaggcttccattgccacctccagtttctccaatttgtacttttgtgtcacctgctgcacaaaaggcattccagcctccaaggtcatgcggatctggtggttcaagcggaggctcatctggcagcgaaactccgggcacttccgagtcagctactcctgagtctagcggcgggtcgtcaggagggtctaagtccctcaaaaagaatgacgccgtggtggccattatgaaagacctgctcgactccgtgaagtccttcgaaaattacattaaagcgttctttggggaggggaaggaaactaacagggatgagtccttctatggcgactttgtcctcgcgtacgacatcctgctgaaggtcgaccacatttacgacgcgatccgcaactacgtgacacagaagccgtactccaaagacaagttcaagctgtacttccagaacccgcaatttatggggggctgggacaaggataaagagacagactaccgcgcgacaattctccgctatggctccaaatactatctggccatcatggacaagaagtacgcgaagtgcctgcagaagatcgacaaagacgacgtcaatggcaactatgaaaagatcaactacaagctgctgccgggcccgaacaagatgctcccgaaggtgttcttcagcaagaagtggatggcctactacaatccaagcgaggatattcagaaaatctataaaaacgggaccttcaagaagggggacatgtttaacctcaacgactgccacaagctcattgatttcttcaaggatagcatttcccgctacccgaaatggtccaatgcgtacgattttaacttctccgagacagaaaagtacaaagacatcgcgggcttttacagggaggtggaggagcaagggtataaagtttcttttgaatccgcgagcaagaaggaagtcgacaagctcgtcgaggagggcaagctctacatgttccaaatttataacaaggacttttccgacaagagccatgggaccccaaacctccacaccatgtacttcaaactgctctttgacgagaacaaccacgggcaaatcaggctgagcggcggcgccgaattattcatgcgcagggcctccctcaagaaggaagagctggtcgtccatccagccaattccccgatcgcgaacaagaacccggacaatccgaaaaagaccaccaccctgtcctacgacgtctacaaggacaaacgcttcagcgaagaccagtacgaattacacatcccaattgcgattaataagtgcccaaagaatatcttcaaaattaatacagaggtcagggtgctgctcaaacacgacgacaatccgtatgtcatcggcattgacaggggcgagcgcaatctgctctatatcgtggtcgtggatgggaagggcaatattgtggagcagtactccctgaacgagattatcaacaacttcaatgggattaggattaagaccgactatcacagcctgctcgacaagaaagaaaaagagaggtttgaggcccgccaaaactggacctccattgagaatatcaaagaattaaaggccggctatatttcccaagtcgtccacaagatctgcgagctggtggagaaatatgacgccgtgattgcgctcgaagacttaaattctgggttcaagaactcccgcgtgaaggtggaaaaacaggtgtatcagaaattcgagaaaatgctgatcgacaaactcaattatatggtggataagaagtccaacccgtgtgccacagggggcgcgctgaagggctatcagatcaccaacaagttcgagagcttcaagagcatgagcacccagaacgggtttattttctacatcccggcgtggctcacctccaagattgacccgagcaccggcttcgtgaacctcctgaagacaaagtatacctccattgccgacagcaagaagtttatctcctccttcgaccgcattatgtatgtgccggaggaggacctcttcgagttcgccctcgactacaaaaacttcagccgcacagatgcggattacatcaagaagtggaagctgtactcctacgggaacaggatccgcatcttcaggaatccaaaaaaaaataacgtctttgactgggaggaagtgtgcctgacatccgcctacaaggaactgttcaataaatacggcatcaattaccagcagggcgacattcgcgccctcctctgtgagcagtccgacaaagcgttttactccagcttcatggccctcatgtccctgatgctccaaatgaggaatagcatcacagggcgcaccgacgtcgacttcctcatcagcccggtgaagaactccgacgggatcttttacgactcccgcaactatgaggcgcaagagaatgcgatcctcccgaagaacgccgatgcgaacggggcctataatatcgccaggaaagtgctctgggccatcgggcagttcaaaaaggcggaggatgagaagctcgacaaggtgaaaattgccatttccaacaaggagtggctggagtacgcgcagacctccgtgaagcacggctcctctggcagctccggctctagcggctcctctggcagctccggctccaagctggagaagtttacaaactgttacagcctctccaaaaccctcaggtttaaagcgatcccggtgggcaagacccaggagaacatcgacaacaagaggctcctggtggaagacgagaagcgcgccgaagactacaagggcgtgaagaagctgctcgataggtactacctcagctttattaacgacgtgctgcacagcatcaaactcaagaatctcaacaactacatctccctcttccgcaaaaagacccgcaccgagaaggagaacaaggagctggagaacctggagatcaacctccgcaaggaaatcgccaaagcgttcaagggcaatgaagggtacaagagcctcttcaagaaagacatcatcgaaactatcctcccagagtttctcgatgacaaggacgagatcgcgctggtgaactcctttaacgggttcacaaccgcgtttaccggcttctttgataacagggaaaatatgttctccgaggaggccaagtccaccagcatcgccttcaggtgtatcaacgagaacctcacccgctacatttccaatatggacattttcgagaaggtggatgcgatcttcgataagcacgaggtgcaggagatcaaagagaagattctcaattccgattatgacgtcgaggatttcttcgaaggggagttctttaattttgtgctcacacaagagggcattgacgtgtacaacgcgattatcgggggcttcgtcacagagtccggggagaagattaaggggctgaatgagtacatcaatctgtacaatcagaagaccaagcagaaactgccgaaattcaagccgctctacaagcaagtcctgtccgatagggaaagcctctccttctacggcgagggctataccagcgacgaggaggtgctggaagtcttccgcaacacactgaataagaatagcgagattttctcctccatcaagaagctcgagaagctctttaagaactttgacgagtacagctccgccgggattttcgtgaagaacgggccggcgatcagcaccatctccaaggacatctttggcgagtggaacgtcatcagggacaagtggaacgccgagtacgacgacatccacctgaagaagaaggcggtggtgaccgagaagtatgaggacgatcgcaggaagtccttcaaaaaaatcggctccttcagcctcgaacagctccaggagtatgccgatgcggatctgtccgtcgtcgagaagctgaaggaaatcatcattcagaaggtcgacgagatctataaagtgtacgggtccagcgagaagctgttcgacgccgactttgtgctcgagtctggtggttcaagcggaggctcatctggcagcgaaactccgggcacttccgagtcagctactcctgagtctagcggcgggtcgtcaggagggtctacacttaatattgaggatgaacatagattgcacgagacctctaaggaacctgatgtttctcttggatcaacttggttgtcagatttcccacaagcatgggcagagaccggaggtatgggtcttgctgttaggcaggcaccacttattattcctttgaaggcaacctctactcctgtgtcaattaagcaatatccaatgtctcaggaagctaggcttggaattaagcctcacattcaaagacttttggatcagggtattttggtgccatgtcaatcaccttggaacacaccacttttgcctgttaagaagcctggaactaatgattacagaccagtgcaagatttgagggaggttaacaagagagtggaagatattcacccaactgttccaaacccttataatcttttgtctggattgccaccttcacatcaatggtacactgtgcttgatttgaaggatgcatttttctgccttaggttgcatccaacatctcagcctctttttgctttcgagtggagagatcctgaaatgggaatttctggtcaacttacatggaccaggttgcctcagggtttcaagaactcaccaaccttgtttaatgaggcacttcacagggatttggctgattttaggattcaacatcctgatcttatccttttgcagtatgttgatgatcttttgcttgctgcaacttctgaattggattgtcaacagggaactagggcattgcttcaaacacttggaaatttgggttacagagcttcagcaaagaaggctcagatttgccaaaagcaggttaagtatcttggatacttgcttaaggaaggacaaaggtggttgaccgaggctagaaaggaaactgtgatgggtcaaccaacacctaagacccctaggcagcttagagagttcttgggaaaggcaggtttttgtaggcttttcattccaggatttgctgaaatggctgcaccactttatcctttgaccaagcctggaactttgtttaactggggtccagatcaacagaaggcataccaagaaattaagcaggctttgcttactgctccagcacttggtttgcctgatcttacaaagccatttgagttgttcgttgatgaaaagcaaggatatgcaaagggtgtgcttacccagaagttgggaccttggagaaggcctgttgcttacctttctaagaaacttgatccagtggctgcaggttggccaccttgtcttagaatggttgctgcaattgcagtgcttacaaaggatgctggaaagttgactatgggacaacctcttgttattttggcaccacacgctgttgaggcacttgtgaagcagccacctgataggtggttgtcaaacgcaagaatgacccattatcaagctcttcttttggatactgatagggtgcagttcggtcctgttgtggctttgaatccagcaacacttttgccacttcctgaggaaggattgcaacacaactgccttgatattttggctgaggcacatggtacaagacctgatcttaccgatcagccattgcctgatgctgatcacacttggtacacagatggatcttcacttttgcaagaaggacagaggaaggctggtgctgcagttactacagagactgaagtgatttgggctaaggcacttccagctggaacatctgctcaaagagcagagcttattgctttgacccaggcacttaagatggctgaaggaaagaagttgaacgtttacactgattctaggtatgctttcgcaacagctcatattcacggagaaatctatagaaggagaggatggttgacatcagagggaaaggaaattaagaacaaggatgaaattcttgcacttttgaaggctctttttcttcctaagagattgtctattattcattgcccaggacaccaaaagggtcattcagcagaagctaggggaaatagaatggctgatcaggctgcaagaaaggctgcaattactgagacacctgatacctctactcttttgatcgaaaactcttcaccaaattcaaggcttattaac

SEQ ID NO: 375 - DNA, 6078 bp, synthetic construct
  source 1..6078: mol_type = other DNA
gctcttgattttctttctaggcttccattgccacctccagtttctccaatttgtacttttgtgtcacctgctgcacaaaaggcattccagcctccaaggtcatgcggatctggtggttcaagcggaggctcatctggcagcgaaactccgggcacttccgagtcagctactcctgagtctagcggcgggtcgtcaggagggtcttccgacaaagcgttttactccagcttcatggccctcatgtccctgatgctccaaatgaggaatagcatcacagggcgcaccgacgtcgacttcctcatcagcccggtgaagaactccgacgggatcttttacgactcccgcaactatgaggcgcaagagaatgcgatcctcccgaagaacgccgatgcgaacggggcctataatatcgccaggaaagtgctctgggccatcgggcagttcaaaaaggcggaggatgagaagctcgacaaggtgaaaattgccatttccaacaaggagtggctggagtacgcgcagacctccgtgaagcacggctcctctggcagctccggctctagcggctcctctggcagctccggctccaagctggagaagtttacaaactgttacagcctctccaaaaccctcaggtttaaagcgatcccggtgggcaagacccaggagaacatcgacaacaagaggctcctggtggaagacgagaagcgcgccgaagactacaagggcgtgaagaagctgctcgataggtactacctcagctttattaacgacgtgctgcacagcatcaaactcaagaatctcaacaactacatctccctcttccgcaaaaagacccgcaccgagaaggagaacaaggagctggagaacctggagatcaacctccgcaaggaaatcgccaaagcgttcaagggcaatgaagggtacaagagcctcttcaagaaagacatcatcgaaactatcctcccagagtttctcgatgacaaggacgagatcgcgctggtgaactcctttaacgggttcacaaccgcgtttaccggcttctttgataacagggaaaatatgttctccgaggaggccaagtccaccagcatcgccttcaggtgtatcaacgagaacctcacccgctacatttccaatatggacattttcgagaaggtggatgcgatcttcgataagcacgaggtgcaggagatcaaagagaagattctcaattccgattatgacgtcgaggatttcttcgaaggggagttctttaattttgtgctcacacaagagggcattgacgtgtacaacgcgattatcgggggcttcgtcacagagtccggggagaagattaaggggctgaatgagtacatcaatctgtacaatcagaagaccaagcagaaactgccgaaattcaagccgctctacaagcaagtcctgtccgatagggaaagcctctccttctacggcgagggctataccagcgacgaggaggtgctggaagtcttccgcaacacactgaataagaatagcgagattttctcctccatcaagaagctcgagaagctctttaagaactttgacgagtacagctccgccgggattttcgtgaagaacgggccggcgatcagcaccatctccaaggacatctttggcgagtggaacgtcatcagggacaagtggaacgccgagtacgacgacatccacctgaagaagaaggcggtggtgaccgagaagtatgaggacgatcgcaggaagtccttcaaaaaaatcggctccttcagcctcgaacagctccaggagtatgccgatgcggatctgtccgtcgtcgagaagctgaaggaaatcatcattcagaaggtcgacgagatctataaagtgtacgggtccagcgagaagctgttcgacgccgactttgtgctcgagaagtccctcaaaaagaatgacgccgtggtggccattatgaaagacctgctcgactccgtgaagtccttcgaaaattacattaaagcgttctttggggaggggaaggaaactaacagggatgagtccttctatggcgactttgtcctcgcgtacgacatcctgctgaaggtcgaccacatttacgacgcgatccgcaactacgtgacacagaagccgtactccaaagacaagttcaagctgtacttccagaacccgcaatttatggggggctgggacaaggataaagagacagactaccgcgcgacaattctccgctatggctccaaatactatctggccatcatggacaagaagtacgcgaagtgcctgcagaagatcgacaaagacgacgtcaatggcaactatgaaaagatcaactacaagctgctgccgggcccgaacaagatgctcccgaaggtgttcttcagcaagaagtggatggcctactacaatccaagcgaggatattcagaaaatctataaaaacgggaccttcaagaagggggacatgtttaacctcaacgactgccacaagctcattgatttcttcaaggatagcatttcccgctacccgaaatggtccaatgcgtacgattttaacttctccgagacagaaaagtacaaagacatcgcgggcttttacagggaggtggaggagcaagggtataaagtttcttttgaatccgcgagcaagaaggaagtcgacaagctcgtcgaggagggcaagctctacatgttccaaatttataacaaggacttttccgacaagagccatgggaccccaaacctccacaccatgtacttcaaactgctctttgacgagaacaaccacgggcaaatcaggctgagcggcggcgccgaattattcatgcgcagggcctccctcaagaaggaagagctggtcgtccatccagccaattccccgatcgcgaacaagaacccggacaatccgaaaaagaccaccaccctgtcctacgacgtctacaaggacaaacgcttcagcgaagaccagtacgaattacacatcccaattgcgattaataagtgcccaaagaatatcttcaaaattaatacagaggtcagggtgctgctcaaacacgacgacaatccgtatgtcatcggcattgacaggggcgagcgcaatctgctctatatcgtggtcgtggatgggaagggcaatattgtggagcagtactccctgaacgagattatcaacaacttcaatgggattaggattaagaccgactatcacagcctgctcgacaagaaagaaaaagagaggtttgaggcccgccaaaactggacctccattgagaatatcaaagaattaaaggccggctatatttcccaagtcgtccacaagatctgcgagctggtggagaaatatgacgccgtgattgcgctcgaagacttaaattctgggttcaagaactcccgcgtgaaggtggaaaaacaggtgtatcagaaattcgagaaaatgctgatcgacaaactcaattatatggtggataagaagtccaacccgtgtgccacagggggcgcgctgaagggctatcagatcaccaacaagttcgagagcttcaagagcatgagcacccagaacgggtttattttctacatcccggcgtggctcacctccaagattgacccgagcaccggcttcgtgaacctcctgaagacaaagtatacctccattgccgacagcaagaagtttatctcctccttcgaccgcattatgtatgtgccggaggaggacctcttcgagttcgccctcgactacaaaaacttcagccgcacagatgcggattacatcaagaagtggaagctgtactcctacgggaacaggatccgcatcttcaggaatccaaaaaaaaataacgtctttgactgggaggaagtgtgcctgacatccgcctacaaggaactgttcaataaatacggcatcaattaccagcagggcgacattcgcgccctcctctgtgagcagtctggtggttcaagcggaggctcatctggcagcgaaactccgggcacttccgagtcagctactcctgagtctagcggcgggtcgtcaggagggtctacacttaatattgaggatgaacatagattgcacgagacctctaaggaacctgatgtttctcttggatcaacttggttgtcagatttcccacaagcatgggcagagaccggaggtatgggtcttgctgttaggcaggcaccacttattattcctttgaaggcaacctctactcctgtgtcaattaagcaatatccaatgtctcaggaagctaggcttggaattaagcctcacattcaaagacttttggatcagggtattttggtgccatgtcaatcaccttggaacacaccacttttgcctgttaagaagcctggaactaatgattacagaccagtgcaagatttgagggaggttaacaagagagtggaagatattcacccaactgttccaaacccttataatcttttgtctggattgccaccttcacatcaatggtacactgtgcttgatttgaaggatgcatttttctgccttaggttgcatccaacatctcagcctctttttgctttcgagtggagagatcctgaaatgggaatttctggtcaacttacatggaccaggttgcctcagggtttcaagaactcaccaaccttgtttaatgaggcacttcacagggatttggctgattttaggattcaacatcctgatcttatccttttgcagtatgttgatgatcttttgcttgctgcaacttctgaattggattgtcaacagggaactagggcattgcttcaaacacttggaaatttgggttacagagcttcagcaaagaaggctcagatttgccaaaagcaggttaagtatcttggatacttgcttaaggaaggacaaaggtggttgaccgaggctagaaaggaaactgtgatgggtcaaccaacacctaagacccctaggcagcttagagagttcttgggaaaggcaggtttttgtaggcttttcattccaggatttgctgaaatggctgcaccactttatcctttgaccaagcctggaactttgtttaactggggtccagatcaacagaaggcataccaagaaattaagcaggctttgcttactgctccagcacttggtttgcctgatcttacaaagccatttgagttgttcgttgatgaaaagcaaggatatgcaaagggtgtgcttacccagaagttgggaccttggagaaggcctgttgcttacctttctaagaaacttgatccagtggctgcaggttggccaccttgtcttagaatggttgctgcaattgcagtgcttacaaaggatgctggaaagttgactatgggacaacctcttgttattttggcaccacacgctgttgaggcacttgtgaagcagccacctgataggtggttgtcaaacgcaagaatgacccattatcaagctcttcttttggatactgatagggtgcagttcggtcctgttgtggctttgaatccagcaacacttttgccacttcctgaggaaggattgcaacacaactgccttgatattttggctgaggcacatggtacaagacctgatcttaccgatcagccattgcctgatgctgatcacacttggtacacagatggatcttcacttttgcaagaaggacagaggaaggctggtgctgcagttactacagagactgaagtgatttgggctaaggcacttccagctggaacatctgctcaaagagcagagcttattgctttgacccaggcacttaagatggctgaaggaaagaagttgaacgtttacactgattctaggtatgctttcgcaacagctcatattcacggagaaatctatagaaggagaggatggttgacatcagagggaaaggaaattaagaacaaggatgaaattcttgcacttttgaaggctctttttcttcctaagagattgtctattattcattgcccaggacaccaaaagggtcattcagcagaagctaggggaaatagaatggctgatcaggctgcaagaaaggctgcaattactgagacacctgatacctctactcttttgatcgaaaactcttcaccaaattcaaggcttattaac

SEQ ID NO: 376 - DNA, 6030 bp, synthetic construct
  source 1..6030: mol_type = other DNA
gctcttgattttctttctaggcttccattgccacctccagtttctccaatttgtacttttgtgtcacctgctgcacaaaaggcattccagcctccaaggtcatgcggatctggtggttcaagcggaggctcatctggcagcgaaactccgggcacttccgagtcagctactcctgagtctagcggcgggtcgtcaggagggtcttccaagctggagaagtttacaaactgttacagcctctccaaaaccctcaggtttaaagcgatcccggtgggcaagacccaggagaacatcgacaacaagaggctcctggtggaagacgagaagcgcgccgaagactacaagggcgtgaagaagctgctcgataggtactacctcagctttattaacgacgtgctgcacagcatcaaactcaagaatctcaacaactacatctccctcttccgcaaaaagacccgcaccgagaaggagaacaaggagctggagaacctggagatcaacctccgcaaggaaatcgccaaagcgttcaagggcaatgaagggtacaagagcctcttcaagaaagacatcatcgaaactatcctcccagagtttctcgatgacaaggacgagatcgcgctggtgaactcctttaacgggttcacaaccgcgtttaccggcttctttgataacagggaaaatatgttctccgaggaggccaagtccaccagcatcgccttcaggtgtatcaacgagaacctcacccgctacatttccaatatggacattttcgagaaggtggatgcgatcttcgataagcacgaggtgcaggagatcaaagagaagattctcaattccgattatgacgtcgaggatttcttcgaaggggagttctttaattttgtgctcacacaagagggcattgacgtgtacaacgcgattatcgggggcttcgtcacagagtccggggagaagattaaggggctgaatgagtacatcaatctgtacaatcagaagaccaagcagaaactgccgaaattcaagccgctctacaagcaagtcctgtccgatagggaaagcctctccttctacggcgagggctataccagcgacgaggaggtgctggaagtcttccgcaacacactgaataagaatagcgagattttctcctccatcaagaagctcgagaagctctttaagaactttgacgagtacagctccgccgggattttcgtgaagaacgggccggcgatcagcaccatctccaaggacatctttggcgagtggaacgtcatcagggacaagtggaacgccgagtacgacgacatccacctgaagaagaaggcggtggtgaccgagaagtatgaggacgatcgcaggaagtccttcaaaaaaatcggctccttcagcctcgaacagctccaggagtatgccgatgcggatctgtccgtcgtcgagaagctgaaggaaatcatcattcagaaggtcgacgagatctataaagtgtacgggtccagcgagaagctgttcgacgccgactttgtgctcgagaagtccctcaaaaagaatgacgccgtggtggccattatgaaagacctgctcgactccgtgaagtccttcgaaaattacattaaagcgttctttggggaggggaaggaaactaacagggatgagtccttctatggcgactttgtcctcgcgtacgacatcctgctgaaggtcgaccacatttacgacgcgatccgcaactacgtgacacagaagccgtactccaaagacaagttcaagctgtacttccagaacccgcaatttatggggggctgggacaaggataaagagacagactaccgcgcgacaattctccgctatggctccaaatactatctggccatcatggacaagaagtacgcgaagtgcctgcagaagatcgacaaagacgacgtcaatggcaactatgaaaagatcaactacaagctgctgccgggcccgaacaagatgctcccgaaggtgttcttcagcaagaagtggatggcctactacaatccaagcgaggatattcagaaaatctataaaaacgggaccttcaagaagggggacatgtttaacctcaacgactgccacaagctcattgatttcttcaaggatagcatttcccgctacccgaaatggtccaatgcgtacgattttaacttctccgagacagaaaagtacaaagacatcgcgggcttttacagggaggtggaggagcaagggtataaagtttcttttgaatccgcgagcaagaaggaagtcgacaagctcgtcgaggagggcaagctctacatgttccaaatttataacaaggacttttccgacaagagccatgggaccccaaacctccacaccatgtacttcaaactgctctttgacgagaacaaccacgggcaaatcaggctgagcggcggcgccgaattattcatgcgcagggcctccctcaagaaggaagagctggtcgtccatccagccaattccccgatcgcgaacaagaacccggacaatccgaaaaagaccaccaccctgtcctacgacgtctacaaggacaaacgcttcagcgaagaccagtacgaattacacatcccaattgcgattaataagtgcccaaagaatatcttcaaaattaatacagaggtcagggtgctgctcaaacacgacgacaatccgtatgtcatcggcattgacaggggcgagcgcaatctgctctatatcgtggtcgtggatgggaagggcaatattgtggagcagtactccctgaacgagattatcaacaacttcaatgggattaggattaagaccgactatcacagcctgctcgacaagaaagaaaaagagaggtttgaggcccgccaaaactggacctccattgagaatatcaaagaattaaaggccggctatatttcccaagtcgtccacaagatctgcgagctggtggagaaatatgacgccgtgattgcgctcgaagacttaaattctgggttcaagaactcccgcgtgaaggtggaaaaacaggtgtatcagaaattcgagaaaatgctgatcgacaaactcaattatatggtggataagaagtccaacccgtgtgccacagggggcgcgctgaagggctatcagatcaccaacaagttcgagagcttcaagagcatgagcacccagaacgggtttattttctacatcccggcgtggctcacctccaagattgacccgagcaccggcttcgtgaacctcctgaagacaaagtatacctccattgccgacagcaagaagtttatctcctccttcgaccgcattatgtatgtgccggaggaggacctcttcgagttcgccctcgactacaaaaacttcagccgcacagatgcggattacatcaagaagtggaagctgtactcctacgggaacaggatccgcatcttcaggaatccaaaaaaaaataacgtctttgactgggaggaagtgtgcctgacatccgcctacaaggaactgttcaataaatacggcatcaattaccagcagggcgacattcgcgccctcctctgtgagcagtccgacaaagcgttttactccagcttcatggccctcatgtccctgatgctccaaatgaggaatagcatcacagggcgcaccgacgtcgacttcctcatcagcccggtgaagaactccgacgggatcttttacgactcccgcaactatgaggcgcaagagaatgcgatcctcccgaagaacgccgatgcgaacggggcctataatatcgccaggaaagtgctctgggccatcgggcagttcaaaaaggcggaggatgagaagctcgacaaggtgaaaattgccatttccaacaaggagtggctggagtacgcgcagacctccgtgaagcactctggtggttcaagcggaggctcatctggcagcgaaactccgggcacttccgagtcagctactcctgagtctagcggcgggtcgtcaggagggtctacacttaatattgaggatgaacatagattgcacgagacctctaaggaacctgatgtttctcttggatcaacttggttgtcagatttcccacaagcatgggcagagaccggaggtatgggtcttgctgttaggcaggcaccacttattattcctttgaaggcaacctctactcctgtgtcaattaagcaatatccaatgtctcaggaagctaggcttggaattaagcctcacattcaaagacttttggatcagggtattttggtgccatgtcaatcaccttggaacacaccacttttgcctgttaagaagcctggaactaatgattacagaccagtgcaagatttgagggaggttaacaagagagtggaagatattcacccaactgttccaaacccttataatcttttgtctggattgccaccttcacatcaatggtacactgtgcttgatttgaaggatgcatttttctgccttaggttgcatccaacatctcagcctctttttgctttcgagtggagagatcctgaaatgggaatttctggtcaacttacatggaccaggttgcctcagggtttcaagaactcaccaaccttgtttaatgaggcacttcacagggatttggctgattttaggattcaacatcctgatcttatccttttgcagtatgttgatgatcttttgcttgctgcaacttctgaattggattgtcaacagggaactagggcattgcttcaaacacttggaaatttgggttacagagcttcagcaaagaaggctcagatttgccaaaagcaggttaagtatcttggatacttgcttaaggaaggacaaaggtggttgaccgaggctagaaaggaaactgtgatgggtcaaccaacacctaagacccctaggcagcttagagagttcttgggaaaggcaggtttttgtaggcttttcattccaggatttgctgaaatggctgcaccactttatcctttgaccaagcctggaactttgtttaactggggtccagatcaacagaaggcataccaagaaattaagcaggctttgcttactgctccagcacttggtttgcctgatcttacaaagccatttgagttgttcgttgatgaaaagcaaggatatgcaaagggtgtgcttacccagaagttgggaccttggagaaggcctgttgcttacctttctaagaaacttgatccagtggctgcaggttggccaccttgtcttagaatggttgctgcaattgcagtgcttacaaaggatgctggaaagttgactatgggacaacctcttgttattttggcaccacacgctgttgaggcacttgtgaagcagccacctgataggtggttgtcaaacgcaagaatgacccattatcaagctcttcttttggatactgatagggtgcagttcggtcctgttgtggctttgaatccagcaacacttttgccacttcctgaggaaggattgcaacacaactgccttgatattttggctgaggcacatggtacaagacctgatcttaccgatcagccattgcctgatgctgatcacacttggtacacagatggatcttcacttttgcaagaaggacagaggaaggctggtgctgcagttactacagagactgaagtgatttgggctaaggcacttccagctggaacatctgctcaaagagcagagcttattgctttgacccaggcacttaagatggctgaaggaaagaagttgaacgtttacactgattctaggtatgctttcgcaacagctcatattcacggagaaatctatagaaggagaggatggttgacatcagagggaaaggaaattaagaacaaggatgaaattcttgcacttttgaaggctctttttcttcctaagagattgtctattattcattgcccaggacaccaaaagggtcattcagcagaagctaggggaaatagaatggctgatcaggctgcaagaaaggctgcaattactgagacacctgatacctctactcttttgatcgaaaactcttcaccaaattcaaggcttattaac

SEQ ID NO: 377 - DNA, 10416 bp, synthetic construct
  source 1..10416: mol_type = other DNA
ttgcccggcgtcaatacgggataataccgcgccacatagcagaactttaaaagtgctcatcattggaaaacgttcttcggggcgaaaactctcaaggatcttaccgctgttgagatccagttcgatgtaacccactcgtgcacccaactgatcttcagcatcttttactttcaccagcgtttctgggtgagcaaaaacaggaaggcaaaatgccgcaaaaaagggaataagggcgacacggaaatgttgaatactcatactcttcctttttcaatattattgaagcatttatcagggttattgtctcatgagcggatacatatttgaatgtatttagaaaaataaacaaataggggttccgcgcacatttccccgaaaagtgccacctgacgtcgacggatcgggagatcgatctcccgatcccctagggtcgactctcagtacaatctgctctgatgccgcatagttaagccagtatctgctccctgcttgtgtgttggaggtcgctgagtagtgcgcgagcaaaatttaagctacaacaaggcaaggcttgaccgacaattgcatgaagaatctgcttagggttaggcgttttgcgctgcttcgcgatgtacgggccagatatacgcgttgacattgattattgactagttattaatagtaatcaattacggggtcattagttcatagcccatatatggagttccgcgttacataacttacggtaaatggcccgcctggctgaccgcccaacgacccccgcccattgacgtcaataatgacgtatgttcccatagtaacgccaatagggactttccattgacgtcaatgggtggagtatttacggtaaactgcccacttggcagtacatcaagtgtatcatatgccaagtacgccccctattgacgtcaatgacggtaaatggcccgcctggcattatgcccagtacatgaccttatgggactttcctacttggcagtacatctacgtattagtcatcgctattaccatggtgatgcggttttggcagtacatcaatgggcgtggatagcggtttgactcacggggatttccaagtctccaccccattgacgtcaatgggagtttgttttggcaccaaaatcaacgggactttccaaaatgtcgtaacaactccgccccattgacgcaaatgggcggtaggcgtgtacggtgggaggtctatataagcagagctggtttagtgaaccgtcagatccgctagagatccgcggccgctaatacgactcactatagggagagccgccaccatgaaacggacagccgacggaagcgagttcgagtcaccaaagaagaagcggaaagtcacacttaatattgaggatgaacatagattgcacgagacctctaaggaacctgatgtttctcttggatcaacttggttgtcagatttcccacaagcatgggcagagaccggaggtatgggtcttgctgttaggcaggcaccacttattattcctttgaaggcaacctctactcctgtgtcaattaagcaatatccaatgtctcaggaagctaggcttggaattaagcctcacattcaaagacttttggatcagggtattttggtgccatgtcaatcaccttggaacacaccacttttgcctgttaagaagcctggaactaatgattacagaccagtgcaagatttgagggaggttaacaagagagtggaagatattcacccaactgttccaaacccttataatcttttgtctggattgccaccttcacatcaatggtacactgtgcttgatttgaaggatgcatttttctgccttaggttgcatccaacatctcagcctctttttgctttcgagtggagagatcctgaaatgggaatttctggtcaacttacatggaccaggttgcctcagggtttcaagaactcaccaaccttgtttaatgaggcacttcacagggatttggctgattttaggattcaacatcctgatcttatccttttgcagtatgttgatgatcttttgcttgctgcaacttctgaattggattgtcaacagggaactagggcattgcttcaaacacttggaaatttgggttacagagcttcagcaaagaaggctcagatttgccaaaagcaggttaagtatcttggatacttgcttaaggaaggacaaaggtggttgaccgaggctagaaaggaaactgtgatgggtcaaccaacacctaagacccctaggcagcttagagagttcttgggaaaggcaggtttttgtaggcttttcattccaggatttgctgaaatggctgcaccactttatcctttgaccaagcctggaactttgtttaactggggtccagatcaacagaaggcataccaagaaattaagcaggctttgcttactgctccagcacttggtttgcctgatcttacaaagccatttgagttgttcgttgatgaaaagcaaggatatgcaaagggtgtgcttacccagaagttgggaccttggagaaggcctgttgcttacctttctaagaaacttgatccagtggctgcaggttggccaccttgtcttagaatggttgctgcaattgcagtgcttacaaaggatgctggaaagttgactatgggacaacctcttgttattttggcaccacacgctgttgaggcacttgtgaagcagccacctgataggtggttgtcaaacgcaagaatgacccattatcaagctcttcttttggatactgatagggtgcagttcggtcctgttgtggctttgaatccagcaacacttttgccacttcctgaggaaggattgcaacacaactgccttgatattttggctgaggcacatggtacaagacctgatcttaccgatcagccattgcctgatgctgatcacacttggtacacagatggatcttcacttttgcaagaaggacagaggaaggctggtgctgcagttactacagagactgaagtgatttgggctaaggcacttccagctggaacatctgctcaaagagcagagcttattgctttgacccaggcacttaagatggctgaaggaaagaagttgaacgtttacactgattctaggtatgctttcgcaacagctcatattcacggagaaatctatagaaggagaggatggttgacatcagagggaaaggaaattaagaacaaggatgaaattcttgcacttttgaaggctctttttcttcctaagagattgtctattattcattgcccaggacaccaaaagggtcattcagcagaagctaggggaaatagaatggctgatcaggctgcaagaaaggctgcaattactgagacacctgatacctctactcttttgatcgaaaactcttcaccaaattcaaggcttattaactctggtggttcaagcggaggctcatctggcagcgaaactccgggcacttccgagtcagctactcctgagtctagcggcgggtcgtcaggagggtctcgcaccgagaaggagaacaaggagctggagaacctggagatcaacctccgcaaggaaatcgccaaagcgttcaagggcaatgaagggtacaagagcctcttcaagaaagacatcatcgaaactatcctcccagagtttctcgatgacaaggacgagatcgcgctggtgaactcctttaacgggttcacaaccgcgtttaccggcttctttgataacagggaaaatatgttctccgaggaggccaagtccaccagcatcgccttcaggtgtatcaacgagaacctcacccgctacatttccaatatggacattttcgagaaggtggatgcgatcttcgataagcacgaggtgcaggagatcaaagagaagattctcaattccgattatgacgtcgaggatttcttcgaaggggagttctttaattttgtgctcacacaagagggcattgacgtgtacaacgcgattatcgggggcttcgtcacagagtccggggagaagattaaggggctgaatgagtacatcaatctgtacaatcagaagaccaagcagaaactgccgaaattcaagccgctctacaagcaagtcctgtccgatagggaaagcctctccttctacggcgagggctataccagcgacgaggaggtgctggaagtcttccgcaacacactgaataagaatagcgagattttctcctccatcaagaagctcgagaagctctttaagaactttgacgagtacagctccgccgggattttcgtgaagaacgggccggcgatcagcaccatctccaaggacatctttggcgagtggaacgtcatcagggacaagtggaacgccgagtacgacgacatccacctgaagaagaaggcggtggtgaccgagaagtatgaggacgatcgcaggaagtccttcaaaaaaatcggctccttcagcctcgaacagctccaggagtatgccgatgcggatctgtccgtcgtcgagaagctgaaggaaatcatcattcagaaggtcgacgagatctataaagtgtacgggtccagcgagaagctgttcgacgccgactttgtgctcgagaagtccctcaaaaagaatgacgccgtggtggccattatgaaagacctgctcgactccgtgaagtccttcgaaaattacattaaagcgttctttggggaggggaaggaaactaacagggatgagtccttctatggcgactttgtcctcgcgtacgacatcctgctgaaggtcgaccacatttacgacgcgatccgcaactacgtgacacagaagccgtactccaaagacaagttcaagctgtacttccagaacccgcaatttatggggggctgggacaaggataaagagacagactaccgcgcgacaattctccgctatggctccaaatactatctggccatcatggacaagaagtacgcgaagtgcctgcagaagatcgacaaagacgacgtcaatggcaactatgaaaagatcaactacaagctgctgccgggcccgaacaagatgctcccgaaggtgttcttcagcaagaagtggatggcctactacaatccaagcgaggatattcagaaaatctataaaaacgggaccttcaagaagggggacatgtttaacctcaacgactgccacaagctcattgatttcttcaaggatagcatttcccgctacccgaaatggtccaatgcgtacgattttaacttctccgagacagaaaagtacaaagacatcgcgggcttttacagggaggtggaggagcaagggtataaagtttcttttgaatccgcgagcaagaaggaagtcgacaagctcgtcgaggagggcaagctctacatgttccaaatttataacaaggacttttccgacaagagccatgggaccccaaacctccacaccatgtacttcaaactgctctttgacgagaacaaccacgggcaaatcaggctgagcggcggcgccgaattattcatgcgcagggcctccctcaagaaggaagagctggtcgtccatccagccaattccccgatcgcgaacaagaacccggacaatccgaaaaagaccaccaccctgtcctacgacgtctacaaggacaaacgcttcagcgaagaccagtacgaattacacatcccaattgcgattaataagtgcccaaagaatatcttcaaaattaatacagaggtcagggtgctgctcaaacacgacgacaatccgtatgtcatcggcattgacaggggcgagcgcaatctgctctatatcgtggtcgtggatgggaagggcaatattgtggagcagtactccctgaacgagattatcaacaacttcaatgggattaggattaagaccgactatcacagcctgctcgacaagaaagaaaaagagaggtttgaggcccgccaaaactggacctccattgagaatatcaaagaattaaaggccggctatatttcccaagtcgtccacaagatctgcgagctggtggagaaatatgacgccgtgattgcgctcgaagacttaaattctgggttcaagaactcccgcgtgaaggtggaaaaacaggtgtatcagaaattcgagaaaatgctgatcgacaaactcaattatatggtggataagaagtccaacccgtgtgccacagggggcgcgctgaagggctatcagatcaccaacaagttcgagagcttcaagagcatgagcacccagaacgggtttattttctacatcccggcgtggctcacctccaagattgacccgagcaccggcttcgtgaacctcctgaagacaaagtatacctccattgccgacagcaagaagtttatctcctccttcgaccgcattatgtatgtgccggaggaggacctcttcgagttcgccctcgactacaaaaacttcagccgcacagatgcggattacatcaagaagtggaagctgtactcctacgggaacaggatccgcatcttcaggaatccaaaaaaaaataacgtctttgactgggaggaagtgtgcctgacatccgcctacaaggaactgttcaataaatacggcatcaattaccagcagggcgacattcgcgccctcctctgtgagcagtccgacaaagcgttttactccagcttcatggccctcatgtccctgatgctccaaatgaggaatagcatcacagggcgcaccgacgtcgacttcctcatcagcccggtgaagaactccgacgggatcttttacgactcccgcaactatgaggcgcaagagaatgcgatcctcccgaagaacgccgatgcgaacggggcctataatatcgccaggaaagtgctctgggccatcgggcagttcaaaaaggcggaggatgagaagctcgacaaggtgaaaattgccatttccaacaaggagtggctggagtacgcgcagacctccgtgaagcacggctcctctggcagctccggctctagcggctcctctggcagctccggctccaagctggagaagtttacaaactgttacagcctctccaaaaccctcaggtttaaagcgatcccggtgggcaagacccaggagaacatcgacaacaagaggctcctggtggaagacgagaagcgcgccgaagactacaagggcgtgaagaagctgctcgataggtactacctcagctttattaacgacgtgctgcacagcatcaaactcaagaatctcaacaactacatctccctcttccgcaaaaagacctctggtggttcaagcggaggctcatctggcagcgaaactccgggcacttccgagtcagctactcctgagtctagcggcgggtcgtcaggagggtctgctcttgattttctttctaggcttccattgccacctccagtttctccaatttgtacttttgtgtcacctgctgcacaaaaggcattccagcctccaaggtcatgcggatctggcggctcaaaaagaaccgccgacggcagcgaattcgagcccaagaagaagaggaaagtcggaagcggagctactaacttcagcctgctgaagcaggctggagacgtggaggagaaccctggacctatggtgagcaagggcgaggagctgttcaccggggtggtgcccatcctggtcgagctggacggcgacgtaaacggccacaagttcagcgtgtccggcgagggcgagggcgatgccacctacggcaagctgaccctgaagttcatctgcaccaccggcaagctgcccgtgccctggcccaccctcgtgaccaccctgacctatggagtgcagtgcttcagccgctaccccgaccacatgaagcagcacgacttcttcaagtccgccatgcccgaaggctacgtccaggagcgcaccatcttcttcaaggacgacggcaactacaagacccgcgccgaggtgaagttcgagggcgacaccctggtgaaccgcatcgagctgaagggcatcgacttcaaggaggacggcaacatcctggggcacaagctggagtacaactacaacagccacaacgtctatatcatggccgacaagcagaagaacggcatcaaggtgaacttcaagatccgccacaacatcgaggacggcagcgtgcagctcgccgaccactaccagcagaacacccccatcggcgacggccccgtgctgctgcccgacaaccactacctgagcacccagtccgccctgagcaaagaccccaacgagaagcgcgatcacatggtcctgctggagttcgtgaccgccgccgggatcactctcggcatggacgagctgtacaagtctggtggttctcccaagaagaagaggaaagtctaaccggtcatcatcaccatcaccattgagtttaaacccgctgatcagcctcgactgtgccttctagttgccagccatctgttgtttgcccctcccccgtgccttccttgaccctggaaggtgccactcccactgtcctttcctaataaaatgaggaaattgcatcgcattgtctgagtaggtgtcattctattctggggggtggggtggggcaggacagcaagggggaggattgggaagacaatagcaggcatgctggggatgcggtgggctctatggcttctgaggcggaaagaaccagctggggctcgataccgtcgacctctagctagagcttggcgtaatcatggtcatagctgtttcctgtgtgaaattgttatccgctcacaattccacacaacatacgagccggaagcataaagtgtaaagcctagggtgcctaatgagtgagctaactcacattaattgcgttgcgctcactgcccgctttccagtcgggaaacctgtcgtgccagctgcattaatgaatcggccaacgcgcggggagaggcggtttgcgtattgggcgctcttccgcttcctcgctcactgactcgctgcgctcggtcgttcggctgcggcgagcggtatcagctcactcaaaggcggtaatacggttatccacagaatcaggggataacgcaggaaagaacatgtgagcaaaaggccagcaaaaggccaggaaccgtaaaaaggccgcgttgctggcgtttttccataggctccgcccccctgacgagcatcacaaaaatcgacgctcaagtcagaggtggcgaaacccgacaggactataaagataccaggcgtttccccctggaagctccctcgtgcgctctcctgttccgaccctgccgcttaccggatacctgtccgcctttctcccttcgggaagcgtggcgctttctcatagctcacgctgtaggtatctcagttcggtgtaggtcgttcgctccaagctgggctgtgtgcacgaaccccccgttcagcccgaccgctgcgccttatccggtaactatcgtcttgagtccaacccggtaagacacgacttatcgccactggcagcagccactggtaacaggattagcagagcgaggtatgtaggcggtgctacagagttcttgaagtggtggcctaactacggctacactagaagaacagtatttggtatctgcgctctgctgaagccagttaccttcggaaaaagagttggtagctcttgatccggcaaacaaaccaccgctggtagcggtggtttttttgtttgcaagcagcagattacgcgcagaaaaaaaggatctcaagaagatcctttgatcttttctacggggtctgacactcagtggaacgaaaactcacgttaagggattttggtcatgagattatcaaaaaggatcttcacctagatccttttaaattaaaaatgaagttttaaatcaatctaaagtatatatgagtaaacttggtctgacagttaccaatgcttaatcagtgaggcacctatctcagcgatctgtctatttcgttcatccatagttgcctgactccccgtcgtgtagataactacgatacgggagggcttaccatctggccccagtgctgcaatgataccgcgagacccacgctcaccggctccagatttatcagcaataaaccagccagccggaagggccgagcgcagaagtggtcctgcaactttatccgcctccatccagtctattaattgttgccgggaagctagagtaagtagttcgccagttaatagtttgcgcaacgttgttgccattgctacaggcatcgtggtgtcacgctcgtcgtttggtatggcttcattcagctccggttcccaacgatcaaggcgagttacatgatcccccatgttgtgcaaaaaagcggttagctccttcggtcctccgatcgttgtcagaagtaagttggccgcagtgttatcactcatggttatggcagcactgcataattctcttactgtcatgccatccgtaagatgcttttctgtgactggtgagtactcaaccaagtcattctgagaatagtgtatgcggcgaccgagttgctc

SEQ ID NO: 378 - DNA, 10416 bp, synthetic construct
  source 1..10416: mol_type = other DNA
ttgcccggcgtcaatacgggataataccgcgccacatagcagaactttaaaagtgctcatcattggaaaacgttcttcggggcgaaaactctcaaggatcttaccgctgttgagatccagttcgatgtaacccactcgtgcacccaactgatcttcagcatcttttactttcaccagcgtttctgggtgagcaaaaacaggaaggcaaaatgccgcaaaaaagggaataagggcgacacggaaatgttgaatactcatactcttcctttttcaatattattgaagcatttatcagggttattgtctcatgagcggatacatatttgaatgtatttagaaaaataaacaaataggggttccgcgcacatttccccgaaaagtgccacctgacgtcgacggatcgggagatcgatctcccgatcccctagggtcgactctcagtacaatctgctctgatgccgcatagttaagccagtatctgctccctgcttgtgtgttggaggtcgctgagtagtgcgcgagcaaaatttaagctacaacaaggcaaggcttgaccgacaattgcatgaagaatctgcttagggttaggcgttttgcgctgcttcgcgatgtacgggccagatatacgcgttgacattgattattgactagttattaatagtaatcaattacggggtcattagttcatagcccatatatggagttccgcgttacataacttacggtaaatggcccgcctggctgaccgcccaacgacccccgcccattgacgtcaataatgacgtatgttcccatagtaacgccaatagggactttccattgacgtcaatgggtggagtatttacggtaaactgcccacttggcagtacatcaagtgtatcatatgccaagtacgccccctattgacgtcaatgacggtaaatggcccgcctggcattatgcccagtacatgaccttatgggactttcctacttggcagtacatctacgtattagtcatcgctattaccatggtgatgcggttttggcagtacatcaatgggcgtggatagcggtttgactcacggggatttccaagtctccaccccattgacgtcaatgggagtttgttttggcaccaaaatcaacgggactttccaaaatgtcgtaacaactccgccccattgacgcaaatgggcggtaggcgtgtacggtgggaggtctatataagcagagctggtttagtgaaccgtcagatccgctagagatccgcggccgctaatacgactcactatagggagagccgccaccatgaaacggacagccgacggaagcgagttcgagtcaccaaagaagaagcggaaagtcacacttaatattgaggatgaacatagattgcacgagacctctaaggaacctgatgtttctcttggatcaacttggttgtcagatttcccacaagcatgggcagagaccggaggtatgggtcttgctgttaggcaggcaccacttattattcctttgaaggcaacctctactcctgtgtcaattaagcaatatccaatgtctcaggaagctaggcttggaattaagcctcacattcaaagacttttggatcagggtattttggtgccatgtcaatcaccttggaacacaccacttttgcctgttaagaagcctggaactaatgattacagaccagtgcaagatttgagggaggttaacaagagagtggaagatattcacccaactgttccaaacccttataatcttttgtctggattgccaccttcacatcaatggtacactgtgcttgatttgaaggatgcatttttctgccttaggttgcatccaacatctcagcctctttttgctttcgagtggagagatcctgaaatgggaatttctggtcaacttacatggaccaggttgcctcagggtttcaagaactcaccaaccttgtttaatgaggcacttcacagggatttggctgattttaggattcaacatcctgatcttatccttttgcagtatgttgatgatcttttgcttgctgcaacttctgaattggattgtcaacagggaactagggcattgcttcaaacacttggaaatttgggttacagagcttcagcaaagaaggctcagatttgccaaaagcaggttaagtatcttggatacttgcttaaggaaggacaaaggtggttgaccgaggctagaaaggaaactgtgatgggtcaaccaacacctaagacccctaggcagcttagagagttcttgggaaaggcaggtttttgtaggcttttcattccaggatttgctgaaatggctgcaccactttatcctttgaccaagcctggaactttgtttaactggggtccagatcaacagaaggcataccaagaaattaagcaggctttgcttactgctccagcacttggtttgcctgatcttacaaagccatttgagttgttcgttgatgaaaagcaaggatatgcaaagggtgtgcttacccagaagttgggaccttggagaaggcctgttgcttacctttctaagaaacttgatccagtggctgcaggttggccaccttgtcttagaatggttgctgcaattgcagtgcttacaaaggatgctggaaagttgactatgggacaacctcttgttattttggcaccacacgctgttgaggcacttgtgaagcagccacctgataggtggttgtcaaacgcaagaatgacccattatcaagctcttcttttggatactgatagggtgcagttcggtcctgttgtggctttgaatccagcaacacttttgccacttcctgaggaaggattgcaacacaactgccttgatattttggctgaggcacatggtacaagacctgatcttaccgatcagccattgcctgatgctgatcacacttggtacacagatggatcttcacttttgcaagaaggacagaggaaggctggtgctgcagttactacagagactgaagtgatttgggctaaggcacttccagctggaacatctgctcaaagagcagagcttattgctttgacccaggcacttaagatggctgaaggaaagaagttgaacgtttacactgattctaggtatgctttcgcaacagctcatattcacggagaaatctatagaaggagaggatggttgacatcagagggaaaggaaattaagaacaaggatgaaattcttgcacttttgaaggctctttttcttcctaagagattgtctattattcattgcccaggacaccaaaagggtcattcagcagaagctaggggaaatagaatggctgatcaggctgcaagaaaggctgcaattactgagacacctgatacctctactcttttgatcgaaaactcttcaccaaattcaaggcttattaactctggtggttcaagcggaggctcatctggcagcgaaactccgggcacttccgagtcagctactcctgagtctagcggcgggtcgtcaggagggtctggctataccagcgacgaggaggtgctggaagtcttccgcaacacactgaataagaatagcgagattttctcctccatcaagaagctcgagaagctctttaagaactttgacgagtacagctccgccgggattttcgtgaagaacgggccggcgatcagcaccatctccaaggacatctttggcgagtggaacgtcatcagggacaagtggaacgccgagtacgacgacatccacctgaagaagaaggcggtggtgaccgagaagtatgaggacgatcgcaggaagtccttcaaaaaaatcggctccttcagcctcgaacagctccaggagtatgccgatgcggatctgtccgtcgtcgagaagctgaaggaaatcatcattcagaaggtcgacgagatctataaagtgtacgggtccagcgagaagctgttcgacgccgactttgtgctcgagaagtccctcaaaaagaatgacgccgtggtggccattatgaaagacctgctcgactccgtgaagtccttcgaaaattacattaaagcgttctttggggaggggaaggaaactaacagggatgagtccttctatggcgactttgtcctcgcgtacgacatcctgctgaaggtcgaccacatttacgacgcgatccgcaactacgtgacacagaagccgtactccaaagacaagttcaagctgtacttccagaacccgcaatttatggggggctgggacaaggataaagagacagactaccgcgcgacaattctccgctatggctccaaatactatctggccatcatggacaagaagtacgcgaagtgcctgcagaagatcgacaaagacgacgtcaatggcaactatgaaaagatcaactacaagctgctgccgggcccgaacaagatgctcccgaaggtgttcttcagcaagaagtggatggcctactacaatccaagcgaggatattcagaaaatctataaaaacgggaccttcaagaagggggacatgtttaacctcaacgactgccacaagctcattgatttcttcaaggatagcatttcccgctacccgaaatggtccaatgcgtacgattttaacttctccgagacagaaaagtacaaagacatcgcgggcttttacagggaggtggaggagcaagggtataaagtttcttttgaatccgcgagcaagaaggaagtcgacaagctcgtcgaggagggcaagctctacatgttccaaatttataacaaggacttttccgacaagagccatgggaccccaaacctccacaccatgtacttcaaactgctctttgacgagaacaaccacgggcaaatcaggctgagcggcggcgccgaattattcatgcgcagggcctccctcaagaaggaagagctggtcgtccatccagccaattccccgatcgcgaacaagaacccggacaatccgaaaaagaccaccaccctgtcctacgacgtctacaaggacaaacgcttcagcgaagaccagtacgaattacacatcccaattgcgattaataagtgcccaaagaatatcttcaaaattaatacagaggtcagggtgctgctcaaacacgacgacaatccgtatgtcatcggcattgacaggggcgagcgcaatctgctctatatcgtggtcgtggatgggaagggcaatattgtggagcagtactccctgaacgagattatcaacaacttcaatgggattaggattaagaccgactatcacagcctgctcgacaagaaagaaaaagagaggtttgaggcccgccaaaactggacctccattgagaatatcaaagaattaaaggccggctatatttcccaagtcgtccacaagatctgcgagctggtggagaaatatgacgccgtgattgcgctcgaagacttaaattctgggttcaagaactcccgcgtgaaggtggaaaaacaggtgtatcagaaattcgagaaaatgctgatcgacaaactcaattatatggtggataagaagtccaacccgtgtgccacagggggcgcgctgaagggctatcagatcaccaacaagttcgagagcttcaagagcatgagcacccagaacgggtttattttctacatcccggcgtggctcacctccaagattgacccgagcaccggcttcgtgaacctcctgaagacaaagtatacctccattgccgacagcaagaagtttatctcctccttcgaccgcattatgtatgtgccggaggaggacctcttcgagttcgccctcgactacaaaaacttcagccgcacagatgcggattacatcaagaagtggaagctgtactcctacgggaacaggatccgcatcttcaggaatccaaaaaaaaataacgtctttgactgggaggaagtgtgcctgacatccgcctacaaggaactgttcaataaatacggcatcaattaccagcagggcgacattcgcgccctcctctgtgagcagtccgacaaagcgttttactccagcttcatggccctcatgtccctgatgctccaaatgaggaatagcatcacagggcgcaccgacgtcgacttcctcatcagcccggtgaagaactccgacgggatcttttacgactcccgcaactatgaggcgcaagagaatgcgatcctcccgaagaacgccgatgcgaacggggcctataatatcgccaggaaagtgctctgggccatcgggcagttcaaaaaggcggaggatgagaagctcgacaaggtgaaaattgccatttccaacaaggagtggctggagtacgcgcagacctccgtgaagcacggctcctctggcagctccggctctagcggctcctctggcagctccggctccaagctggagaagtttacaaactgttacagcctctccaaaaccctcaggtttaaagcgatcccggtgggcaagacccaggagaacatcgacaacaagaggctcctggtggaagacgagaagcgcgccgaagactacaagggcgtgaagaagctgctcgataggtactacctcagctttattaacgacgtgctgcacagcatcaaactcaagaatctcaacaactacatctccctcttccgcaaaaagacccgcaccgagaaggagaacaaggagctggagaacctggagatcaacctccgcaaggaaatcgccaaagcgttcaagggcaatgaagggtacaagagcctcttcaagaaagacatcatcgaaactatcctcccagagtttctcgatgacaaggacgagatcgcgctggtgaactcctttaacgggttcacaaccgcgtttaccggcttctttgataacagggaaaatatgttctccgaggaggccaagtccaccagcatcgccttcaggtgtatcaacgagaacctcacccgctacatttccaatatggacattttcgagaaggtggatgcgatcttcgataagcacgaggtgcaggagatcaaagagaagattctcaattccgattatgacgtcgaggatttcttcgaaggggagttctttaattttgtgctcacacaagagggcattgacgtgtacaacgcgattatcgggggcttcgtcacagagtccggggagaagattaaggggctgaatgagtacatcaatctgtacaatcagaagaccaagcagaaactgccgaaattcaagccgctctacaagcaagtcctgtccgatagggaaagcctctccttctacggcgagtctggtggttcaagcggaggctcatctggcagcgaaactccgggcacttccgagtcagctactcctgagtctagcggcgggtcgtcaggagggtctgctcttgattttctttctaggcttccattgccacctccagtttctccaatttgtacttttgtgtcacctgctgcacaaaaggcattccagcctccaaggtcatgcggatctggcggctcaaaaagaaccgccgacggcagcgaattcgagcccaagaagaagaggaaagtcggaagcggagctactaacttcagcctgctgaagcaggctggagacgtggaggagaaccctggacctatggtgagcaagggcgaggagctgttcaccggggtggtgcccatcctggtcgagctggacggcgacgtaaacggccacaagttcagcgtgtccggcgagggcgagggcgatgccacctacggcaagctgaccctgaagttcatctgcaccaccggcaagctgcccgtgccctggcccaccctcgtgaccaccctgacctatggagtgcagtgcttcagccgctaccccgaccacatgaagcagcacgacttcttcaagtccgccatgcccgaaggctacgtccaggagcgcaccatcttcttcaaggacgacggcaactacaagacccgcgccgaggtgaagttcgagggcgacaccctggtgaaccgcatcgagctgaagggcatcgacttcaaggaggacggcaacatcctggggcacaagctggagtacaactacaacagccacaacgtctatatcatggccgacaagcagaagaacggcatcaaggtgaacttcaagatccgccacaacatcgaggacggcagcgtgcagctcgccgaccactaccagcagaacacccccatcggcgacggccccgtgctgctgcccgacaaccactacctgagcacccagtccgccctgagcaaagaccccaacgagaagcgcgatcacatggtcctgctggagttcgtgaccgccgccgggatcactctcggcatggacgagctgtacaagtctggtggttctcccaagaagaagaggaaagtctaaccggtcatcatcaccatcaccattgagtttaaacccgctgatcagcctcgactgtgccttctagttgccagccatctgttgtttgcccctcccccgtgccttccttgaccctggaaggtgccactcccactgtcctttcctaataaaatgaggaaattgcatcgcattgtctgagtaggtgtcattctattctggggggtggggtggggcaggacagcaagggggaggattgggaagacaatagcaggcatgctggggatgcggtgggctctatggcttctgaggcggaaagaaccagctggggctcgataccgtcgacctctagctagagcttggcgtaatcatggtcatagctgtttcctgtgtgaaattgttatccgctcacaattccacacaacatacgagccggaagcataaagtgtaaagcctagggtgcctaatgagtgagctaactcacattaattgcgttgcgctcactgcccgctttccagtcgggaaacctgtcgtgccagctgcattaatgaatcggccaacgcgcggggagaggcggtttgcgtattgggcgctcttccgcttcctcgctcactgactcgctgcgctcggtcgttcggctgcggcgagcggtatcagctcactcaaaggcggtaatacggttatccacagaatcaggggataacgcaggaaagaacatgtgagcaaaaggccagcaaaaggccaggaaccgtaaaaaggccgcgttgctggcgtttttccataggctccgcccccctgacgagcatcacaaaaatcgacgctcaagtcagaggtggcgaaacccgacaggactataaagataccaggcgtttccccctggaagctccctcgtgcgctctcctgttccgaccctgccgcttaccggatacctgtccgcctttctcccttcgggaagcgtggcgctttctcatagctcacgctgtaggtatctcagttcggtgtaggtcgttcgctccaagctgggctgtgtgcacgaaccccccgttcagcccgaccgctgcgccttatccggtaactatcgtcttgagtccaacccggtaagacacgacttatcgccactggcagcagccactggtaacaggattagcagagcgaggtatgtaggcggtgctacagagttcttgaagtggtggcctaactacggctacactagaagaacagtatttggtatctgcgctctgctgaagccagttaccttcggaaaaagagttggtagctcttgatccggcaaacaaaccaccgctggtagcggtggtttttttgtttgcaagcagcagattacgcgcagaaaaaaaggatctcaagaagatcctttgatcttttctacggggtctgacactcagtggaacgaaaactcacgttaagggattttggtcatgagattatcaaaaaggatcttcacctagatccttttaaattaaaaatgaagttttaaatcaatctaaagtatatatgagtaaacttggtctgacagttaccaatgcttaatcagtgaggcacctatctcagcgatctgtctatttcgttcatccatagttgcctgactccccgtcgtgtagataactacgatacgggagggcttaccatctggccccagtgctgcaatgataccgcgagacccacgctcaccggctccagatttatcagcaataaaccagccagccggaagggccgagcgcagaagtggtcctgcaactttatccgcctccatccagtctattaattgttgccgggaagctagagtaagtagttcgccagttaatagtttgcgcaacgttgttgccattgctacaggcatcgtggtgtcacgctcgtcgtttggtatggcttcattcagctccggttcccaacgatcaaggcgagttacatgatcccccatgttgtgcaaaaaagcggttagctccttcggtcctccgatcgttgtcagaagtaagttggccgcagtgttatcactcatggttatggcagcactgcataattctcttactgtcatgccatccgtaagatgcttttctgtgactggtgagtactcaaccaagtcattctgagaatagtgtatgcggcgaccgagttgctc

SEQ ID NO: 379 - DNA, 10416 bp, synthetic construct
  source 1..10416: mol_type = other DNA
ttgcccggcgtcaatacgggataataccgcgccacatagcagaactttaaaagtgctcatcattggaaaacgttcttcggggcgaaaactctcaaggatcttaccgctgttgagatccagttcgatgtaacccactcgtgcacccaactgatcttcagcatcttttactttcaccagcgtttctgggtgagcaaaaacaggaaggcaaaatgccgcaaaaaagggaataagggcgacacggaaatgttgaatactcatactcttcctttttcaatattattgaagcatttatcagggttattgtctcatgagcggatacatatttgaatgtatttagaaaaataaacaaataggggttccgcgcacatttccccgaaaagtgccacctgacgtcgacggatcgggagatcgatctcccgatcccctagggtcgactctcagtacaatctgctctgatgccgcatagttaagccagtatctgctccctgcttgtgtgttggaggtcgctgagtagtgcgcgagcaaaatttaagctacaacaaggcaaggcttgaccgacaattgcatgaagaatctgcttagggttaggcgttttgcgctgcttcgcgatgtacgggccagatatacgcgttgacattgattattgactagttattaatagtaatcaattacggggtcattagttcatagcccatatatggagttccgcgttacataacttacggtaaatggcccgcctggctgaccgcccaacgacccccgcccattgacgtcaataatgacgtatgttcccatagtaacgccaatagggactttccattgacgtcaatgggtggagtatttacggtaaactgcccacttggcagtacatcaagtgtatcatatgccaagtacgccccctattgacgtcaatgacggtaaatggcccgcctggcattatgcccagtacatgaccttatgggactttcctacttggcagtacatctacgtattagtcatcgctattaccatggtgatgcggttttggcagtacatcaatgggcgtggatagcggtttgactcacggggatttccaagtctccaccccattgacgtcaatgggagtttgttttggcaccaaaatcaacgggactttccaaaatgtcgtaacaactccgccccattgacgcaaatgggcggtaggcgtgtacggtgggaggtctatataagcagagctggtttagtgaaccgtcagatccgctagagatccgcggccgctaatacgactcactatagggagagccgccaccatgaaacggacagccgacggaagcgagttcgagtcaccaaagaagaagcggaaagtcacacttaatattgaggatgaacatagattgcacgagacctctaaggaacctgatgtttctcttggatcaacttggttgtcagatttcccacaagcatgggcagagaccggaggtatgggtcttgctgttaggcaggcaccacttattattcctttgaaggcaacctctactcctgtgtcaattaagcaatatccaatgtctcaggaagctaggcttggaattaagcctcacattcaaagacttttggatcagggtattttggtgccatgtcaatcaccttggaacacaccacttttgcctgttaagaagcctggaactaatgattacagaccagtgcaagatttgagggaggttaacaagagagtggaagatattcacccaactgttccaaacccttataatcttttgtctggattgccaccttcacatcaatggtacactgtgcttgatttgaaggatgcatttttctgccttaggttgcatccaacatctcagcctctttttgctttcgagtggagagatcctgaaatgggaatttctggtcaacttacatggaccaggttgcctcagggtttcaagaactcaccaaccttgtttaatgaggcacttcacagggatttggctgattttaggattcaacatcctgatcttatccttttgcagtatgttgatgatcttttgcttgctgcaacttctgaattggattgtcaacagggaactagggcattgcttcaaacacttggaaatttgggttacagagcttcagcaaagaaggctcagatttgccaaaagcaggttaagtatcttggatacttgcttaaggaaggacaaaggtggttgaccgaggctagaaaggaaactgtgatgggtcaaccaacacctaagacccctaggcagcttagagagttcttgggaaaggcaggtttttgtaggcttttcattccaggatttgctgaaatggctgcaccactttatcctttgaccaagcctggaactttgtttaactggggtccagatcaacagaaggcataccaagaaattaagcaggctttgcttactgctccagcacttggtttgcctgatcttacaaagccatttgagttgttcgttgatgaaaagcaaggatatgcaaagggtgtgcttacccagaagttgggaccttggagaaggcctgttgcttacctttctaagaaacttgatccagtggctgcaggttggccaccttgtcttagaatggttgctgcaattgcagtgcttacaaaggatgctggaaagttgactatgggacaacctcttgttattttggcaccacacgctgttgaggcacttgtgaagcagccacctgataggtggttgtcaaacgcaagaatgacccattatcaagctcttcttttggatactgatagggtgcagttcggtcctgttgtggctttgaatccagcaacacttttgccacttcctgaggaaggattgcaacacaactgccttgatattttggctgaggcacatggtacaagacctgatcttaccgatcagccattgcctgatgctgatcacacttggtacacagatggatcttcacttttgcaagaaggacagaggaaggctggtgctgcagttactacagagactgaagtgatttgggctaaggcacttccagctggaacatctgctcaaagagcagagcttattgctttgacccaggcacttaagatggctgaaggaaagaagttgaacgtttacactgattctaggtatgctttcgcaacagctcatattcacggagaaatctatagaaggagaggatggttgacatcagagggaaaggaaattaagaacaaggatgaaattcttgcacttttgaaggctctttttcttcctaagagattgtctattattcattgcccaggacaccaaaagggtcattcagcagaagctaggggaaatagaatggctgatcaggctgcaagaaaggctgcaattactgagacacctgatacctctactcttttgatcgaaaactcttcaccaaattcaaggcttattaactctggtggttcaagcggaggctcatctggcagcgaaactccgggcacttccgagtcagctactcctgagtctagcggcgggtcgtcaggagggtcttccgacgggatcttttacgactcccgcaactatgaggcgcaagagaatgcgatcctcccgaagaacgccgatgcgaacggggcctataatatcgccaggaaagtgctctgggccatcgggcagttcaaaaaggcggaggatgagaagctcgacaaggtgaaaattgccatttccaacaaggagtggctggagtacgcgcagacctccgtgaagcacggctcctctggcagctccggctctagcggctcctctggcagctccggctccaagctggagaagtttacaaactgttacagcctctccaaaaccctcaggtttaaagcgatcccggtgggcaagacccaggagaacatcgacaacaagaggctcctggtggaagacgagaagcgcgccgaagactacaagggcgtgaagaagctgctcgataggtactacctcagctttattaacgacgtgctgcacagcatcaaactcaagaatctcaacaactacatctccctcttccgcaaaaagacccgcaccgagaaggagaacaaggagctggagaacctggagatcaacctccgcaaggaaatcgccaaagcgttcaagggcaatgaagggtacaagagcctcttcaagaaagacatcatcgaaactatcctcccagagtttctcgatgacaaggacgagatcgcgctggtgaactcctttaacgggttcacaaccgcgtttaccggcttctttgataacagggaaaatatgttctccgaggaggccaagtccaccagcatcgccttcaggtgtatcaacgagaacctcacccgctacatttccaatatggacattttcgagaaggtggatgcgatcttcgataagcacgaggtgcaggagatcaaagagaagattctcaattccgattatgacgtcgaggatttcttcgaaggggagttctttaattttgtgctcacacaagagggcattgacgtgtacaacgcgattatcgggggcttcgtcacagagtccggggagaagattaaggggctgaatgagtacatcaatctgtacaatcagaagaccaagcagaaactgccgaaattcaagccgctctacaagcaagtcctgtccgatagggaaagcctctccttctacggcgagggctataccagcgacgaggaggtgctggaagtcttccgcaacacactgaataagaatagcgagattttctcctccatcaagaagctcgagaagctctttaagaactttgacgagtacagctccgccgggattttcgtgaagaacgggccggcgatcagcaccatctccaaggacatctttggcgagtggaacgtcatcagggacaagtggaacgccgagtacgacgacatccacctgaagaagaaggcggtggtgaccgagaagtatgaggacgatcgcaggaagtccttcaaaaaaatcggctccttcagcctcgaacagctccaggagtatgccgatgcggatctgtccgtcgtcgagaagctgaaggaaatcatcattcagaaggtcgacgagatctataaagtgtacgggtccagcgagaagctgttcgacgccgactttgtgctcgagaagtccctcaaaaagaatgacgccgtggtggccattatgaaagacctgctcgactccgtgaagtccttcgaaaattacattaaagcgttctttggggaggggaaggaaactaacagggatgagtccttctatggcgactttgtcctcgcgtacgacatcctgctgaaggtcgaccacatttacgacgcgatccgcaactacgtgacacagaagccgtactccaaagacaagttcaagctgtacttccagaacccgcaatttatggggggctgggacaaggataaagagacagactaccgcgcgacaattctccgctatggctccaaatactatctggccatcatggacaagaagtacgcgaagtgcctgcagaagatcgacaaagacgacgtcaatggcaactatgaaaagatcaactacaagctgctgccgggcccgaacaagatgctcccgaaggtgttcttcagcaagaagtggatggcctactacaatccaagcgaggatattcagaaaatctataaaaacgggaccttcaagaagggggacatgtttaacctcaacgactgccacaagctcattgatttcttcaaggatagcatttcccgctacccgaaatggtccaatgcgtacgattttaacttctccgagacagaaaagtacaaagacatcgcgggcttttacagggaggtggaggagcaagggtataaagtttcttttgaatccgcgagcaagaaggaagtcgacaagctcgtcgaggagggcaagctctacatgttccaaatttataacaaggacttttccgacaagagccatgggaccccaaacctccacaccatgtacttcaaactgctctttgacgagaacaaccacgggcaaatcaggctgagcggcggcgccgaattattcatgcgcagggcctccctcaagaaggaagagctggtcgtccatccagccaattccccgatcgcgaacaagaacccggacaatccgaaaaagaccaccaccctgtcctacgacgtctacaaggacaaacgcttcagcgaagaccagtacgaattacacatcccaattgcgattaataagtgcccaaagaatatcttcaaaattaatacagaggtcagggtgctgctcaaacacgacgacaatccgtatgtcatcggcattgacaggggcgagcgcaatctgctctatatcgtggtcgtggatgggaagggcaatattgtggagcagtactccctgaacgagattatcaacaacttcaatgggattaggattaagaccgactatcacagcctgctcgacaagaaagaaaaagagaggtttgaggcccgccaaaactggacctccattgagaatatcaaagaattaaaggccggctatatttcccaagtcgtccacaagatctgcgagctggtggagaaatatgacgccgtgattgcgctcgaagacttaaattctgggttcaagaactcccgcgtgaaggtggaaaaacaggtgtatcagaaattcgagaaaatgctgatcgacaaactcaattatatggtggataagaagtccaacccgtgtgccacagggggcgcgctgaagggctatcagatcaccaacaagttcgagagcttcaagagcatgagcacccagaacgggtttattttctacatcccggcgtggctcacctccaagattgacccgagcaccggcttcgtgaacctcctgaagacaaagtatacctccattgccgacagcaagaagtttatctcctccttcgaccgcattatgtatgtgccggaggaggacctcttcgagttcgccctcgactacaaaaacttcagccgcacagatgcggattacatcaagaagtggaagctgtactcctacgggaacaggatccgcatcttcaggaatccaaaaaaaaataacgtctttgactgggaggaagtgtgcctgacatccgcctacaaggaactgttcaataaatacggcatcaattaccagcagggcgacattcgcgccctcctctgtgagcagtccgacaaagcgttttactccagcttcatggccctcatgtccctgatgctccaaatgaggaatagcatcacagggcgcaccgacgtcgacttcctcatcagcccggtgaagaactctggtggttcaagcggaggctcatctggcagcgaaactccgggcacttccgagtcagctactcctgagtctagcggcgggtcgtcaggagggtctgctcttgattttctttctaggcttccattgccacctccagtttctccaatttgtacttttgtgtcacctgctgcacaaaaggcattccagcctccaaggtcatgcggatctggcggctcaaaaagaaccgccgacggcagcgaattcgagcccaagaagaagaggaaagtcggaagcggagctactaacttcagcctgctgaagcaggctggagacgtggaggagaaccctggacctatggtgagcaagggcgaggagctgttcaccggggtggtgcccatcctggtcgagctggacggcgacgtaaacggccacaagttcagcgtgtccggcgagggcgagggcgatgccacctacggcaagctgaccctgaagttcatctgcaccaccggcaagctgcccgtgccctggcccaccctcgtgaccaccctgacctatggagtgcagtgcttcagccgctaccccgaccacatgaagcagcacgacttcttcaagtccgccatgcccgaaggctacgtccaggagcgcaccatcttcttcaaggacgacggcaactacaagacccgcgccgaggtgaagttcgagggcgacaccctggtgaaccgcatcgagctgaagggcatcgacttcaaggaggacggcaacatcctggggcacaagctggagtacaactacaacagccacaacgtctatatcatggccgacaagcagaagaacggcatcaaggtgaacttcaagatccgccacaacatcgaggacggcagcgtgcagctcgccgaccactaccagcagaacacccccatcggcgacggccccgtgctgctgcccgacaaccactacctgagcacccagtccgccctgagcaaagaccccaacgagaagcgcgatcacatggtcctgctggagttcgtgaccgccgccgggatcactctcggcatggacgagctgtacaagtctggtggttctcccaagaagaagaggaaagtctaaccggtcatcatcaccatcaccattgagtttaaacccgctgatcagcctcgactgtgccttctagttgccagccatctgttgtttgcccctcccccgtgccttccttgaccctggaaggtgccactcccactgtcctttcctaataaaatgaggaaattgcatcgcattgtctgagtaggtgtcattctattctggggggtggggtggggcaggacagcaagggggaggattgggaagacaatagcaggcatgctggggatgcggtgggctctatggcttctgaggcggaaagaaccagctggggctcgataccgtcgacctctagctagagcttggcgtaatcatggtcatagctgtttcctgtgtgaaattgttatccgctcacaattccacacaacatacgagccggaagcataaagtgtaaagcctagggtgcctaatgagtgagctaactcacattaattgcgttgcgctcactgcccgctttccagtcgggaaacctgtcgtgccagctgcattaatgaatcggccaacgcgcggggagaggcggtttgcgtattgggcgctcttccgcttcctcgctcactgactcgctgcgctcggtcgttcggctgcggcgagcggtatcagctcactcaaaggcggtaatacggttatccacagaatcaggggataacgcaggaaagaacatgtgagcaaaaggccagcaaaaggccaggaaccgtaaaaaggccgcgttgctggcgtttttccataggctccgcccccctgacgagcatcacaaaaatcgacgctcaagtcagaggtggcgaaacccgacaggactataaagataccaggcgtttccccctggaagctccctcgtgcgctctcctgttccgaccctgccgcttaccggatacctgtccgcctttctcccttcgggaagcgtggcgctttctcatagctcacgctgtaggtatctcagttcggtgtaggtcgttcgctccaagctgggctgtgtgcacgaaccccccgttcagcccgaccgctgcgccttatccggtaactatcgtcttgagtccaacccggtaagacacgacttatcgccactggcagcagccactggtaacaggattagcagagcgaggtatgtaggcggtgctacagagttcttgaagtggtggcctaactacggctacactagaagaacagtatttggtatctgcgctctgctgaagccagttaccttcggaaaaagagttggtagctcttgatccggcaaacaaaccaccgctggtagcggtggtttttttgtttgcaagcagcagattacgcgcagaaaaaaaggatctcaagaagatcctttgatcttttctacggggtctgacactcagtggaacgaaaactcacgttaagggattttggtcatgagattatcaaaaaggatcttcacctagatccttttaaattaaaaatgaagttttaaatcaatctaaagtatatatgagtaaacttggtctgacagttaccaatgcttaatcagtgaggcacctatctcagcgatctgtctatttcgttcatccatagttgcctgactccccgtcgtgtagataactacgatacgggagggcttaccatctggccccagtgctgcaatgataccgcgagacccacgctcaccggctccagatttatcagcaataaaccagccagccggaagggccgagcgcagaagtggtcctgcaactttatccgcctccatccagtctattaattgttgccgggaagctagagtaagtagttcgccagttaatagtttgcgcaacgttgttgccattgctacaggcatcgtggtgtcacgctcgtcgtttggtatggcttcattcagctccggttcccaacgatcaaggcgagttacatgatcccccatgttgtgcaaaaaagcggttagctccttcggtcctccgatcgttgtcagaagtaagttggccgcagtgttatcactcatggttatggcagcactgcataattctcttactgtcatgccatccgtaagatgcttttctgtgactggtgagtactcaaccaagtcattctgagaatagtgtatgcggcgaccgagttgctc

SEQ ID NO: 380 - DNA, 10416 bp, synthetic construct
  source 1..10416: mol_type = other DNA
ttgcccggcgtcaatacgggataataccgcgccacatagcagaactttaaaagtgctcatcattggaaaacgttcttcggggcgaaaactctcaaggatcttaccgctgttgagatccagttcgatgtaacccactcgtgcacccaactgatcttcagcatcttttactttcaccagcgtttctgggtgagcaaaaacaggaaggcaaaatgccgcaaaaaagggaataagggcgacacggaaatgttgaatactcatactcttcctttttcaatattattgaagcatttatcagggttattgtctcatgagcggatacatatttgaatgtatttagaaaaataaacaaataggggttccgcgcacatttccccgaaaagtgccacctgacgtcgacggatcgggagatcgatctcccgatcccctagggtcgactctcagtacaatctgctctgatgccgcatagttaagccagtatctgctccctgcttgtgtgttggaggtcgctgagtagtgcgcgagcaaaatttaagctacaacaaggcaaggcttgaccgacaattgcatgaagaatctgcttagggttaggcgttttgcgctgcttcgcgatgtacgggccagatatacgcgttgacattgattattgactagttattaatagtaatcaattacggggtcattagttcatagcccatatatggagttccgcgttacataacttacggtaaatggcccgcctggctgaccgcccaacgacccccgcccattgacgtcaataatgacgtatgttcccatagtaacgccaatagggactttccattgacgtcaatgggtggagtatttacggtaaactgcccacttggcagtacatcaagtgtatcatatgccaagtacgccccctattgacgtcaatgacggtaaatggcccgcctggcattatgcccagtacatgaccttatgggactttcctacttggcagtacatctacgtattagtcatcgctattaccatggtgatgcggttttggcagtacatcaatgggcgtggatagcggtttgactcacggggatttccaagtctccaccccattgacgtcaatgggagtttgttttggcaccaaaatcaacgggactttccaaaatgtcgtaacaactccgccccattgacgcaaatgggcggtaggcgtgtacggtgggaggtctatataagcagagctggtttagtgaaccgtcagatccgctagagatccgcggccgctaatacgactcactatagggagagccgccaccatgaaacggacagccgacggaagcgagttcgagtcaccaaagaagaagcggaaagtcacacttaatattgaggatgaacatagattgcacgagacctctaaggaacctgatgtttctcttggatcaacttggttgtcagatttcccacaagcatgggcagagaccggaggtatgggtcttgctgttaggcaggcaccacttattattcctttgaaggcaacctctactcctgtgtcaattaagcaatatccaatgtctcaggaagctaggcttggaattaagcctcacattcaaagacttttggatcagggtattttggtgccatgtcaatcaccttggaacacaccacttttgcctgttaagaagcctggaactaatgattacagaccagtgcaagatttgagggaggttaacaagagagtggaagatattcacccaactgttccaaacccttataatcttttgtctggattgccaccttcacatcaatggtacactgtgcttgatttgaaggatgcatttttctgccttaggttgcatccaacatctcagcctctttttgctttcgagtggagagatcctgaaatgggaatttctggtcaacttacatggaccaggttgcctcagggtttcaagaactcaccaaccttgtttaatgaggcacttcacagggatttggctgattttaggattcaacatcctgatcttatccttttgcagtatgttgatgatcttttgcttgctgcaacttctgaattggattgtcaacagggaactagggcattgcttcaaacacttggaaatttgggttacagagcttcagcaaagaaggctcagatttgccaaaagcaggttaagtatcttggatacttgcttaaggaaggacaaaggtggttgaccgaggctagaaaggaaactgtgatgggtcaaccaacacctaagacccctaggcagcttagagagttcttgggaaaggcaggtttttgtaggcttttcattccaggatttgctgaaatggctgcaccactttatcctttgaccaagcctggaactttgtttaactggggtccagatcaacagaaggcataccaagaaattaagcaggctttgcttactgctccagcacttggtttgcctgatcttacaaagccatttgagttgttcgttgatgaaaagcaaggatatgcaaagggtgtgcttacccagaagttgggaccttggagaaggcctgttgcttacctttctaagaaacttgatccagtggctgcaggttggccaccttgtcttagaatggttgctgcaattgcagtgcttacaaaggatgctggaaagttgactatgggacaacctcttgttattttggcaccacacgctgttgaggcacttgtgaagcagccacctgataggtggttgtcaaacgcaagaatgacccattatcaagctcttcttttggatactgatagggtgcagttcggtcctgttgtggctttgaatccagcaacacttttgccacttcctgaggaaggattgcaacacaactgccttgatattttggctgaggcacatggtacaagacctgatcttaccgatcagccattgcctgatgctgatcacacttggtacacagatggatcttcacttttgcaagaaggacagaggaaggctggtgctgcagttactacagagactgaagtgatttgggctaaggcacttccagctggaacatctgctcaaagagcagagcttattgctttgacccaggcacttaagatggctgaaggaaagaagttgaacgtttacactgattctaggtatgctttcgcaacagctcatattcacggagaaatctatagaaggagaggatggttgacatcagagggaaaggaaattaagaacaaggatgaaattcttgcacttttgaaggctctttttcttcctaagagattgtctattattcattgcccaggacaccaaaagggtcattcagcagaagctaggggaaatagaatggctgatcaggctgcaagaaaggctgcaattactgagacacctgatacctctactcttttgatcgaaaactcttcaccaaattcaaggcttattaactctggtggttcaagcggaggctcatctggcagcgaaactccgggcacttccgagtcagctactcctgagtctagcggcgggtcgtcaggagggtctaaagacaagttcaagctgtacttccagaacccgcaatttatggggggctgggacaaggataaagagacagactaccgcgcgacaattctccgctatggctccaaatactatctggccatcatggacaagaagtacgcgaagtgcctgcagaagatcgacaaagacgacgtcaatggcaactatgaaaagatcaactacaagctgctgccgggcccgaacaagatgctcccgaaggtgttcttcagcaagaagtggatggcctactacaatccaagcgaggatattcagaaaatctataaaaacgggaccttcaagaagggggacatgtttaacctcaacgactgccacaagctcattgatttcttcaaggatagcatttcccgctacccgaaatggtccaatgcgtacgattttaacttctccgagacagaaaagtacaaagacatcgcgggcttttacagggaggtggaggagcaagggtataaagtttcttttgaatccgcgagcaagaaggaagtcgacaagctcgtcgaggagggcaagctctacatgttccaaatttataacaaggacttttccgacaagagccatgggaccccaaacctccacaccatgtacttcaaactgctctttgacgagaacaaccacgggcaaatcaggctgagcggcggcgccgaattattcatgcgcagggcctccctcaagaaggaagagctggtcgtccatccagccaattccccgatcgcgaacaagaacccggacaatccgaaaaagaccaccaccctgtcctacgacgtctacaaggacaaacgcttcagcgaagaccagtacgaattacacatcccaattgcgattaataagtgcccaaagaatatcttcaaaattaatacagaggtcagggtgctgctcaaacacgacgacaatccgtatgtcatcggcattgacaggggcgagcgcaatctgctctatatcgtggtcgtggatgggaagggcaatattgtggagcagtactccctgaacgagattatcaacaacttcaatgggattaggattaagaccgactatcacagcctgctcgacaagaaagaaaaagagaggtttgaggcccgccaaaactggacctccattgagaatatcaaagaattaaaggccggctatatttcccaagtcgtccacaagatctgcgagctggtggagaaatatgacgccgtgattgcgctcgaagacttaaattctgggttcaagaactcccgcgtgaaggtggaaaaacaggtgtatcagaaattcgagaaaatgctgatcgacaaactcaattatatggtggataagaagtccaacccgtgtgccacagggggcgcgctgaagggctatcagatcaccaacaagttcgagagcttcaagagcatgagcacccagaacgggtttattttctacatcccggcgtggctcacctccaagattgacccgagcaccggcttcgtgaacctcctgaagacaaagtatacctccattgccgacagcaagaagtttatctcctccttcgaccgcattatgtatgtgccggaggaggacctcttcgagttcgccctcgactacaaaaacttcagccgcacagatgcggattacatcaagaagtggaagctgtactcctacgggaacaggatccgcatcttcaggaatccaaaaaaaaataacgtctttgactgggaggaagtgtgcctgacatccgcctacaaggaactgttcaataaatacggcatcaattaccagcagggcgacattcgcgccctcctctgtgagcagtccgacaaagcgttttactccagcttcatggccctcatgtccctgatgctccaaatgaggaatagcatcacagggcgcaccgacgtcgacttcctcatcagcccggtgaagaactccgacgggatcttttacgactcccgcaactatgaggcgcaagagaatgcgatcctcccgaagaacgccgatgcgaacggggcctataatatcgccaggaaagtgctctgggccatcgggcagttcaaaaaggcggaggatgagaagctcgacaaggtgaaaattgccatttccaacaaggagtggctggagtacgcgcagacctccgtgaagcacggctcctctggcagctccggctctagcggctcctctggcagctccggctccaagctggagaagtttacaaactgttacagcctctccaaaaccctcaggtttaaagcgatcccggtgggcaagacccaggagaacatcgacaacaagaggctcctggtggaagacgagaagcgcgccgaagactacaagggcgtgaagaagctgctcgataggtactacctcagctttattaacgacgtgctgcacagcatcaaactcaagaatctcaacaactacatctccctcttccgcaaaaagacccgcaccgagaaggagaacaaggagctggagaacctggagatcaacctccgcaaggaaatcgccaaagcgttcaagggcaatgaagggtacaagagcctcttcaagaaagacatcatcgaaactatcctcccagagtttctcgatgacaaggacgagatcgcgctggtgaactcctttaacgggttcacaaccgcgtttaccggcttctttgataacagggaaaatatgttctccgaggaggccaagtccaccagcatcgccttcaggtgtatcaacgagaacctcacccgctacatttccaatatggacattttcgagaaggtggatgcgatcttcgataagcacgaggtgcaggagatcaaagagaagattctcaattccgattatgacgtcgaggatttcttcgaaggggagttctttaattttgtgctcacacaagagggcattgacgtgtacaacgcgattatcgggggcttcgtcacagagtccggggagaagattaaggggctgaatgagtacatcaatctgtacaatcagaagaccaagcagaaactgccgaaattcaagccgctctacaagcaagtcctgtccgatagggaaagcctctccttctacggcgagggctataccagcgacgaggaggtgctggaagtcttccgcaacacactgaataagaatagcgagattttctcctccatcaagaagctcgagaagctctttaagaactttgacgagtacagctccgccgggattttcgtgaagaacgggccggcgatcagcaccatctccaaggacatctttggcgagtggaacgtcatcagggacaagtggaacgccgagtacgacgacatccacctgaagaagaaggcggtggtgaccgagaagtatgaggacgatcgcaggaagtccttcaaaaaaatcggctccttcagcctcgaacagctccaggagtatgccgatgcggatctgtccgtcgtcgagaagctgaaggaaatcatcattcagaaggtcgacgagatctataaagtgtacgggtccagcgagaagctgttcgacgccgactttgtgctcgagaagtccctcaaaaagaatgacgccgtggtggccattatgaaagacctgctcgactccgtgaagtccttcgaaaattacattaaagcgttctttggggaggggaaggaaactaacagggatgagtccttctatggcgactttgtcctcgcgtacgacatcctgctgaaggtcgaccacatttacgacgcgatccgcaactacgtgacacagaagccgtactcctctggtggttcaagcggaggctcatctggcagcgaaactccgggcacttccgagtcagctactcctgagtctagcggcgggtcgtcaggagggtctgctcttgattttctttctaggcttccattgccacctccagtttctccaatttgtacttttgtgtcacctgctgcacaaaaggcattccagcctccaaggtcatgcggatctggcggctcaaaaagaaccgccgacggcagcgaattcgagcccaagaagaagaggaaagtcggaagcggagctactaacttcagcctgctgaagcaggctggagacgtggaggagaaccctggacctatggtgagcaagggcgaggagctgttcaccggggtggtgcccatcctggtcgagctggacggcgacgtaaacggccacaagttcagcgtgtccggcgagggcgagggcgatgccacctacggcaagctgaccctgaagttcatctgcaccaccggcaagctgcccgtgccctggcccaccctcgtgaccaccctgacctatggagtgcagtgcttcagccgctaccccgaccacatgaagcagcacgacttcttcaagtccgccatgcccgaaggctacgtccaggagcgcaccatcttcttcaaggacgacggcaactacaagacccgcgccgaggtgaagttcgagggcgacaccctggtgaaccgcatcgagctgaagggcatcgacttcaaggaggacggcaacatcctggggcacaagctggagtacaactacaacagccacaacgtctatatcatggccgacaagcagaagaacggcatcaaggtgaacttcaagatccgccacaacatcgaggacggcagcgtgcagctcgccgaccactaccagcagaacacccccatcggcgacggccccgtgctgctgcccgacaaccactacctgagcacccagtccgccctgagcaaagaccccaacgagaagcgcgatcacatggtcctgctggagttcgtgaccgccgccgggatcactctcggcatggacgagctgtacaagtctggtggttctcccaagaagaagaggaaagtctaaccggtcatcatcaccatcaccattgagtttaaacccgctgatcagcctcgactgtgccttctagttgccagccatctgttgtttgcccctcccccgtgccttccttgaccctggaaggtgccactcccactgtcctttcctaataaaatgaggaaattgcatcgcattgtctgagtaggtgtcattctattctggggggtggggtggggcaggacagcaagggggaggattgggaagacaatagcaggcatgctggggatgcggtgggctctatggcttctgaggcggaaagaaccagctggggctcgataccgtcgacctctagctagagcttggcgtaatcatggtcatagctgtttcctgtgtgaaattgttatccgctcacaattccacacaacatacgagccggaagcataaagtgtaaagcctagggtgcctaatgagtgagctaactcacattaattgcgttgcgctcactgcccgctttccagtcgggaaacctgtcgtgccagctgcattaatgaatcggccaacgcgcggggagaggcggtttgcgtattgggcgctcttccgcttcctcgctcactgactcgctgcgctcggtcgttcggctgcggcgagcggtatcagctcactcaaaggcggtaatacggttatccacagaatcaggggataacgcaggaaagaacatgtgagcaaaaggccagcaaaaggccaggaaccgtaaaaaggccgcgttgctggcgtttttccataggctccgcccccctgacgagcatcacaaaaatcgacgctcaagtcagaggtggcgaaacccgacaggactataaagataccaggcgtttccccctggaagctccctcgtgcgctctcctgttccgaccctgccgcttaccggatacctgtccgcctttctcccttcgggaagcgtggcgctttctcatagctcacgctgtaggtatctcagttcggtgtaggtcgttcgctccaagctgggctgtgtgcacgaaccccccgttcagcccgaccgctgcgccttatccggtaactatcgtcttgagtccaacccggtaagacacgacttatcgccactggcagcagccactggtaacaggattagcagagcgaggtatgtaggcggtgctacagagttcttgaagtggtggcctaactacggctacactagaagaacagtatttggtatctgcgctctgctgaagccagttaccttcggaaaaagagttggtagctcttgatccggcaaacaaaccaccgctggtagcggtggtttttttgtttgcaagcagcagattacgcgcagaaaaaaaggatctcaagaagatcctttgatcttttctacggggtctgacactcagtggaacgaaaactcacgttaagggattttggtcatgagattatcaaaaaggatcttcacctagatccttttaaattaaaaatgaagttttaaatcaatctaaagtatatatgagtaaacttggtctgacagttaccaatgcttaatcagtgaggcacctatctcagcgatctgtctatttcgttcatccatagttgcctgactccccgtcgtgtagataactacgatacgggagggcttaccatctggccccagtgctgcaatgataccgcgagacccacgctcaccggctccagatttatcagcaataaaccagccagccggaagggccgagcgcagaagtggtcctgcaactttatccgcctccatccagtctattaattgttgccgggaagctagagtaagtagttcgccagttaatagtttgcgcaacgttgttgccattgctacaggcatcgtggtgtcacgctcgtcgtttggtatggcttcattcagctccggttcccaacgatcaaggcgagttacatgatcccccatgttgtgcaaaaaagcggttagctccttcggtcctccgatcgttgtcagaagtaagttggccgcagtgttatcactcatggttatggcagcactgcataattctcttactgtcatgccatccgtaagatgcttttctgtgactggtgagtactcaaccaagtcattctgagaatagtgtatgcggcgaccgagttgctc

SEQ ID NO: 381 - DNA, 10416 bp, synthetic construct
  source 1..10416: mol_type = other DNA
ttgcccggcgtcaatacgggataataccgcgccacatagcagaactttaaaagtgctcatcattggaaaacgttcttcggggcgaaaactctcaaggatcttaccgctgttgagatccagttcgatgtaacccactcgtgcacccaactgatcttcagcatcttttactttcaccagcgtttctgggtgagcaaaaacaggaaggcaaaatgccgcaaaaaagggaataagggcgacacggaaatgttgaatactcatactcttcctttttcaatattattgaagcatttatcagggttattgtctcatgagcggatacatatttgaatgtatttagaaaaataaacaaataggggttccgcgcacatttccccgaaaagtgccacctgacgtcgacggatcgggagatcgatctcccgatcccctagggtcgactctcagtacaatctgctctgatgccgcatagttaagccagtatctgctccctgcttgtgtgttggaggtcgctgagtagtgcgcgagcaaaatttaagctacaacaaggcaaggcttgaccgacaattgcatgaagaatctgcttagggttaggcgttttgcgctgcttcgcgatgtacgggccagatatacgcgttgacattgattattgactagttattaatagtaatcaattacggggtcattagttcatagcccatatatggagttccgcgttacataacttacggtaaatggcccgcctggctgaccgcccaacgacccccgcccattgacgtcaataatgacgtatgttcccatagtaacgccaatagggactttccattgacgtcaatgggtggagtatttacggtaaactgcccacttggcagtacatcaagtgtatcatatgccaagtacgccccctattgacgtcaatgacggtaaatggcccgcctggcattatgcccagtacatgaccttatgggactttcctacttggcagtacatctacgtattagtcatcgctattaccatggtgatgcggttttggcagtacatcaatgggcgtggatagcggtttgactcacggggatttccaagtctccaccccattgacgtcaatgggagtttgttttggcaccaaaatcaacgggactttccaaaatgtcgtaacaactccgccccattgacgcaaatgggcggtaggcgtgtacggtgggaggtctatataagcagagctggtttagtgaaccgtcagatccgctagagatccgcggccgctaatacgactcactatagggagagccgccaccatgaaacggacagccgacggaagcgagttcgagtcaccaaagaagaagcggaaagtcacacttaatattgaggatgaacatagattgcacgagacctctaaggaacctgatgtttctcttggatcaacttggttgtcagatttcccacaagcatgggcagagaccggaggtatgggtcttgctgttaggcaggcaccacttattattcctttgaaggcaacctctactcctgtgtcaattaagcaatatccaatgtctcaggaagctaggcttggaattaagcctcacattcaaagacttttggatcagggtattttggtgccatgtcaatcaccttggaacacaccacttttgcctgttaagaagcctggaactaatgattacagaccagtgcaagatttgagggaggttaacaagagagtggaagatattcacccaactgttccaaacccttataatcttttgtctggattgccaccttcacatcaatggtacactgtgcttgatttgaaggatgcatttttctgccttaggttgcatccaacatctcagcctctttttgctttcgagtggagagatcctgaaatgggaatttctggtcaacttacatggaccaggttgcctcagggtttcaagaactcaccaaccttgtttaatgaggcacttcacagggatttggctgattttaggattcaacatcctgatcttatccttttgcagtatgttgatgatcttttgcttgctgcaacttctgaattggattgtcaacagggaactagggcattgcttcaaacacttggaaatttgggttacagagcttcagcaaagaaggctcagatttgccaaaagcaggttaagtatcttggatacttgcttaaggaaggacaaaggtggttgaccgaggctagaaaggaaactgtgatgggtcaaccaacacctaagacccctaggcagcttagagagttcttgggaaaggcaggtttttgtaggcttttcattccaggatttgctgaaatggctgcaccactttatcctttgaccaagcctggaactttgtttaactggggtccagatcaacagaaggcataccaagaaattaagcaggctttgcttactgctccagcacttggtttgcctgatcttacaaagccatttgagttgttcgttgatgaaaagcaaggatatgcaaagggtgtgcttacccagaagttgggaccttggagaaggcctgttgcttacctttctaagaaacttgatccagtggctgcaggttggccaccttgtcttagaatggttgctgcaattgcagtgcttacaaaggatgctggaaagttgactatgggacaacctcttgttattttggcaccacacgctgttgaggcacttgtgaagcagccacctgataggtggttgtcaaacgcaagaatgacccattatcaagctcttcttttggatactgatagggtgcagttcggtcctgttgtggctttgaatccagcaacacttttgccacttcctgaggaaggattgcaacacaactgccttgatattttggctgaggcacatggtacaagacctgatcttaccgatcagccattgcctgatgctgatcacacttggtacacagatggatcttcacttttgcaagaaggacagaggaaggctggtgctgcagttactacagagactgaagtgatttgggctaaggcacttccagctggaacatctgctcaaagagcagagcttattgctttgacccaggcacttaagatggctgaaggaaagaagttgaacgtttacactgattctaggtatgctttcgcaacagctcatattcacggagaaatctatagaaggagaggatggttgacatcagagggaaaggaaattaagaacaaggatgaaattcttgcacttttgaaggctctttttcttcctaagagattgtctattattcattgcccaggacaccaaaagggtcattcagcagaagctaggggaaatagaatggctgatcaggctgcaagaaaggctgcaattactgagacacctgatacctctactcttttgatcgaaaactcttcaccaaattcaaggcttattaactctggtggttcaagcggaggctcatctggcagcgaaactccgggcacttccgagtcagctactcctgagtctagcggcgggtcgtcaggagggtctaagtccctcaaaaagaatgacgccgtggtggccattatgaaagacctgctcgactccgtgaagtccttcgaaaattacattaaagcgttctttggggaggggaaggaaactaacagggatgagtccttctatggcgactttgtcctcgcgtacgacatcctgctgaaggtcgaccacatttacgacgcgatccgcaactacgtgacacagaagccgtactccaaagacaagttcaagctgtacttccagaacccgcaatttatggggggctgggacaaggataaagagacagactaccgcgcgacaattctccgctatggctccaaatactatctggccatcatggacaagaagtacgcgaagtgcctgcagaagatcgacaaagacgacgtcaatggcaactatgaaaagatcaactacaagctgctgccgggcccgaacaagatgctcccgaaggtgttcttcagcaagaagtggatggcctactacaatccaagcgaggatattcagaaaatctataaaaacgggaccttcaagaagggggacatgtttaacctcaacgactgccacaagctcattgatttcttcaaggatagcatttcccgctacccgaaatggtccaatgcgtacgattttaacttctccgagacagaaaagtacaaagacatcgcgggcttttacagggaggtggaggagcaagggtataaagtttcttttgaatccgcgagcaagaaggaagtcgacaagctcgtcgaggagggcaagctctacatgttccaaatttataacaaggacttttccgacaagagccatgggaccccaaacctccacaccatgtacttcaaactgctctttgacgagaacaaccacgggcaaatcaggctgagcggcggcgccgaattattcatgcgcagggcctccctcaagaaggaagagctggtcgtccatccagccaattccccgatcgcgaacaagaacccggacaatccgaaaaagaccaccaccctgtcctacgacgtctacaaggacaaacgcttcagcgaagaccagtacgaattacacatcccaattgcgattaataagtgcccaaagaatatcttcaaaattaatacagaggtcagggtgctgctcaaacacgacgacaatccgtatgtcatcggcattgacaggggcgagcgcaatctgctctatatcgtggtcgtggatgggaagggcaatattgtggagcagtactccctgaacgagattatcaacaacttcaatgggattaggattaagaccgactatcacagcctgctcgacaagaaagaaaaagagaggtttgaggcccgccaaaactggacctccattgagaatatcaaagaattaaaggccggctatatttcccaagtcgtccacaagatctgcgagctggtggagaaatatgacgccgtgattgcgctcgaagacttaaattctgggttcaagaactcccgcgtgaaggtggaaaaacaggtgtatcagaaattcgagaaaatgctgatcgacaaactcaattatatggtggataagaagtccaacccgtgtgccacagggggcgcgctgaagggctatcagatcaccaacaagttcgagagcttcaagagcatgagcacccagaacgggtttattttctacatcccggcgtggctcacctccaagattgacccgagcaccggcttcgtgaacctcctgaagacaaagtatacctccattgccgacagcaagaagtttatctcctccttcgaccgcattatgtatgtgccggaggaggacctcttcgagttcgccctcgactacaaaaacttcagccgcacagatgcggattacatcaagaagtggaagctgtactcctacgggaacaggatccgcatcttcaggaatccaaaaaaaaataacgtctttgactgggaggaagtgtgcctgacatccgcctacaaggaactgttcaataaatacggcatcaattaccagcagggcgacattcgcgccctcctctgtgagcagtccgacaaagcgttttactccagcttcatggccctcatgtccctgatgctccaaatgaggaatagcatcacagggcgcaccgacgtcgacttcctcatcagcccggtgaagaactccgacgggatcttttacgactcccgcaactatgaggcgcaagagaatgcgatcctcccgaagaacgccgatgcgaacggggcctataatatcgccaggaaagtgctctgggccatcgggcagttcaaaaaggcggaggatgagaagctcgacaaggtgaaaattgccatttccaacaaggagtggctggagtacgcgcagacctccgtgaagcacggctcctctggcagctccggctctagcggctcctctggcagctccggctccaagctggagaagtttacaaactgttacagcctctccaaaaccctcaggtttaaagcgatcccggtgggcaagacccaggagaacatcgacaacaagaggctcctggtggaagacgagaagcgcgccgaagactacaagggcgtgaagaagctgctcgataggtactacctcagctttattaacgacgtgctgcacagcatcaaactcaagaatctcaacaactacatctccctcttccgcaaaaagacccgcaccgagaaggagaacaaggagctggagaacctggagatcaacctccgcaaggaaatcgccaaagcgttcaagggcaatgaagggtacaagagcctcttcaagaaagacatcatcgaaactatcctcccagagtttctcgatgacaaggacgagatcgcgctggtgaactcctttaacgggttcacaaccgcgtttaccggcttctttgataacagggaaaatatgttctccgaggaggccaagtccaccagcatcgccttcaggtgtatcaacgagaacctcacccgctacatttccaatatggacattttcgagaaggtggatgcgatcttcgataagcacgaggtgcaggagatcaaagagaagattctcaattccgattatgacgtcgaggatttcttcgaaggggagttctttaattttgtgctcacacaagagggcattgacgtgtacaacgcgattatcgggggcttcgtcacagagtccggggagaagattaaggggctgaatgagtacatcaatctgtacaatcagaagaccaagcagaaactgccgaaattcaagccgctctacaagcaagtcctgtccgatagggaaagcctctccttctacggcgagggctataccagcgacgaggaggtgctggaagtcttccgcaacacactgaataagaatagcgagattttctcctccatcaagaagctcgagaagctctttaagaactttgacgagtacagctccgccgggattttcgtgaagaacgggccggcgatcagcaccatctccaaggacatctttggcgagtggaacgtcatcagggacaagtggaacgccgagtacgacgacatccacctgaagaagaaggcggtggtgaccgagaagtatgaggacgatcgcaggaagtccttcaaaaaaatcggctccttcagcctcgaacagctccaggagtatgccgatgcggatctgtccgtcgtcgagaagctgaaggaaatcatcattcagaaggtcgacgagatctataaagtgtacgggtccagcgagaagctgttcgacgccgactttgtgctcgagtctggtggttcaagcggaggctcatctggcagcgaaactccgggcacttccgagtcagctactcctgagtctagcggcgggtcgtcaggagggtctgctcttgattttctttctaggcttccattgccacctccagtttctccaatttgtacttttgtgtcacctgctgcacaaaaggcattccagcctccaaggtcatgcggatctggcggctcaaaaagaaccgccgacggcagcgaattcgagcccaagaagaagaggaaagtcggaagcggagctactaacttcagcctgctgaagcaggctggagacgtggaggagaaccctggacctatggtgagcaagggcgaggagctgttcaccggggtggtgcccatcctggtcgagctggacggcgacgtaaacggccacaagttcagcgtgtccggcgagggcgagggcgatgccacctacggcaagctgaccctgaagttcatctgcaccaccggcaagctgcccgtgccctggcccaccctcgtgaccaccctgacctatggagtgcagtgcttcagccgctaccccgaccacatgaagcagcacgacttcttcaagtccgccatgcccgaaggctacgtccaggagcgcaccatcttcttcaaggacgacggcaactacaagacccgcgccgaggtgaagttcgagggcgacaccctggtgaaccgcatcgagctgaagggcatcgacttcaaggaggacggcaacatcctggggcacaagctggagtacaactacaacagccacaacgtctatatcatggccgacaagcagaagaacggcatcaaggtgaacttcaagatccgccacaacatcgaggacggcagcgtgcagctcgccgaccactaccagcagaacacccccatcggcgacggccccgtgctgctgcccgacaaccactacctgagcacccagtccgccctgagcaaagaccccaacgagaagcgcgatcacatggtcctgctggagttcgtgaccgccgccgggatcactctcggcatggacgagctgtacaagtctggtggttctcccaagaagaagaggaaagtctaaccggtcatcatcaccatcaccattgagtttaaacccgctgatcagcctcgactgtgccttctagttgccagccatctgttgtttgcccctcccccgtgccttccttgaccctggaaggtgccactcccactgtcctttcctaataaaatgaggaaattgcatcgcattgtctgagtaggtgtcattctattctggggggtggggtggggcaggacagcaagggggaggattgggaagacaatagcaggcatgctggggatgcggtgggctctatggcttctgaggcggaaagaaccagctggggctcgataccgtcgacctctagctagagcttggcgtaatcatggtcatagctgtttcctgtgtgaaattgttatccgctcacaattccacacaacatacgagccggaagcataaagtgtaaagcctagggtgcctaatgagtgagctaactcacattaattgcgttgcgctcactgcccgctttccagtcgggaaacctgtcgtgccagctgcattaatgaatcggccaacgcgcggggagaggcggtttgcgtattgggcgctcttccgcttcctcgctcactgactcgctgcgctcggtcgttcggctgcggcgagcggtatcagctcactcaaaggcggtaatacggttatccacagaatcaggggataacgcaggaaagaacatgtgagcaaaaggccagcaaaaggccaggaaccgtaaaaaggccgcgttgctggcgtttttccataggctccgcccccctgacgagcatcacaaaaatcgacgctcaagtcagaggtggcgaaacccgacaggactataaagataccaggcgtttccccctggaagctccctcgtgcgctctcctgttccgaccctgccgcttaccggatacctgtccgcctttctcccttcgggaagcgtggcgctttctcatagctcacgctgtaggtatctcagttcggtgtaggtcgttcgctccaagctgggctgtgtgcacgaaccccccgttcagcccgaccgctgcgccttatccggtaactatcgtcttgagtccaacccggtaagacacgacttatcgccactggcagcagccactggtaacaggattagcagagcgaggtatgtaggcggtgctacagagttcttgaagtggtggcctaactacggctacactagaagaacagtatttggtatctgcgctctgctgaagccagttaccttcggaaaaagagttggtagctcttgatccggcaaacaaaccaccgctggtagcggtggtttttttgtttgcaagcagcagattacgcgcagaaaaaaaggatctcaagaagatcctttgatcttttctacggggtctgacactcagtggaacgaaaactcacgttaagggattttggtcatgagattatcaaaaaggatcttcacctagatccttttaaattaaaaatgaagttttaaatcaatctaaagtatatatgagtaaacttggtctgacagttaccaatgcttaatcagtgaggcacctatctcagcgatctgtctatttcgttcatccatagttgcctgactccccgtcgtgtagataactacgatacgggagggcttaccatctggccccagtgctgcaatgataccgcgagacccacgctcaccggctccagatttatcagcaataaaccagccagccggaagggccgagcgcagaagtggtcctgcaactttatccgcctccatccagtctattaattgttgccgggaagctagagtaagtagttcgccagttaatagtttgcgcaacgttgttgccattgctacaggcatcgtggtgtcacgctcgtcgtttggtatggcttcattcagctccggttcccaacgatcaaggcgagttacatgatcccccatgttgtgcaaaaaagcggttagctccttcggtcctccgatcgttgtcagaagtaagttggccgcagtgttatcactcatggttatggcagcactgcataattctcttactgtcatgccatccgtaagatgcttttctgtgactggtgagtactcaaccaagtcattctgagaatagtgtatgcggcgaccgagttgctc

SEQ ID NO: 382 - DNA, 10416 bp, synthetic construct
  source 1..10416: mol_type = other DNA
ttgcccggcgtcaatacgggataataccgcgccacatagcagaactttaaaagtgctcatcattggaaaacgttcttcggggcgaaaactctcaaggatcttaccgctgttgagatccagttcgatgtaacccactcgtgcacccaactgatcttcagcatcttttactttcaccagcgtttctgggtgagcaaaaacaggaaggcaaaatgccgcaaaaaagggaataagggcgacacggaaatgttgaatactcatactcttcctttttcaatattattgaagcatttatcagggttattgtctcatgagcggatacatatttgaatgtatttagaaaaataaacaaataggggttccgcgcacatttccccgaaaagtgccacctgacgtcgacggatcgggagatcgatctcccgatcccctagggtcgactctcagtacaatctgctctgatgccgcatagttaagccagtatctgctccctgcttgtgtgttggaggtcgctgagtagtgcgcgagcaaaatttaagctacaacaaggcaaggcttgaccgacaattgcatgaagaatctgcttagggttaggcgttttgcgctgcttcgcgatgtacgggccagatatacgcgttgacattgattattgactagttattaatagtaatcaattacggggtcattagttcatagcccatatatggagttccgcgttacataacttacggtaaatggcccgcctggctgaccgcccaacgacccccgcccattgacgtcaataatgacgtatgttcccatagtaacgccaatagggactttccattgacgtcaatgggtggagtatttacggtaaactgcccacttggcagtacatcaagtgtatcatatgccaagtacgccccctattgacgtcaatgacggtaaatggcccgcctggcattatgcccagtacatgaccttatgggactttcctacttggcagtacatctacgtattagtcatcgctattaccatggtgatgcggttttggcagtacatcaatgggcgtggatagcggtttgactcacggggatttccaagtctccaccccattgacgtcaatgggagtttgttttggcaccaaaatcaacgggactttccaaaatgtcgtaacaactccgccccattgacgcaaatgggcggtaggcgtgtacggtgggaggtctatataagcagagctggtttagtgaaccgtcagatccgctagagatccgcggccgctaatacgactcactatagggagagccgccaccatgaaacggacagccgacggaagcgagttcgagtcaccaaagaagaagcggaaagtcacacttaatattgaggatgaacatagattgcacgagacctctaaggaacctgatgtttctcttggatcaacttggttgtcagatttcccacaagcatgggcagagaccggaggtatgggtcttgctgttaggcaggcaccacttattattcctttgaaggcaacctctactcctgtgtcaattaagcaatatccaatgtctcaggaagctaggcttggaattaagcctcacattcaaagacttttggatcagggtattttggtgccatgtcaatcaccttggaacacaccacttttgcctgttaagaagcctggaactaatgattacagaccagtgcaagatttgagggaggttaacaagagagtggaagatattcacccaactgttccaaacccttataatcttttgtctggattgccaccttcacatcaatggtacactgtgcttgatttgaaggatgcatttttctgccttaggttgcatccaacatctcagcctctttttgctttcgagtggagagatcctgaaatgggaatttctggtcaacttacatggaccaggttgcctcagggtttcaagaactcaccaaccttgtttaatgaggcacttcacagggatttggctgattttaggattcaacatcctgatcttatccttttgcagtatgttgatgatcttttgcttgctgcaacttctgaattggattgtcaacagggaactagggcattgcttcaaacacttggaaatttgggttacagagcttcagcaaagaaggctcagatttgccaaaagcaggttaagtatcttggatacttgcttaaggaaggacaaaggtggttgaccgaggctagaaaggaaactgtgatgggtcaaccaacacctaagacccctaggcagcttagagagttcttgggaaaggcaggtttttgtaggcttttcattccaggatttgctgaaatggctgcaccactttatcctttgaccaagcctggaactttgtttaactggggtccagatcaacagaaggcataccaagaaattaagcaggctttgcttactgctccagcacttggtttgcctgatcttacaaagccatttgagttgttcgttgatgaaaagcaaggatatgcaaagggtgtgcttacccagaagttgggaccttggagaaggcctgttgcttacctttctaagaaacttgatccagtggctgcaggttggccaccttgtcttagaatggttgctgcaattgcagtgcttacaaaggatgctggaaagttgactatgggacaacctcttgttattttggcaccacacgctgttgaggcacttgtgaagcagccacctgataggtggttgtcaaacgcaagaatgacccattatcaagctcttcttttggatactgatagggtgcagttcggtcctgttgtggctttgaatccagcaacacttttgccacttcctgaggaaggattgcaacacaactgccttgatattttggctgaggcacatggtacaagacctgatcttaccgatcagccattgcctgatgctgatcacacttggtacacagatggatcttcacttttgcaagaaggacagaggaaggctggtgctgcagttactacagagactgaagtgatttgggctaaggcacttccagctggaacatctgctcaaagagcagagcttattgctttgacccaggcacttaagatggctgaaggaaagaagttgaacgtttacactgattctaggtatgctttcgcaacagctcatattcacggagaaatctatagaaggagaggatggttgacatcagagggaaaggaaattaagaacaaggatgaaattcttgcacttttgaaggctctttttcttcctaagagattgtctattattcattgcccaggacaccaaaagggtcattcagcagaagctaggggaaatagaatggctgatcaggctgcaagaaaggctgcaattactgagacacctgatacctctactcttttgatcgaaaactcttcaccaaattcaaggcttattaactctggtggttcaagcggaggctcatctggcagcgaaactccgggcacttccgagtcagctactcctgagtctagcggcgggtcgtcaggagggtcttccgacaaagcgttttactccagcttcatggccctcatgtccctgatgctccaaatgaggaatagcatcacagggcgcaccgacgtcgacttcctcatcagcccggtgaagaactccgacgggatcttttacgactcccgcaactatgaggcgcaagagaatgcgatcctcccgaagaacgccgatgcgaacggggcctataatatcgccaggaaagtgctctgggccatcgggcagttcaaaaaggcggaggatgagaagctcgacaaggtgaaaattgccatttccaacaaggagtggctggagtacgcgcagacctccgtgaagcacggctcctctggcagctccggctctagcggctcctctggcagctccggctccaagctggagaagtttacaaactgttacagcctctccaaaaccctcaggtttaaagcgatcccggtgggcaagacccaggagaacatcgacaacaagaggctcctggtggaagacgagaagcgcgccgaagactacaagggcgtgaagaagctgctcgataggtactacctcagctttattaacgacgtgctgcacagcatcaaactcaagaatctcaacaactacatctccctcttccgcaaaaagacccgcaccgagaaggagaacaaggagctggagaacctggagatcaacctccgcaaggaaatcgccaaagcgttcaagggcaatgaagggtacaagagcctcttcaagaaagacatcatcgaaactatcctcccagagtttctcgatgacaaggacgagatcgcgctggtgaactcctttaacgggttcacaaccgcgtttaccggcttctttgataacagggaaaatatgttctccgaggaggccaagtccaccagcatcgccttcaggtgtatcaacgagaacctcacccgctacatttccaatatggacattttcgagaaggtggatgcgatcttcgataagcacgaggtgcaggagatcaaagagaagattctcaattccgattatgacgtcgaggatttcttcgaaggggagttctttaattttgtgctcacacaagagggcattgacgtgtacaacgcgattatcgggggcttcgtcacagagtccggggagaagattaaggggctgaatgagtacatcaatctgtacaatcagaagaccaagcagaaactgccgaaattcaagccgctctacaagcaagtcctgtccgatagggaaagcctctccttctacggcgagggctataccagcgacgaggaggtgctggaagtcttccgcaacacactgaataagaatagcgagattttctcctccatcaagaagctcgagaagctctttaagaactttgacgagtacagctccgccgggattttcgtgaagaacgggccggcgatcagcaccatctccaaggacatctttggcgagtggaacgtcatcagggacaagtggaacgccgagtacgacgacatccacctgaagaagaaggcggtggtgaccgagaagtatgaggacgatcgcaggaagtccttcaaaaaaatcggctccttcagcctcgaacagctccaggagtatgccgatgcggatctgtccgtcgtcgagaagctgaaggaaatcatcattcagaaggtcgacgagatctataaagtgtacgggtccagcgagaagctgttcgacgccgactttgtgctcgagaagtccctcaaaaagaatgacgccgtggtggccattatgaaagacctgctcgactccgtgaagtccttcgaaaattacattaaagcgttctttggggaggggaaggaaactaacagggatgagtccttctatggcgactttgtcctcgcgtacgacatcctgctgaaggtcgaccacatttacgacgcgatccgcaactacgtgacacagaagccgtactccaaagacaagttcaagctgtacttccagaacccgcaatttatggggggctgggacaaggataaagagacagactaccgcgcgacaattctccgctatggctccaaatactatctggccatcatggacaagaagtacgcgaagtgcctgcagaagatcgacaaagacgacgtcaatggcaactatgaaaagatcaactacaagctgctgccgggcccgaacaagatgctcccgaaggtgttcttcagcaagaagtggatggcctactacaatccaagcgaggatattcagaaaatctataaaaacgggaccttcaagaagggggacatgtttaacctcaacgactgccacaagctcattgatttcttcaaggatagcatttcccgctacccgaaatggtccaatgcgtacgattttaacttctccgagacagaaaagtacaaagacatcgcgggcttttacagggaggtggaggagcaagggtataaagtttcttttgaatccgcgagcaagaaggaagtcgacaagctcgtcgaggagggcaagctctacatgttccaaatttataacaaggacttttccgacaagagccatgggaccccaaacctccacaccatgtacttcaaactgctctttgacgagaacaaccacgggcaaatcaggctgagcggcggcgccgaattattcatgcgcagggcctccctcaagaaggaagagctggtcgtccatccagccaattccccgatcgcgaacaagaacccggacaatccgaaaaagaccaccaccctgtcctacgacgtctacaaggacaaacgcttcagcgaagaccagtacgaattacacatcccaattgcgattaataagtgcccaaagaatatcttcaaaattaatacagaggtcagggtgctgctcaaacacgacgacaatccgtatgtcatcggcattgacaggggcgagcgcaatctgctctatatcgtggtcgtggatgggaagggcaatattgtggagcagtactccctgaacgagattatcaacaacttcaatgggattaggattaagaccgactatcacagcctgctcgacaagaaagaaaaagagaggtttgaggcccgccaaaactggacctccattgagaatatcaaagaattaaaggccggctatatttcccaagtcgtccacaagatctgcgagctggtggagaaatatgacgccgtgattgcgctcgaagacttaaattctgggttcaagaactcccgcgtgaaggtggaaaaacaggtgtatcagaaattcgagaaaatgctgatcgacaaactcaattatatggtggataagaagtccaacccgtgtgccacagggggcgcgctgaagggctatcagatcaccaacaagttcgagagcttcaagagcatgagcacccagaacgggtttattttctacatcccggcgtggctcacctccaagattgacccgagcaccggcttcgtgaacctcctgaagacaaagtatacctccattgccgacagcaagaagtttatctcctccttcgaccgcattatgtatgtgccggaggaggacctcttcgagttcgccctcgactacaaaaacttcagccgcacagatgcggattacatcaagaagtggaagctgtactcctacgggaacaggatccgcatcttcaggaatccaaaaaaaaataacgtctttgactgggaggaagtgtgcctgacatccgcctacaaggaactgttcaataaatacggcatcaattaccagcagggcgacattcgcgccctcctctgtgagcagtctggtggttcaagcggaggctcatctggcagcgaaactccgggcacttccgagtcagctactcctgagtctagcggcgggtcgtcaggagggtctgctcttgattttctttctaggcttccattgccacctccagtttctccaatttgtacttttgtgtcacctgctgcacaaaaggcattccagcctccaaggtcatgcggatctggcggctcaaaaagaaccgccgacggcagcgaattcgagcccaagaagaagaggaaagtcggaagcggagctactaacttcagcctgctgaagcaggctggagacgtggaggagaaccctggacctatggtgagcaagggcgaggagctgttcaccggggtggtgcccatcctggtcgagctggacggcgacgtaaacggccacaagttcagcgtgtccggcgagggcgagggcgatgccacctacggcaagctgaccctgaagttcatctgcaccaccggcaagctgcccgtgccctggcccaccctcgtgaccaccctgacctatggagtgcagtgcttcagccgctaccccgaccacatgaagcagcacgacttcttcaagtccgccatgcccgaaggctacgtccaggagcgcaccatcttcttcaaggacgacggcaactacaagacccgcgccgaggtgaagttcgagggcgacaccctggtgaaccgcatcgagctgaagggcatcgacttcaaggaggacggcaacatcctggggcacaagctggagtacaactacaacagccacaacgtctatatcatggccgacaagcagaagaacggcatcaaggtgaacttcaagatccgccacaacatcgaggacggcagcgtgcagctcgccgaccactaccagcagaacacccccatcggcgacggccccgtgctgctgcccgacaaccactacctgagcacccagtccgccctgagcaaagaccccaacgagaagcgcgatcacatggtcctgctggagttcgtgaccgccgccgggatcactctcggcatggacgagctgtacaagtctggtggttctcccaagaagaagaggaaagtctaaccggtcatcatcaccatcaccattgagtttaaacccgctgatcagcctcgactgtgccttctagttgccagccatctgttgtttgcccctcccccgtgccttccttgaccctggaaggtgccactcccactgtcctttcctaataaaatgaggaaattgcatcgcattgtctgagtaggtgtcattctattctggggggtggggtggggcaggacagcaagggggaggattgggaagacaatagcaggcatgctggggatgcggtgggctctatggcttctgaggcggaaagaaccagctggggctcgataccgtcgacctctagctagagcttggcgtaatcatggtcatagctgtttcctgtgtgaaattgttatccgctcacaattccacacaacatacgagccggaagcataaagtgtaaagcctagggtgcctaatgagtgagctaactcacattaattgcgttgcgctcactgcccgctttccagtcgggaaacctgtcgtgccagctgcattaatgaatcggccaacgcgcggggagaggcggtttgcgtattgggcgctcttccgcttcctcgctcactgactcgctgcgctcggtcgttcggctgcggcgagcggtatcagctcactcaaaggcggtaatacggttatccacagaatcaggggataacgcaggaaagaacatgtgagcaaaaggccagcaaaaggccaggaaccgtaaaaaggccgcgttgctggcgtttttccataggctccgcccccctgacgagcatcacaaaaatcgacgctcaagtcagaggtggcgaaacccgacaggactataaagataccaggcgtttccccctggaagctccctcgtgcgctctcctgttccgaccctgccgcttaccggatacctgtccgcctttctcccttcgggaagcgtggcgctttctcatagctcacgctgtaggtatctcagttcggtgtaggtcgttcgctccaagctgggctgtgtgcacgaaccccccgttcagcccgaccgctgcgccttatccggtaactatcgtcttgagtccaacccggtaagacacgacttatcgccactggcagcagccactggtaacaggattagcagagcgaggtatgtaggcggtgctacagagttcttgaagtggtggcctaactacggctacactagaagaacagtatttggtatctgcgctctgctgaagccagttaccttcggaaaaagagttggtagctcttgatccggcaaacaaaccaccgctggtagcggtggtttttttgtttgcaagcagcagattacgcgcagaaaaaaaggatctcaagaagatcctttgatcttttctacggggtctgacactcagtggaacgaaaactcacgttaagggattttggtcatgagattatcaaaaaggatcttcacctagatccttttaaattaaaaatgaagttttaaatcaatctaaagtatatatgagtaaacttggtctgacagttaccaatgcttaatcagtgaggcacctatctcagcgatctgtctatttcgttcatccatagttgcctgactccccgtcgtgtagataactacgatacgggagggcttaccatctggccccagtgctgcaatgataccgcgagacccacgctcaccggctccagatttatcagcaataaaccagccagccggaagggccgagcgcagaagtggtcctgcaactttatccgcctccatccagtctattaattgttgccgggaagctagagtaagtagttcgccagttaatagtttgcgcaacgttgttgccattgctacaggcatcgtggtgtcacgctcgtcgtttggtatggcttcattcagctccggttcccaacgatcaaggcgagttacatgatcccccatgttgtgcaaaaaagcggttagctccttcggtcctccgatcgttgtcagaagtaagttggccgcagtgttatcactcatggttatggcagcactgcataattctcttactgtcatgccatccgtaagatgcttttctgtgactggtgagtactcaaccaagtcattctgagaatagtgtatgcggcgaccgagttgctc

SEQ ID NO: 383 - DNA, 10416 bp, synthetic construct
  source 1..10416: mol_type = other DNA
ttgcccggcgtcaatacgggataataccgcgccacatagcagaactttaaaagtgctcatcattggaaaacgttcttcggggcgaaaactctcaaggatcttaccgctgttgagatccagttcgatgtaacccactcgtgcacccaactgatcttcagcatcttttactttcaccagcgtttctgggtgagcaaaaacaggaaggcaaaatgccgcaaaaaagggaataagggcgacacggaaatgttgaatactcatactcttcctttttcaatattattgaagcatttatcagggttattgtctcatgagcggatacatatttgaatgtatttagaaaaataaacaaataggggttccgcgcacatttccccgaaaagtgccacctgacgtcgacggatcgggagatcgatctcccgatcccctagggtcgactctcagtacaatctgctctgatgccgcatagttaagccagtatctgctccctgcttgtgtgttggaggtcgctgagtagtgcgcgagcaaaatttaagctacaacaaggcaaggcttgaccgacaattgcatgaagaatctgcttagggttaggcgttttgcgctgcttcgcgatgtacgggccagatatacgcgttgacattgattattgactagttattaatagtaatcaattacggggtcattagttcatagcccatatatggagttccgcgttacataacttacggtaaatggcccgcctggctgaccgcccaacgacccccgcccattgacgtcaataatgacgtatgttcccatagtaacgccaatagggactttccattgacgtcaatgggtggagtatttacggtaaactgcccacttggcagtacatcaagtgtatcatatgccaagtacgccccctattgacgtcaatgacggtaaatggcccgcctggcattatgcccagtacatgaccttatgggactttcctacttggcagtacatctacgtattagtcatcgctattaccatggtgatgcggttttggcagtacatcaatgggcgtggatagcggtttgactcacggggatttccaagtctccaccccattgacgtcaatgggagtttgttttggcaccaaaatcaacgggactttccaaaatgtcgtaacaactccgccccattgacgcaaatgggcggtaggcgtgtacggtgggaggtctatataagcagagctggtttagtgaaccgtcagatccgctagagatccgcggccgctaatacgactcactatagggagagccgccaccatgaaacggacagccgacggaagcgagttcgagtcaccaaagaagaagcggaaagtcgctcttgattttctttctaggcttccattgccacctccagtttctccaatttgtacttttgtgtcacctgctgcacaaaaggcattccagcctccaaggtcatgcggatctggtggttcaagcggaggctcatctggcagcgaaactccgggcacttccgagtcagctactcctgagtctagcggcgggtcgtcaggagggtctcgcaccgagaaggagaacaaggagctggagaacctggagatcaacctccgcaaggaaatcgccaaagcgttcaagggcaatgaagggtacaagagcctcttcaagaaagacatcatcgaaactatcctcccagagtttctcgatgacaaggacgagatcgcgctggtgaactcctttaacgggttcacaaccgcgtttaccggcttctttgataacagggaaaatatgttctccgaggaggccaagtccaccagcatcgccttcaggtgtatcaacgagaacctcacccgctacatttccaatatggacattttcgagaaggtggatgcgatcttcgataagcacgaggtgcaggagatcaaagagaagattctcaattccgattatgacgtcgaggatttcttcgaaggggagttctttaattttgtgctcacacaagagggcattgacgtgtacaacgcgattatcgggggcttcgtcacagagtccggggagaagattaaggggctgaatgagtacatcaatctgtacaatcagaagaccaagcagaaactgccgaaattcaagccgctctacaagcaagtcctgtccgatagggaaagcctctccttctacggcgagggctataccagcgacgaggaggtgctggaagtcttccgcaacacactgaataagaatagcgagattttctcctccatcaagaagctcgagaagctctttaagaactttgacgagtacagctccgccgggattttcgtgaagaacgggccggcgatcagcaccatctccaaggacatctttggcgagtggaacgtcatcagggacaagtggaacgccgagtacgacgacatccacctgaagaagaaggcggtggtgaccgagaagtatgaggacgatcgcaggaagtccttcaaaaaaatcggctccttcagcctcgaacagctccaggagtatgccgatgcggatctgtccgtcgtcgagaagctgaaggaaatcatcattcagaaggtcgacgagatctataaagtgtacgggtccagcgagaagctgttcgacgccgactttgtgctcgagaagtccctcaaaaagaatgacgccgtggtggccattatgaaagacctgctcgactccgtgaagtccttcgaaaattacattaaagcgttctttggggaggggaaggaaactaacagggatgagtccttctatggcgactttgtcctcgcgtacgacatcctgctgaaggtcgaccacatttacgacgcgatccgcaactacgtgacacagaagccgtactccaaagacaagttcaagctgtacttccagaacccgcaatttatggggggctgggacaaggataaagagacagactaccgcgcgacaattctccgctatggctccaaatactatctggccatcatggacaagaagtacgcgaagtgcctgcagaagatcgacaaagacgacgtcaatggcaactatgaaaagatcaactacaagctgctgccgggcccgaacaagatgctcccgaaggtgttcttcagcaagaagtggatggcctactacaatccaagcgaggatattcagaaaatctataaaaacgggaccttcaagaagggggacatgtttaacctcaacgactgccacaagctcattgatttcttcaaggatagcatttcccgctacccgaaatggtccaatgcgtacgattttaacttctccgagacagaaaagtacaaagacatcgcgggcttttacagggaggtggaggagcaagggtataaagtttcttttgaatccgcgagcaagaaggaagtcgacaagctcgtcgaggagggcaagctctacatgttccaaatttataacaaggacttttccgacaagagccatgggaccccaaacctccacaccatgtacttcaaactgctctttgacgagaacaaccacgggcaaatcaggctgagcggcggcgccgaattattcatgcgcagggcctccctcaagaaggaagagctggtcgtccatccagccaattccccgatcgcgaacaagaacccggacaatccgaaaaagaccaccaccctgtcctacgacgtctacaaggacaaacgcttcagcgaagaccagtacgaattacacatcccaattgcgattaataagtgcccaaagaatatcttcaaaattaatacagaggtcagggtgctgctcaaacacgacgacaatccgtatgtcatcggcattgacaggggcgagcgcaatctgctctatatcgtggtcgtggatgggaagggcaatattgtggagcagtactccctgaacgagattatcaacaacttcaatgggattaggattaagaccgactatcacagcctgctcgacaagaaagaaaaagagaggtttgaggcccgccaaaactggacctccattgagaatatcaaagaattaaaggccggctatatttcccaagtcgtccacaagatctgcgagctggtggagaaatatgacgccgtgattgcgctcgaagacttaaattctgggttcaagaactcccgcgtgaaggtggaaaaacaggtgtatcagaaattcgagaaaatgctgatcgacaaactcaattatatggtggataagaagtccaacccgtgtgccacagggggcgcgctgaagggctatcagatcaccaacaagttcgagagcttcaagagcatgagcacccagaacgggtttattttctacatcccggcgtggctcacctccaagattgacccgagcaccggcttcgtgaacctcctgaagacaaagtatacctccattgccgacagcaagaagtttatctcctccttcgaccgcattatgtatgtgccggaggaggacctcttcgagttcgccctcgactacaaaaacttcagccgcacagatgcggattacatcaagaagtggaagctgtactcctacgggaacaggatccgcatcttcaggaatccaaaaaaaaataacgtctttgactgggaggaagtgtgcctgacatccgcctacaaggaactgttcaataaatacggcatcaattaccagcagggcgacattcgcgccctcctctgtgagcagtccgacaaagcgttttactccagcttcatggccctcatgtccctgatgctccaaatgaggaatagcatcacagggcgcaccgacgtcgacttcctcatcagcccggtgaagaactccgacgggatcttttacgactcccgcaactatgaggcgcaagagaatgcgatcctcccgaagaacgccgatgcgaacggggcctataatatcgccaggaaagtgctctgggccatcgggcagttcaaaaaggcggaggatgagaagctcgacaaggtgaaaattgccatttccaacaaggagtggctggagtacgcgcagacctccgtgaagcacggctcctctggcagctccggctctagcggctcctctggcagctccggctccaagctggagaagtttacaaactgttacagcctctccaaaaccctcaggtttaaagcgatcccggtgggcaagacccaggagaacatcgacaacaagaggctcctggtggaagacgagaagcgcgccgaagactacaagggcgtgaagaagctgctcgataggtactacctcagctttattaacgacgtgctgcacagcatcaaactcaagaatctcaacaactacatctccctcttccgcaaaaagacctctggtggttcaagcggaggctcatctggcagcgaaactccgggcacttccgagtcagctactcctgagtctagcggcgggtcgtcaggagggtctacacttaatattgaggatgaacatagattgcacgagacctctaaggaacctgatgtttctcttggatcaacttggttgtcagatttcccacaagcatgggcagagaccggaggtatgggtcttgctgttaggcaggcaccacttattattcctttgaaggcaacctctactcctgtgtcaattaagcaatatccaatgtctcaggaagctaggcttggaattaagcctcacattcaaagacttttggatcagggtattttggtgccatgtcaatcaccttggaacacaccacttttgcctgttaagaagcctggaactaatgattacagaccagtgcaagatttgagggaggttaacaagagagtggaagatattcacccaactgttccaaacccttataatcttttgtctggattgccaccttcacatcaatggtacactgtgcttgatttgaaggatgcatttttctgccttaggttgcatccaacatctcagcctctttttgctttcgagtggagagatcctgaaatgggaatttctggtcaacttacatggaccaggttgcctcagggtttcaagaactcaccaaccttgtttaatgaggcacttcacagggatttggctgattttaggattcaacatcctgatcttatccttttgcagtatgttgatgatcttttgcttgctgcaacttctgaattggattgtcaacagggaactagggcattgcttcaaacacttggaaatttgggttacagagcttcagcaaagaaggctcagatttgccaaaagcaggttaagtatcttggatacttgcttaaggaaggacaaaggtggttgaccgaggctagaaaggaaactgtgatgggtcaaccaacacctaagacccctaggcagcttagagagttcttgggaaaggcaggtttttgtaggcttttcattccaggatttgctgaaatggctgcaccactttatcctttgaccaagcctggaactttgtttaactggggtccagatcaacagaaggcataccaagaaattaagcaggctttgcttactgctccagcacttggtttgcctgatcttacaaagccatttgagttgttcgttgatgaaaagcaaggatatgcaaagggtgtgcttacccagaagttgggaccttggagaaggcctgttgcttacctttctaagaaacttgatccagtggctgcaggttggccaccttgtcttagaatggttgctgcaattgcagtgcttacaaaggatgctggaaagttgactatgggacaacctcttgttattttggcaccacacgctgttgaggcacttgtgaagcagccacctgataggtggttgtcaaacgcaagaatgacccattatcaagctcttcttttggatactgatagggtgcagttcggtcctgttgtggctttgaatccagcaacacttttgccacttcctgaggaaggattgcaacacaactgccttgatattttggctgaggcacatggtacaagacctgatcttaccgatcagccattgcctgatgctgatcacacttggtacacagatggatcttcacttttgcaagaaggacagaggaaggctggtgctgcagttactacagagactgaagtgatttgggctaaggcacttccagctggaacatctgctcaaagagcagagcttattgctttgacccaggcacttaagatggctgaaggaaagaagttgaacgtttacactgattctaggtatgctttcgcaacagctcatattcacggagaaatctatagaaggagaggatggttgacatcagagggaaaggaaattaagaacaaggatgaaattcttgcacttttgaaggctctttttcttcctaagagattgtctattattcattgcccaggacaccaaaagggtcattcagcagaagctaggggaaatagaatggctgatcaggctgcaagaaaggctgcaattactgagacacctgatacctctactcttttgatcgaaaactcttcaccaaattcaaggcttattaactctggcggctcaaaaagaaccgccgacggcagcgaattcgagcccaagaagaagaggaaagtcggaagcggagctactaacttcagcctgctgaagcaggctggagacgtggaggagaaccctggacctatggtgagcaagggcgaggagctgttcaccggggtggtgcccatcctggtcgagctggacggcgacgtaaacggccacaagttcagcgtgtccggcgagggcgagggcgatgccacctacggcaagctgaccctgaagttcatctgcaccaccggcaagctgcccgtgccctggcccaccctcgtgaccaccctgacctatggagtgcagtgcttcagccgctaccccgaccacatgaagcagcacgacttcttcaagtccgccatgcccgaaggctacgtccaggagcgcaccatcttcttcaaggacgacggcaactacaagacccgcgccgaggtgaagttcgagggcgacaccctggtgaaccgcatcgagctgaagggcatcgacttcaaggaggacggcaacatcctggggcacaagctggagtacaactacaacagccacaacgtctatatcatggccgacaagcagaagaacggcatcaaggtgaacttcaagatccgccacaacatcgaggacggcagcgtgcagctcgccgaccactaccagcagaacacccccatcggcgacggccccgtgctgctgcccgacaaccactacctgagcacccagtccgccctgagcaaagaccccaacgagaagcgcgatcacatggtcctgctggagttcgtgaccgccgccgggatcactctcggcatggacgagctgtacaagtctggtggttctcccaagaagaagaggaaagtctaaccggtcatcatcaccatcaccattgagtttaaacccgctgatcagcctcgactgtgccttctagttgccagccatctgttgtttgcccctcccccgtgccttccttgaccctggaaggtgccactcccactgtcctttcctaataaaatgaggaaattgcatcgcattgtctgagtaggtgtcattctattctggggggtggggtggggcaggacagcaagggggaggattgggaagacaatagcaggcatgctggggatgcggtgggctctatggcttctgaggcggaaagaaccagctggggctcgataccgtcgacctctagctagagcttggcgtaatcatggtcatagctgtttcctgtgtgaaattgttatccgctcacaattccacacaacatacgagccggaagcataaagtgtaaagcctagggtgcctaatgagtgagctaactcacattaattgcgttgcgctcactgcccgctttccagtcgggaaacctgtcgtgccagctgcattaatgaatcggccaacgcgcggggagaggcggtttgcgtattgggcgctcttccgcttcctcgctcactgactcgctgcgctcggtcgttcggctgcggcgagcggtatcagctcactcaaaggcggtaatacggttatccacagaatcaggggataacgcaggaaagaacatgtgagcaaaaggccagcaaaaggccaggaaccgtaaaaaggccgcgttgctggcgtttttccataggctccgcccccctgacgagcatcacaaaaatcgacgctcaagtcagaggtggcgaaacccgacaggactataaagataccaggcgtttccccctggaagctccctcgtgcgctctcctgttccgaccctgccgcttaccggatacctgtccgcctttctcccttcgggaagcgtggcgctttctcatagctcacgctgtaggtatctcagttcggtgtaggtcgttcgctccaagctgggctgtgtgcacgaaccccccgttcagcccgaccgctgcgccttatccggtaactatcgtcttgagtccaacccggtaagacacgacttatcgccactggcagcagccactggtaacaggattagcagagcgaggtatgtaggcggtgctacagagttcttgaagtggtggcctaactacggctacactagaagaacagtatttggtatctgcgctctgctgaagccagttaccttcggaaaaagagttggtagctcttgatccggcaaacaaaccaccgctggtagcggtggtttttttgtttgcaagcagcagattacgcgcagaaaaaaaggatctcaagaagatcctttgatcttttctacggggtctgacactcagtggaacgaaaactcacgttaagggattttggtcatgagattatcaaaaaggatcttcacctagatccttttaaattaaaaatgaagttttaaatcaatctaaagtatatatgagtaaacttggtctgacagttaccaatgcttaatcagtgaggcacctatctcagcgatctgtctatttcgttcatccatagttgcctgactccccgtcgtgtagataactacgatacgggagggcttaccatctggccccagtgctgcaatgataccgcgagacccacgctcaccggctccagatttatcagcaataaaccagccagccggaagggccgagcgcagaagtggtcctgcaactttatccgcctccatccagtctattaattgttgccgggaagctagagtaagtagttcgccagttaatagtttgcgcaacgttgttgccattgctacaggcatcgtggtgtcacgctcgtcgtttggtatggcttcattcagctccggttcccaacgatcaaggcgagttacatgatcccccatgttgtgcaaaaaagcggttagctccttcggtcctccgatcgttgtcagaagtaagttggccgcagtgttatcactcatggttatggcagcactgcataattctcttactgtcatgccatccgtaagatgcttttctgtgactggtgagtactcaaccaagtcattctgagaatagtgtatgcggcgaccgagttgctc

SEQ ID NO: 384 - DNA, 10416 bp, synthetic construct
  source 1..10416: mol_type = other DNA
ttgcccggcgtcaatacgggataataccgcgccacatagcagaactttaaaagtgctcatcattggaaaacgttcttcggggcgaaaactctcaaggatcttaccgctgttgagatccagttcgatgtaacccactcgtgcacccaactgatcttcagcatcttttactttcaccagcgtttctgggtgagcaaaaacaggaaggcaaaatgccgcaaaaaagggaataagggcgacacggaaatgttgaatactcatactcttcctttttcaatattattgaagcatttatcagggttattgtctcatgagcggatacatatttgaatgtatttagaaaaataaacaaataggggttccgcgcacatttccccgaaaagtgccacctgacgtcgacggatcgggagatcgatctcccgatcccctagggtcgactctcagtacaatctgctctgatgccgcatagttaagccagtatctgctccctgcttgtgtgttggaggtcgctgagtagtgcgcgagcaaaatttaagctacaacaaggcaaggcttgaccgacaattgcatgaagaatctgcttagggttaggcgttttgcgctgcttcgcgatgtacgggccagatatacgcgttgacattgattattgactagttattaatagtaatcaattacggggtcattagttcatagcccatatatggagttccgcgttacataacttacggtaaatggcccgcctggctgaccgcccaacgacccccgcccattgacgtcaataatgacgtatgttcccatagtaacgccaatagggactttccattgacgtcaatgggtggagtatttacggtaaactgcccacttggcagtacatcaagtgtatcatatgccaagtacgccccctattgacgtcaatgacggtaaatggcccgcctggcattatgcccagtacatgaccttatgggactttcctacttggcagtacatctacgtattagtcatcgctattaccatggtgatgcggttttggcagtacatcaatgggcgtggatagcggtttgactcacggggatttccaagtctccaccccattgacgtcaatgggagtttgttttggcaccaaaatcaacgggactttccaaaatgtcgtaacaactccgccccattgacgcaaatgggcggtaggcgtgtacggtgggaggtctatataagcagagctggtttagtgaaccgtcagatccgctagagatccgcggccgctaatacgactcactatagggagagccgccaccatgaaacggacagccgacggaagcgagttcgagtcaccaaagaagaagcggaaagtcgctcttgattttctttctaggcttccattgccacctccagtttctccaatttgtacttttgtgtcacctgctgcacaaaaggcattccagcctccaaggtcatgcggatctggtggttcaagcggaggctcatctggcagcgaaactccgggcacttccgagtcagctactcctgagtctagcggcgggtcgtcaggagggtctggctataccagcgacgaggaggtgctggaagtcttccgcaacacactgaataagaatagcgagattttctcctccatcaagaagctcgagaagctctttaagaactttgacgagtacagctccgccgggattttcgtgaagaacgggccggcgatcagcaccatctccaaggacatctttggcgagtggaacgtcatcagggacaagtggaacgccgagtacgacgacatccacctgaagaagaaggcggtggtgaccgagaagtatgaggacgatcgcaggaagtccttcaaaaaaatcggctccttcagcctcgaacagctccaggagtatgccgatgcggatctgtccgtcgtcgagaagctgaaggaaatcatcattcagaaggtcgacgagatctataaagtgtacgggtccagcgagaagctgttcgacgccgactttgtgctcgagaagtccctcaaaaagaatgacgccgtggtggccattatgaaagacctgctcgactccgtgaagtccttcgaaaattacattaaagcgttctttggggaggggaaggaaactaacagggatgagtccttctatggcgactttgtcctcgcgtacgacatcctgctgaaggtcgaccacatttacgacgcgatccgcaactacgtgacacagaagccgtactccaaagacaagttcaagctgtacttccagaacccgcaatttatggggggctgggacaaggataaagagacagactaccgcgcgacaattctccgctatggctccaaatactatctggccatcatggacaagaagtacgcgaagtgcctgcagaagatcgacaaagacgacgtcaatggcaactatgaaaagatcaactacaagctgctgccgggcccgaacaagatgctcccgaaggtgttcttcagcaagaagtggatggcctactacaatccaagcgaggatattcagaaaatctataaaaacgggaccttcaagaagggggacatgtttaacctcaacgactgccacaagctcattgatttcttcaaggatagcatttcccgctacccgaaatggtccaatgcgtacgattttaacttctccgagacagaaaagtacaaagacatcgcgggcttttacagggaggtggaggagcaagggtataaagtttcttttgaatccgcgagcaagaaggaagtcgacaagctcgtcgaggagggcaagctctacatgttccaaatttataacaaggacttttccgacaagagccatgggaccccaaacctccacaccatgtacttcaaactgctctttgacgagaacaaccacgggcaaatcaggctgagcggcggcgccgaattattcatgcgcagggcctccctcaagaaggaagagctggtcgtccatccagccaattccccgatcgcgaacaagaacccggacaatccgaaaaagaccaccaccctgtcctacgacgtctacaaggacaaacgcttcagcgaagaccagtacgaattacacatcccaattgcgattaataagtgcccaaagaatatcttcaaaattaatacagaggtcagggtgctgctcaaacacgacgacaatccgtatgtcatcggcattgacaggggcgagcgcaatctgctctatatcgtggtcgtggatgggaagggcaatattgtggagcagtactccctgaacgagattatcaacaacttcaatgggattaggattaagaccgactatcacagcctgctcgacaagaaagaaaaagagaggtttgaggcccgccaaaactggacctccattgagaatatcaaagaattaaaggccggctatatttcccaagtcgtccacaagatctgcgagctggtggagaaatatgacgccgtgattgcgctcgaagacttaaattctgggttcaagaactcccgcgtgaaggtggaaaaacaggtgtatcagaaattcgagaaaatgctgatcgacaaactcaattatatggtggataagaagtccaacccgtgtgccacagggggcgcgctgaagggctatcagatcaccaacaagttcgagagcttcaagagcatgagcacccagaacgggtttattttctacatcccggcgtggctcacctccaagattgacccgagcaccggcttcgtgaacctcctgaagacaaagtatacctccattgccgacagcaagaagtttatctcctccttcgaccgcattatgtatgtgccggaggaggacctcttcgagttcgccctcgactacaaaaacttcagccgcacagatgcggattacatcaagaagtggaagctgtactcctacgggaacaggatccgcatcttcaggaatccaaaaaaaaataacgtctttgactgggaggaagtgtgcctgacatccgcctacaaggaactgttcaataaatacggcatcaattaccagcagggcgacattcgcgccctcctctgtgagcagtccgacaaagcgttttactccagcttcatggccctcatgtccctgatgctccaaatgaggaatagcatcacagggcgcaccgacgtcgacttcctcatcagcccggtgaagaactccgacgggatcttttacgactcccgcaactatgaggcgcaagagaatgcgatcctcccgaagaacgccgatgcgaacggggcctataatatcgccaggaaagtgctctgggccatcgggcagttcaaaaaggcggaggatgagaagctcgacaaggtgaaaattgccatttccaacaaggagtggctggagtacgcgcagacctccgtgaagcacggctcctctggcagctccggctctagcggctcctctggcagctccggctccaagctggagaagtttacaaactgttacagcctctccaaaaccctcaggtttaaagcgatcccggtgggcaagacccaggagaacatcgacaacaagaggctcctggtggaagacgagaagcgcgccgaagactacaagggcgtgaagaagctgctcgataggtactacctcagctttattaacgacgtgctgcacagcatcaaactcaagaatctcaacaactacatctccctcttccgcaaaaagacccgcaccgagaaggagaacaaggagctggagaacctggagatcaacctccgcaaggaaatcgccaaagcgttcaagggcaatgaagggtacaagagcctcttcaagaaagacatcatcgaaactatcctcccagagtttctcgatgacaaggacgagatcgcgctggtgaactcctttaacgggttcacaaccgcgtttaccggcttctttgataacagggaaaatatgttctccgaggaggccaagtccaccagcatcgccttcaggtgtatcaacgagaacctcacccgctacatttccaatatggacattttcgagaaggtggatgcgatcttcgataagcacgaggtgcaggagatcaaagagaagattctcaattccgattatgacgtcgaggatttcttcgaaggggagttctttaattttgtgctcacacaagagggcattgacgtgtacaacgcgattatcgggggcttcgtcacagagtccggggagaagattaaggggctgaatgagtacatcaatctgtacaatcagaagaccaagcagaaactgccgaaattcaagccgctctacaagcaagtcctgtccgatagggaaagcctctccttctacggcgagtctggtggttcaagcggaggctcatctggcagcgaaactccgggcacttccgagtcagctactcctgagtctagcggcgggtcgtcaggagggtctacacttaatattgaggatgaacatagattgcacgagacctctaaggaacctgatgtttctcttggatcaacttggttgtcagatttcccacaagcatgggcagagaccggaggtatgggtcttgctgttaggcaggcaccacttattattcctttgaaggcaacctctactcctgtgtcaattaagcaatatccaatgtctcaggaagctaggcttggaattaagcctcacattcaaagacttttggatcagggtattttggtgccatgtcaatcaccttggaacacaccacttttgcctgttaagaagcctggaactaatgattacagaccagtgcaagatttgagggaggttaacaagagagtggaagatattcacccaactgttccaaacccttataatcttttgtctggattgccaccttcacatcaatggtacactgtgcttgatttgaaggatgcatttttctgccttaggttgcatccaacatctcagcctctttttgctttcgagtggagagatcctgaaatgggaatttctggtcaacttacatggaccaggttgcctcagggtttcaagaactcaccaaccttgtttaatgaggcacttcacagggatttggctgattttaggattcaacatcctgatcttatccttttgcagtatgttgatgatcttttgcttgctgcaacttctgaattggattgtcaacagggaactagggcattgcttcaaacacttggaaatttgggttacagagcttcagcaaagaaggctcagatttgccaaaagcaggttaagtatcttggatacttgcttaaggaaggacaaaggtggttgaccgaggctagaaaggaaactgtgatgggtcaaccaacacctaagacccctaggcagcttagagagttcttgggaaaggcaggtttttgtaggcttttcattccaggatttgctgaaatggctgcaccactttatcctttgaccaagcctggaactttgtttaactggggtccagatcaacagaaggcataccaagaaattaagcaggctttgcttactgctccagcacttggtttgcctgatcttacaaagccatttgagttgttcgttgatgaaaagcaaggatatgcaaagggtgtgcttacccagaagttgggaccttggagaaggcctgttgcttacctttctaagaaacttgatccagtggctgcaggttggccaccttgtcttagaatggttgctgcaattgcagtgcttacaaaggatgctggaaagttgactatgggacaacctcttgttattttggcaccacacgctgttgaggcacttgtgaagcagccacctgataggtggttgtcaaacgcaagaatgacccattatcaagctcttcttttggatactgatagggtgcagttcggtcctgttgtggctttgaatccagcaacacttttgccacttcctgaggaaggattgcaacacaactgccttgatattttggctgaggcacatggtacaagacctgatcttaccgatcagccattgcctgatgctgatcacacttggtacacagatggatcttcacttttgcaagaaggacagaggaaggctggtgctgcagttactacagagactgaagtgatttgggctaaggcacttccagctggaacatctgctcaaagagcagagcttattgctttgacccaggcacttaagatggctgaaggaaagaagttgaacgtttacactgattctaggtatgctttcgcaacagctcatattcacggagaaatctatagaaggagaggatggttgacatcagagggaaaggaaattaagaacaaggatgaaattcttgcacttttgaaggctctttttcttcctaagagattgtctattattcattgcccaggacaccaaaagggtcattcagcagaagctaggggaaatagaatggctgatcaggctgcaagaaaggctgcaattactgagacacctgatacctctactcttttgatcgaaaactcttcaccaaattcaaggcttattaactctggcggctcaaaaagaaccgccgacggcagcgaattcgagcccaagaagaagaggaaagtcggaagcggagctactaacttcagcctgctgaagcaggctggagacgtggaggagaaccctggacctatggtgagcaagggcgaggagctgttcaccggggtggtgcccatcctggtcgagctggacggcgacgtaaacggccacaagttcagcgtgtccggcgagggcgagggcgatgccacctacggcaagctgaccctgaagttcatctgcaccaccggcaagctgcccgtgccctggcccaccctcgtgaccaccctgacctatggagtgcagtgcttcagccgctaccccgaccacatgaagcagcacgacttcttcaagtccgccatgcccgaaggctacgtccaggagcgcaccatcttcttcaaggacgacggcaactacaagacccgcgccgaggtgaagttcgagggcgacaccctggtgaaccgcatcgagctgaagggcatcgacttcaaggaggacggcaacatcctggggcacaagctggagtacaactacaacagccacaacgtctatatcatggccgacaagcagaagaacggcatcaaggtgaacttcaagatccgccacaacatcgaggacggcagcgtgcagctcgccgaccactaccagcagaacacccccatcggcgacggccccgtgctgctgcccgacaaccactacctgagcacccagtccgccctgagcaaagaccccaacgagaagcgcgatcacatggtcctgctggagttcgtgaccgccgccgggatcactctcggcatggacgagctgtacaagtctggtggttctcccaagaagaagaggaaagtctaaccggtcatcatcaccatcaccattgagtttaaacccgctgatcagcctcgactgtgccttctagttgccagccatctgttgtttgcccctcccccgtgccttccttgaccctggaaggtgccactcccactgtcctttcctaataaaatgaggaaattgcatcgcattgtctgagtaggtgtcattctattctggggggtggggtggggcaggacagcaagggggaggattgggaagacaatagcaggcatgctggggatgcggtgggctctatggcttctgaggcggaaagaaccagctggggctcgataccgtcgacctctagctagagcttggcgtaatcatggtcatagctgtttcctgtgtgaaattgttatccgctcacaattccacacaacatacgagccggaagcataaagtgtaaagcctagggtgcctaatgagtgagctaactcacattaattgcgttgcgctcactgcccgctttccagtcgggaaacctgtcgtgccagctgcattaatgaatcggccaacgcgcggggagaggcggtttgcgtattgggcgctcttccgcttcctcgctcactgactcgctgcgctcggtcgttcggctgcggcgagcggtatcagctcactcaaaggcggtaatacggttatccacagaatcaggggataacgcaggaaagaacatgtgagcaaaaggccagcaaaaggccaggaaccgtaaaaaggccgcgttgctggcgtttttccataggctccgcccccctgacgagcatcacaaaaatcgacgctcaagtcagaggtggcgaaacccgacaggactataaagataccaggcgtttccccctggaagctccctcgtgcgctctcctgttccgaccctgccgcttaccggatacctgtccgcctttctcccttcgggaagcgtggcgctttctcatagctcacgctgtaggtatctcagttcggtgtaggtcgttcgctccaagctgggctgtgtgcacgaaccccccgttcagcccgaccgctgcgccttatccggtaactatcgtcttgagtccaacccggtaagacacgacttatcgccactggcagcagccactggtaacaggattagcagagcgaggtatgtaggcggtgctacagagttcttgaagtggtggcctaactacggctacactagaagaacagtatttggtatctgcgctctgctgaagccagttaccttcggaaaaagagttggtagctcttgatccggcaaacaaaccaccgctggtagcggtggtttttttgtttgcaagcagcagattacgcgcagaaaaaaaggatctcaagaagatcctttgatcttttctacggggtctgacactcagtggaacgaaaactcacgttaagggattttggtcatgagattatcaaaaaggatcttcacctagatccttttaaattaaaaatgaagttttaaatcaatctaaagtatatatgagtaaacttggtctgacagttaccaatgcttaatcagtgaggcacctatctcagcgatctgtctatttcgttcatccatagttgcctgactccccgtcgtgtagataactacgatacgggagggcttaccatctggccccagtgctgcaatgataccgcgagacccacgctcaccggctccagatttatcagcaataaaccagccagccggaagggccgagcgcagaagtggtcctgcaactttatccgcctccatccagtctattaattgttgccgggaagctagagtaagtagttcgccagttaatagtttgcgcaacgttgttgccattgctacaggcatcgtggtgtcacgctcgtcgtttggtatggcttcattcagctccggttcccaacgatcaaggcgagttacatgatcccccatgttgtgcaaaaaagcggttagctccttcggtcctccgatcgttgtcagaagtaagttggccgcagtgttatcactcatggttatggcagcactgcataattctcttactgtcatgccatccgtaagatgcttttctgtgactggtgagtactcaaccaagtcattctgagaatagtgtatgcggcgaccgagttgctc

SEQ ID NO: 385 - DNA, 10416 bp, synthetic construct
  source 1..10416: mol_type = other DNA
ttgcccggcgtcaatacgggataataccgcgccacatagcagaactttaaaagtgctcatcattggaaaacgttcttcggggcgaaaactctcaaggatcttaccgctgttgagatccagttcgatgtaacccactcgtgcacccaactgatcttcagcatcttttactttcaccagcgtttctgggtgagcaaaaacaggaaggcaaaatgccgcaaaaaagggaataagggcgacacggaaatgttgaatactcatactcttcctttttcaatattattgaagcatttatcagggttattgtctcatgagcggatacatatttgaatgtatttagaaaaataaacaaataggggttccgcgcacatttccccgaaaagtgccacctgacgtcgacggatcgggagatcgatctcccgatcccctagggtcgactctcagtacaatctgctctgatgccgcatagttaagccagtatctgctccctgcttgtgtgttggaggtcgctgagtagtgcgcgagcaaaatttaagctacaacaaggcaaggcttgaccgacaattgcatgaagaatctgcttagggttaggcgttttgcgctgcttcgcgatgtacgggccagatatacgcgttgacattgattattgactagttattaatagtaatcaattacggggtcattagttcatagcccatatatggagttccgcgttacataacttacggtaaatggcccgcctggctgaccgcccaacgacccccgcccattgacgtcaataatgacgtatgttcccatagtaacgccaatagggactttccattgacgtcaatgggtggagtatttacggtaaactgcccacttggcagtacatcaagtgtatcatatgccaagtacgccccctattgacgtcaatgacggtaaatggcccgcctggcattatgcccagtacatgaccttatgggactttcctacttggcagtacatctacgtattagtcatcgctattaccatggtgatgcggttttggcagtacatcaatgggcgtggatagcggtttgactcacggggatttccaagtctccaccccattgacgtcaatgggagtttgttttggcaccaaaatcaacgggactttccaaaatgtcgtaacaactccgccccattgacgcaaatgggcggtaggcgtgtacggtgggaggtctatataagcagagctggtttagtgaaccgtcagatccgctagagatccgcggccgctaatacgactcactatagggagagccgccaccatgaaacggacagccgacggaagcgagttcgagtcaccaaagaagaagcggaaagtcgctcttgattttctttctaggcttccattgccacctccagtttctccaatttgtacttttgtgtcacctgctgcacaaaaggcattccagcctccaaggtcatgcggatctggtggttcaagcggaggctcatctggcagcgaaactccgggcacttccgagtcagctactcctgagtctagcggcgggtcgtcaggagggtcttccgacgggatcttttacgactcccgcaactatgaggcgcaagagaatgcgatcctcccgaagaacgccgatgcgaacggggcctataatatcgccaggaaagtgctctgggccatcgggcagttcaaaaaggcggaggatgagaagctcgacaaggtgaaaattgccatttccaacaaggagtggctggagtacgcgcagacctccgtgaagcacggctcctctggcagctccggctctagcggctcctctggcagctccggctccaagctggagaagtttacaaactgttacagcctctccaaaaccctcaggtttaaagcgatcccggtgggcaagacccaggagaacatcgacaacaagaggctcctggtggaagacgagaagcgcgccgaagactacaagggcgtgaagaagctgctcgataggtactacctcagctttattaacgacgtgctgcacagcatcaaactcaagaatctcaacaactacatctccctcttccgcaaaaagacccgcaccgagaaggagaacaaggagctggagaacctggagatcaacctccgcaaggaaatcgccaaagcgttcaagggcaatgaagggtacaagagcctcttcaagaaagacatcatcgaaactatcctcccagagtttctcgatgacaaggacgagatcgcgctggtgaactcctttaacgggttcacaaccgcgtttaccggcttctttgataacagggaaaatatgttctccgaggaggccaagtccaccagcatcgccttcaggtgtatcaacgagaacctcacccgctacatttccaatatggacattttcgagaaggtggatgcgatcttcgataagcacgaggtgcaggagatcaaagagaagattctcaattccgattatgacgtcgaggatttcttcgaaggggagttctttaattttgtgctcacacaagagggcattgacgtgtacaacgcgattatcgggggcttcgtcacagagtccggggagaagattaaggggctgaatgagtacatcaatctgtacaatcagaagaccaagcagaaactgccgaaattcaagccgctctacaagcaagtcctgtccgatagggaaagcctctccttctacggcgagggctataccagcgacgaggaggtgctggaagtcttccgcaacacactgaataagaatagcgagattttctcctccatcaagaagctcgagaagctctttaagaactttgacgagtacagctccgccgggattttcgtgaagaacgggccggcgatcagcaccatctccaaggacatctttggcgagtggaacgtcatcagggacaagtggaacgccgagtacgacgacatccacctgaagaagaaggcggtggtgaccgagaagtatgaggacgatcgcaggaagtccttcaaaaaaatcggctccttcagcctcgaacagctccaggagtatgccgatgcggatctgtccgtcgtcgagaagctgaaggaaatcatcattcagaaggtcgacgagatctataaagtgtacgggtccagcgagaagctgttcgacgccgactttgtgctcgagaagtccctcaaaaagaatgacgccgtggtggccattatgaaagacctgctcgactccgtgaagtccttcgaaaattacattaaagcgttctttggggaggggaaggaaactaacagggatgagtccttctatggcgactttgtcctcgcgtacgacatcctgctgaaggtcgaccacatttacgacgcgatccgcaactacgtgacacagaagccgtactccaaagacaagttcaagctgtacttccagaacccgcaatttatggggggctgggacaaggataaagagacagactaccgcgcgacaattctccgctatggctccaaatactatctggccatcatggacaagaagtacgcgaagtgcctgcagaagatcgacaaagacgacgtcaatggcaactatgaaaagatcaactacaagctgctgccgggcccgaacaagatgctcccgaaggtgttcttcagcaagaagtggatggcctactacaatccaagcgaggatattcagaaaatctataaaaacgggaccttcaagaagggggacatgtttaacctcaacgactgccacaagctcattgatttcttcaaggatagcatttcccgctacccgaaatggtccaatgcgtacgattttaacttctccgagacagaaaagtacaaagacatcgcgggcttttacagggaggtggaggagcaagggtataaagtttcttttgaatccgcgagcaagaaggaagtcgacaagctcgtcgaggagggcaagctctacatgttccaaatttataacaaggacttttccgacaagagccatgggaccccaaacctccacaccatgtacttcaaactgctctttgacgagaacaaccacgggcaaatcaggctgagcggcggcgccgaattattcatgcgcagggcctccctcaagaaggaagagctggtcgtccatccagccaattccccgatcgcgaacaagaacccggacaatccgaaaaagaccaccaccctgtcctacgacgtctacaaggacaaacgcttcagcgaagaccagtacgaattacacatcccaattgcgattaataagtgcccaaagaatatcttcaaaattaatacagaggtcagggtgctgctcaaacacgacgacaatccgtatgtcatcggcattgacaggggcgagcgcaatctgctctatatcgtggtcgtggatgggaagggcaatattgtggagcagtactccctgaacgagattatcaacaacttcaatgggattaggattaagaccgactatcacagcctgctcgacaagaaagaaaaagagaggtttgaggcccgccaaaactggacctccattgagaatatcaaagaattaaaggccggctatatttcccaagtcgtccacaagatctgcgagctggtggagaaatatgacgccgtgattgcgctcgaagacttaaattctgggttcaagaactcccgcgtgaaggtggaaaaacaggtgtatcagaaattcgagaaaatgctgatcgacaaactcaattatatggtggataagaagtccaacccgtgtgccacagggggcgcgctgaagggctatcagatcaccaacaagttcgagagcttcaagagcatgagcacccagaacgggtttattttctacatcccggcgtggctcacctccaagattgacccgagcaccggcttcgtgaacctcctgaagacaaagtatacctccattgccgacagcaagaagtttatctcctccttcgaccgcattatgtatgtgccggaggaggacctcttcgagttcgccctcgactacaaaaacttcagccgcacagatgcggattacatcaagaagtggaagctgtactcctacgggaacaggatccgcatcttcaggaatccaaaaaaaaataacgtctttgactgggaggaagtgtgcctgacatccgcctacaaggaactgttcaataaatacggcatcaattaccagcagggcgacattcgcgccctcctctgtgagcagtccgacaaagcgttttactccagcttcatggccctcatgtccctgatgctccaaatgaggaatagcatcacagggcgcaccgacgtcgacttcctcatcagcccggtgaagaactctggtggttcaagcggaggctcatctggcagcgaaactccgggcacttccgagtcagctactcctgagtctagcggcgggtcgtcaggagggtctacacttaatattgaggatgaacatagattgcacgagacctctaaggaacctgatgtttctcttggatcaacttggttgtcagatttcccacaagcatgggcagagaccggaggtatgggtcttgctgttaggcaggcaccacttattattcctttgaaggcaacctctactcctgtgtcaattaagcaatatccaatgtctcaggaagctaggcttggaattaagcctcacattcaaagacttttggatcagggtattttggtgccatgtcaatcaccttggaacacaccacttttgcctgttaagaagcctggaactaatgattacagaccagtgcaagatttgagggaggttaacaagagagtggaagatattcacccaactgttccaaacccttataatcttttgtctggattgccaccttcacatcaatggtacactgtgcttgatttgaaggatgcatttttctgccttaggttgcatccaacatctcagcctctttttgctttcgagtggagagatcctgaaatgggaatttctggtcaacttacatggaccaggttgcctcagggtttcaagaactcaccaaccttgtttaatgaggcacttcacagggatttggctgattttaggattcaacatcctgatcttatccttttgcagtatgttgatgatcttttgcttgctgcaacttctgaattggattgtcaacagggaactagggcattgcttcaaacacttggaaatttgggttacagagcttcagcaaagaaggctcagatttgccaaaagcaggttaagtatcttggatacttgcttaaggaaggacaaaggtggttgaccgaggctagaaaggaaactgtgatgggtcaaccaacacctaagacccctaggcagcttagagagttcttgggaaaggcaggtttttgtaggcttttcattccaggatttgctgaaatggctgcaccactttatcctttgaccaagcctggaactttgtttaactggggtccagatcaacagaaggcataccaagaaattaagcaggctttgcttactgctccagcacttggtttgcctgatcttacaaagccatttgagttgttcgttgatgaaaagcaaggatatgcaaagggtgtgcttacccagaagttgggaccttggagaaggcctgttgcttacctttctaagaaacttgatccagtggctgcaggttggccaccttgtcttagaatggttgctgcaattgcagtgcttacaaaggatgctggaaagttgactatgggacaacctcttgttattttggcaccacacgctgttgaggcacttgtgaagcagccacctgataggtggttgtcaaacgcaagaatgacccattatcaagctcttcttttggatactgatagggtgcagttcggtcctgttgtggctttgaatccagcaacacttttgccacttcctgaggaaggattgcaacacaactgccttgatattttggctgaggcacatggtacaagacctgatcttaccgatcagccattgcctgatgctgatcacacttggtacacagatggatcttcacttttgcaagaaggacagaggaaggctggtgctgcagttactacagagactgaagtgatttgggctaaggcacttccagctggaacatctgctcaaagagcagagcttattgctttgacccaggcacttaagatggctgaaggaaagaagttgaacgtttacactgattctaggtatgctttcgcaacagctcatattcacggagaaatctatagaaggagaggatggttgacatcagagggaaaggaaattaagaacaaggatgaaattcttgcacttttgaaggctctttttcttcctaagagattgtctattattcattgcccaggacaccaaaagggtcattcagcagaagctaggggaaatagaatggctgatcaggctgcaagaaaggctgcaattactgagacacctgatacctctactcttttgatcgaaaactcttcaccaaattcaaggcttattaactctggcggctcaaaaagaaccgccgacggcagcgaattcgagcccaagaagaagaggaaagtcggaagcggagctactaacttcagcctgctgaagcaggctggagacgtggaggagaaccctggacctatggtgagcaagggcgaggagctgttcaccggggtggtgcccatcctggtcgagctggacggcgacgtaaacggccacaagttcagcgtgtccggcgagggcgagggcgatgccacctacggcaagctgaccctgaagttcatctgcaccaccggcaagctgcccgtgccctggcccaccctcgtgaccaccctgacctatggagtgcagtgcttcagccgctaccccgaccacatgaagcagcacgacttcttcaagtccgccatgcccgaaggctacgtccaggagcgcaccatcttcttcaaggacgacggcaactacaagacccgcgccgaggtgaagttcgagggcgacaccctggtgaaccgcatcgagctgaagggcatcgacttcaaggaggacggcaacatcctggggcacaagctggagtacaactacaacagccacaacgtctatatcatggccgacaagcagaagaacggcatcaaggtgaacttcaagatccgccacaacatcgaggacggcagcgtgcagctcgccgaccactaccagcagaacacccccatcggcgacggccccgtgctgctgcccgacaaccactacctgagcacccagtccgccctgagcaaagaccccaacgagaagcgcgatcacatggtcctgctggagttcgtgaccgccgccgggatcactctcggcatggacgagctgtacaagtctggtggttctcccaagaagaagaggaaagtctaaccggtcatcatcaccatcaccattgagtttaaacccgctgatcagcctcgactgtgccttctagttgccagccatctgttgtttgcccctcccccgtgccttccttgaccctggaaggtgccactcccactgtcctttcctaataaaatgaggaaattgcatcgcattgtctgagtaggtgtcattctattctggggggtggggtggggcaggacagcaagggggaggattgggaagacaatagcaggcatgctggggatgcggtgggctctatggcttctgaggcggaaagaaccagctggggctcgataccgtcgacctctagctagagcttggcgtaatcatggtcatagctgtttcctgtgtgaaattgttatccgctcacaattccacacaacatacgagccggaagcataaagtgtaaagcctagggtgcctaatgagtgagctaactcacattaattgcgttgcgctcactgcccgctttccagtcgggaaacctgtcgtgccagctgcattaatgaatcggccaacgcgcggggagaggcggtttgcgtattgggcgctcttccgcttcctcgctcactgactcgctgcgctcggtcgttcggctgcggcgagcggtatcagctcactcaaaggcggtaatacggttatccacagaatcaggggataacgcaggaaagaacatgtgagcaaaaggccagcaaaaggccaggaaccgtaaaaaggccgcgttgctggcgtttttccataggctccgcccccctgacgagcatcacaaaaatcgacgctcaagtcagaggtggcgaaacccgacaggactataaagataccaggcgtttccccctggaagctccctcgtgcgctctcctgttccgaccctgccgcttaccggatacctgtccgcctttctcccttcgggaagcgtggcgctttctcatagctcacgctgtaggtatctcagttcggtgtaggtcgttcgctccaagctgggctgtgtgcacgaaccccccgttcagcccgaccgctgcgccttatccggtaactatcgtcttgagtccaacccggtaagacacgacttatcgccactggcagcagccactggtaacaggattagcagagcgaggtatgtaggcggtgctacagagttcttgaagtggtggcctaactacggctacactagaagaacagtatttggtatctgcgctctgctgaagccagttaccttcggaaaaagagttggtagctcttgatccggcaaacaaaccaccgctggtagcggtggtttttttgtttgcaagcagcagattacgcgcagaaaaaaaggatctcaagaagatcctttgatcttttctacggggtctgacactcagtggaacgaaaactcacgttaagggattttggtcatgagattatcaaaaaggatcttcacctagatccttttaaattaaaaatgaagttttaaatcaatctaaagtatatatgagtaaacttggtctgacagttaccaatgcttaatcagtgaggcacctatctcagcgatctgtctatttcgttcatccatagttgcctgactccccgtcgtgtagataactacgatacgggagggcttaccatctggccccagtgctgcaatgataccgcgagacccacgctcaccggctccagatttatcagcaataaaccagccagccggaagggccgagcgcagaagtggtcctgcaactttatccgcctccatccagtctattaattgttgccgggaagctagagtaagtagttcgccagttaatagtttgcgcaacgttgttgccattgctacaggcatcgtggtgtcacgctcgtcgtttggtatggcttcattcagctccggttcccaacgatcaaggcgagttacatgatcccccatgttgtgcaaaaaagcggttagctccttcggtcctccgatcgttgtcagaagtaagttggccgcagtgttatcactcatggttatggcagcactgcataattctcttactgtcatgccatccgtaagatgcttttctgtgactggtgagtactcaaccaagtcattctgagaatagtgtatgcggcgaccgagttgctc

SEQ ID NO: 386 - DNA, 10416 bp, synthetic construct
  source 1..10416: mol_type = other DNA
ttgcccggcgtcaatacgggataataccgcgccacatagcagaactttaaaagtgctcatcattggaaaacgttcttcggggcgaaaactctcaaggatcttaccgctgttgagatccagttcgatgtaacccactcgtgcacccaactgatcttcagcatcttttactttcaccagcgtttctgggtgagcaaaaacaggaaggcaaaatgccgcaaaaaagggaataagggcgacacggaaatgttgaatactcatactcttcctttttcaatattattgaagcatttatcagggttattgtctcatgagcggatacatatttgaatgtatttagaaaaataaacaaataggggttccgcgcacatttccccgaaaagtgccacctgacgtcgacggatcgggagatcgatctcccgatcccctagggtcgactctcagtacaatctgctctgatgccgcatagttaagccagtatctgctccctgcttgtgtgttggaggtcgctgagtagtgcgcgagcaaaatttaagctacaacaaggcaaggcttgaccgacaattgcatgaagaatctgcttagggttaggcgttttgcgctgcttcgcgatgtacgggccagatatacgcgttgacattgattattgactagttattaatagtaatcaattacggggtcattagttcatagcccatatatggagttccgcgttacataacttacggtaaatggcccgcctggctgaccgcccaacgacccccgcccattgacgtcaataatgacgtatgttcccatagtaacgccaatagggactttccattgacgtcaatgggtggagtatttacggtaaactgcccacttggcagtacatcaagtgtatcatatgccaagtacgccccctattgacgtcaatgacggtaaatggcccgcctggcattatgcccagtacatgaccttatgggactttcctacttggcagtacatctacgtattagtcatcgctattaccatggtgatgcggttttggcagtacatcaatgggcgtggatagcggtttgactcacggggatttccaagtctccaccccattgacgtcaatgggagtttgttttggcaccaaaatcaacgggactttccaaaatgtcgtaacaactccgccccattgacgcaaatgggcggtaggcgtgtacggtgggaggtctatataagcagagctggtttagtgaaccgtcagatccgctagagatccgcggccgctaatacgactcactatagggagagccgccaccatgaaacggacagccgacggaagcgagttcgagtcaccaaagaagaagcggaaagtcgctcttgattttctttctaggcttccattgccacctccagtttctccaatttgtacttttgtgtcacctgctgcacaaaaggcattccagcctccaaggtcatgcggatctggtggttcaagcggaggctcatctggcagcgaaactccgggcacttccgagtcagctactcctgagtctagcggcgggtcgtcaggagggtctaaagacaagttcaagctgtacttccagaacccgcaatttatggggggctgggacaaggataaagagacagactaccgcgcgacaattctccgctatggctccaaatactatctggccatcatggacaagaagtacgcgaagtgcctgcagaagatcgacaaagacgacgtcaatggcaactatgaaaagatcaactacaagctgctgccgggcccgaacaagatgctcccgaaggtgttcttcagcaagaagtggatggcctactacaatccaagcgaggatattcagaaaatctataaaaacgggaccttcaagaagggggacatgtttaacctcaacgactgccacaagctcattgatttcttcaaggatagcatttcccgctacccgaaatggtccaatgcgtacgattttaacttctccgagacagaaaagtacaaagacatcgcgggcttttacagggaggtggaggagcaagggtataaagtttcttttgaatccgcgagcaagaaggaagtcgacaagctcgtcgaggagggcaagctctacatgttccaaatttataacaaggacttttccgacaagagccatgggaccccaaacctccacaccatgtacttcaaactgctctttgacgagaacaaccacgggcaaatcaggctgagcggcggcgccgaattattcatgcgcagggcctccctcaagaaggaagagctggtcgtccatccagccaattccccgatcgcgaacaagaacccggacaatccgaaaaagaccaccaccctgtcctacgacgtctacaaggacaaacgcttcagcgaagaccagtacgaattacacatcccaattgcgattaataagtgcccaaagaatatcttcaaaattaatacagaggtcagggtgctgctcaaacacgacgacaatccgtatgtcatcggcattgacaggggcgagcgcaatctgctctatatcgtggtcgtggatgggaagggcaatattgtggagcagtactccctgaacgagattatcaacaacttcaatgggattaggattaagaccgactatcacagcctgctcgacaagaaagaaaaagagaggtttgaggcccgccaaaactggacctccattgagaatatcaaagaattaaaggccggctatatttcccaagtcgtccacaagatctgcgagctggtggagaaatatgacgccgtgattgcgctcgaagacttaaattctgggttcaagaactcccgcgtgaaggtggaaaaacaggtgtatcagaaattcgagaaaatgctgatcgacaaactcaattatatggtggataagaagtccaacccgtgtgccacagggggcgcgctgaagggctatcagatcaccaacaagttcgagagcttcaagagcatgagcacccagaacgggtttattttctacatcccggcgtggctcacctccaagattgacccgagcaccggcttcgtgaacctcctgaagacaaagtatacctccattgccgacagcaagaagtttatctcctccttcgaccgcattatgtatgtgccggaggaggacctcttcgagttcgccctcgactacaaaaacttcagccgcacagatgcggattacatcaagaagtggaagctgtactcctacgggaacaggatccgcatcttcaggaatccaaaaaaaaataacgtctttgactgggaggaagtgtgcctgacatccgcctacaaggaactgttcaataaatacggcatcaattaccagcagggcgacattcgcgccctcctctgtgagcagtccgacaaagcgttttactccagcttcatggccctcatgtccctgatgctccaaatgaggaatagcatcacagggcgcaccgacgtcgacttcctcatcagcccggtgaagaactccgacgggatcttttacgactcccgcaactatgaggcgcaagagaatgcgatcctcccgaagaacgccgatgcgaacggggcctataatatcgccaggaaagtgctctgggccatcgggcagttcaaaaaggcggaggatgagaagctcgacaaggtgaaaattgccatttccaacaaggagtggctggagtacgcgcagacctccgtgaagcacggctcctctggcagctccggctctagcggctcctctggcagctccggctccaagctggagaagtttacaaactgttacagcctctccaaaaccctcaggtttaaagcgatcccggtgggcaagacccaggagaacatcgacaacaagaggctcctggtggaagacgagaagcgcgccgaagactacaagggcgtgaagaagctgctcgataggtactacctcagctttattaacgacgtgctgcacagcatcaaactcaagaatctcaacaactacatctccctcttccgcaaaaagacccgcaccgagaaggagaacaaggagctggagaacctggagatcaacctccgcaaggaaatcgccaaagcgttcaagggcaatgaagggtacaagagcctcttcaagaaagacatcatcgaaactatcctcccagagtttctcgatgacaaggacgagatcgcgctggtgaactcctttaacgggttcacaaccgcgtttaccggcttctttgataacagggaaaatatgttctccgaggaggccaagtccaccagcatcgccttcaggtgtatcaacgagaacctcacccgctacatttccaatatggacattttcgagaaggtggatgcgatcttcgataagcacgaggtgcaggagatcaaagagaagattctcaattccgattatgacgtcgaggatttcttcgaaggggagttctttaattttgtgctcacacaagagggcattgacgtgtacaacgcgattatcgggggcttcgtcacagagtccggggagaagattaaggggctgaatgagtacatcaatctgtacaatcagaagaccaagcagaaactgccgaaattcaagccgctctacaagcaagtcctgtccgatagggaaagcctctccttctacggcgagggctataccagcgacgaggaggtgctggaagtcttccgcaacacactgaataagaatagcgagattttctcctccatcaagaagctcgagaagctctttaagaactttgacgagtacagctccgccgggattttcgtgaagaacgggccggcgatcagcaccatctccaaggacatctttggcgagtggaacgtcatcagggacaagtggaacgccgagtacgacgacatccacctgaagaagaaggcggtggtgaccgagaagtatgaggacgatcgcaggaagtccttcaaaaaaatcggctccttcagcctcgaacagctccaggagtatgccgatgcggatctgtccgtcgtcgagaagctgaaggaaatcatcattcagaaggtcgacgagatctataaagtgtacgggtccagcgagaagctgttcgacgccgactttgtgctcgagaagtccctcaaaaagaatgacgccgtggtggccattatgaaagacctgctcgactccgtgaagtccttcgaaaattacattaaagcgttctttggggaggggaaggaaactaacagggatgagtccttctatggcgactttgtcctcgcgtacgacatcctgctgaaggtcgaccacatttacgacgcgatccgcaactacgtgacacagaagccgtactcctctggtggttcaagcggaggctcatctggcagcgaaactccgggcacttccgagtcagctactcctgagtctagcggcgggtcgtcaggagggtctacacttaatattgaggatgaacatagattgcacgagacctctaaggaacctgatgtttctcttggatcaacttggttgtcagatttcccacaagcatgggcagagaccggaggtatgggtcttgctgttaggcaggcaccacttattattcctttgaaggcaacctctactcctgtgtcaattaagcaatatccaatgtctcaggaagctaggcttggaattaagcctcacattcaaagacttttggatcagggtattttggtgccatgtcaatcaccttggaacacaccacttttgcctgttaagaagcctggaactaatgattacagaccagtgcaagatttgagggaggttaacaagagagtggaagatattcacccaactgttccaaacccttataatcttttgtctggattgccaccttcacatcaatggtacactgtgcttgatttgaaggatgcatttttctgccttaggttgcatccaacatctcagcctctttttgctttcgagtggagagatcctgaaatgggaatttctggtcaacttacatggaccaggttgcctcagggtttcaagaactcaccaaccttgtttaatgaggcacttcacagggatttggctgattttaggattcaacatcctgatcttatccttttgcagtatgttgatgatcttttgcttgctgcaacttctgaattggattgtcaacagggaactagggcattgcttcaaacacttggaaatttgggttacagagcttcagcaaagaaggctcagatttgccaaaagcaggttaagtatcttggatacttgcttaaggaaggacaaaggtggttgaccgaggctagaaaggaaactgtgatgggtcaaccaacacctaagacccctaggcagcttagagagttcttgggaaaggcaggtttttgtaggcttttcattccaggatttgctgaaatggctgcaccactttatcctttgaccaagcctggaactttgtttaactggggtccagatcaacagaaggcataccaagaaattaagcaggctttgcttactgctccagcacttggtttgcctgatcttacaaagccatttgagttgttcgttgatgaaaagcaaggatatgcaaagggtgtgcttacccagaagttgggaccttggagaaggcctgttgcttacctttctaagaaacttgatccagtggctgcaggttggccaccttgtcttagaatggttgctgcaattgcagtgcttacaaaggatgctggaaagttgactatgggacaacctcttgttattttggcaccacacgctgttgaggcacttgtgaagcagccacctgataggtggttgtcaaacgcaagaatgacccattatcaagctcttcttttggatactgatagggtgcagttcggtcctgttgtggctttgaatccagcaacacttttgccacttcctgaggaaggattgcaacacaactgccttgatattttggctgaggcacatggtacaagacctgatcttaccgatcagccattgcctgatgctgatcacacttggtacacagatggatcttcacttttgcaagaaggacagaggaaggctggtgctgcagttactacagagactgaagtgatttgggctaaggcacttccagctggaacatctgctcaaagagcagagcttattgctttgacccaggcacttaagatggctgaaggaaagaagttgaacgtttacactgattctaggtatgctttcgcaacagctcatattcacggagaaatctatagaaggagaggatggttgacatcagagggaaaggaaattaagaacaaggatgaaattcttgcacttttgaaggctctttttcttcctaagagattgtctattattcattgcccaggacaccaaaagggtcattcagcagaagctaggggaaatagaatggctgatcaggctgcaagaaaggctgcaattactgagacacctgatacctctactcttttgatcgaaaactcttcaccaaattcaaggcttattaactctggcggctcaaaaagaaccgccgacggcagcgaattcgagcccaagaagaagaggaaagtcggaagcggagctactaacttcagcctgctgaagcaggctggagacgtggaggagaaccctggacctatggtgagcaagggcgaggagctgttcaccggggtggtgcccatcctggtcgagctggacggcgacgtaaacggccacaagttcagcgtgtccggcgagggcgagggcgatgccacctacggcaagctgaccctgaagttcatctgcaccaccggcaagctgcccgtgccctggcccaccctcgtgaccaccctgacctatggagtgcagtgcttcagccgctaccccgaccacatgaagcagcacgacttcttcaagtccgccatgcccgaaggctacgtccaggagcgcaccatcttcttcaaggacgacggcaactacaagacccgcgccgaggtgaagttcgagggcgacaccctggtgaaccgcatcgagctgaagggcatcgacttcaaggaggacggcaacatcctggggcacaagctggagtacaactacaacagccacaacgtctatatcatggccgacaagcagaagaacggcatcaaggtgaacttcaagatccgccacaacatcgaggacggcagcgtgcagctcgccgaccactaccagcagaacacccccatcggcgacggccccgtgctgctgcccgacaaccactacctgagcacccagtccgccctgagcaaagaccccaacgagaagcgcgatcacatggtcctgctggagttcgtgaccgccgccgggatcactctcggcatggacgagctgtacaagtctggtggttctcccaagaagaagaggaaagtctaaccggtcatcatcaccatcaccattgagtttaaacccgctgatcagcctcgactgtgccttctagttgccagccatctgttgtttgcccctcccccgtgccttccttgaccctggaaggtgccactcccactgtcctttcctaataaaatgaggaaattgcatcgcattgtctgagtaggtgtcattctattctggggggtggggtggggcaggacagcaagggggaggattgggaagacaatagcaggcatgctggggatgcggtgggctctatggcttctgaggcggaaagaaccagctggggctcgataccgtcgacctctagctagagcttggcgtaatcatggtcatagctgtttcctgtgtgaaattgttatccgctcacaattccacacaacatacgagccggaagcataaagtgtaaagcctagggtgcctaatgagtgagctaactcacattaattgcgttgcgctcactgcccgctttccagtcgggaaacctgtcgtgccagctgcattaatgaatcggccaacgcgcggggagaggcggtttgcgtattgggcgctcttccgcttcctcgctcactgactcgctgcgctcggtcgttcggctgcggcgagcggtatcagctcactcaaaggcggtaatacggttatccacagaatcaggggataacgcaggaaagaacatgtgagcaaaaggccagcaaaaggccaggaaccgtaaaaaggccgcgttgctggcgtttttccataggctccgcccccctgacgagcatcacaaaaatcgacgctcaagtcagaggtggcgaaacccgacaggactataaagataccaggcgtttccccctggaagctccctcgtgcgctctcctgttccgaccctgccgcttaccggatacctgtccgcctttctcccttcgggaagcgtggcgctttctcatagctcacgctgtaggtatctcagttcggtgtaggtcgttcgctccaagctgggctgtgtgcacgaaccccccgttcagcccgaccgctgcgccttatccggtaactatcgtcttgagtccaacccggtaagacacgacttatcgccactggcagcagccactggtaacaggattagcagagcgaggtatgtaggcggtgctacagagttcttgaagtggtggcctaactacggctacactagaagaacagtatttggtatctgcgctctgctgaagccagttaccttcggaaaaagagttggtagctcttgatccggcaaacaaaccaccgctggtagcggtggtttttttgtttgcaagcagcagattacgcgcagaaaaaaaggatctcaagaagatcctttgatcttttctacggggtctgacactcagtggaacgaaaactcacgttaagggattttggtcatgagattatcaaaaaggatcttcacctagatccttttaaattaaaaatgaagttttaaatcaatctaaagtatatatgagtaaacttggtctgacagttaccaatgcttaatcagtgaggcacctatctcagcgatctgtctatttcgttcatccatagttgcctgactccccgtcgtgtagataactacgatacgggagggcttaccatctggccccagtgctgcaatgataccgcgagacccacgctcaccggctccagatttatcagcaataaaccagccagccggaagggccgagcgcagaagtggtcctgcaactttatccgcctccatccagtctattaattgttgccgggaagctagagtaagtagttcgccagttaatagtttgcgcaacgttgttgccattgctacaggcatcgtggtgtcacgctcgtcgtttggtatggcttcattcagctccggttcccaacgatcaaggcgagttacatgatcccccatgttgtgcaaaaaagcggttagctccttcggtcctccgatcgttgtcagaagtaagttggccgcagtgttatcactcatggttatggcagcactgcataattctcttactgtcatgccatccgtaagatgcttttctgtgactggtgagtactcaaccaagtcattctgagaatagtgtatgcggcgaccgagttgctc

SEQ ID NO: 387 - DNA, 10416 bp, synthetic construct
  source 1..10416: mol_type = other DNA
ttgcccggcgtcaatacgggataataccgcgccacatagcagaactttaaaagtgctcatcattggaaaacgttcttcggggcgaaaactctcaaggatcttaccgctgttgagatccagttcgatgtaacccactcgtgcacccaactgatcttcagcatcttttactttcaccagcgtttctgggtgagcaaaaacaggaaggcaaaatgccgcaaaaaagggaataagggcgacacggaaatgttgaatactcatactcttcctttttcaatattattgaagcatttatcagggttattgtctcatgagcggatacatatttgaatgtatttagaaaaataaacaaataggggttccgcgcacatttccccgaaaagtgccacctgacgtcgacggatcgggagatcgatctcccgatcccctagggtcgactctcagtacaatctgctctgatgccgcatagttaagccagtatctgctccctgcttgtgtgttggaggtcgctgagtagtgcgcgagcaaaatttaagctacaacaaggcaaggcttgaccgacaattgcatgaagaatctgcttagggttaggcgttttgcgctgcttcgcgatgtacgggccagatatacgcgttgacattgattattgactagttattaatagtaatcaattacggggtcattagttcatagcccatatatggagttccgcgttacataacttacggtaaatggcccgcctggctgaccgcccaacgacccccgcccattgacgtcaataatgacgtatgttcccatagtaacgccaatagggactttccattgacgtcaatgggtggagtatttacggtaaactgcccacttggcagtacatcaagtgtatcatatgccaagtacgccccctattgacgtcaatgacggtaaatggcccgcctggcattatgcccagtacatgaccttatgggactttcctacttggcagtacatctacgtattagtcatcgctattaccatggtgatgcggttttggcagtacatcaatgggcgtggatagcggtttgactcacggggatttccaagtctccaccccattgacgtcaatgggagtttgttttggcaccaaaatcaacgggactttccaaaatgtcgtaacaactccgccccattgacgcaaatgggcggtaggcgtgtacggtgggaggtctatataagcagagctggtttagtgaaccgtcagatccgctagagatccgcggccgctaatacgactcactatagggagagccgccaccatgaaacggacagccgacggaagcgagttcgagtcaccaaagaagaagcggaaagtcgctcttgattttctttctaggcttccattgccacctccagtttctccaatttgtacttttgtgtcacctgctgcacaaaaggcattccagcctccaaggtcatgcggatctggtggttcaagcggaggctcatctggcagcgaaactccgggcacttccgagtcagctactcctgagtctagcggcgggtcgtcaggagggtctaagtccctcaaaaagaatgacgccgtggtggccattatgaaagacctgctcgactccgtgaagtccttcgaaaattacattaaagcgttctttggggaggggaaggaaactaacagggatgagtccttctatggcgactttgtcctcgcgtacgacatcctgctgaaggtcgaccacatttacgacgcgatccgcaactacgtgacacagaagccgtactccaaagacaagttcaagctgtacttccagaacccgcaatttatggggggctgggacaaggataaagagacagactaccgcgcgacaattctccgctatggctccaaatactatctggccatcatggacaagaagtacgcgaagtgcctgcagaagatcgacaaagacgacgtcaatggcaactatgaaaagatcaactacaagctgctgccgggcccgaacaagatgctcccgaaggtgttcttcagcaagaagtggatggcctactacaatccaagcgaggatattcagaaaatctataaaaacgggaccttcaagaagggggacatgtttaacctcaacgactgccacaagctcattgatttcttcaaggatagcatttcccgctacccgaaatggtccaatgcgtacgattttaacttctccgagacagaaaagtacaaagacatcgcgggcttttacagggaggtggaggagcaagggtataaagtttcttttgaatccgcgagcaagaaggaagtcgacaagctcgtcgaggagggcaagctctacatgttccaaatttataacaaggacttttccgacaagagccatgggaccccaaacctccacaccatgtacttcaaactgctctttgacgagaacaaccacgggcaaatcaggctgagcggcggcgccgaattattcatgcgcagggcctccctcaagaaggaagagctggtcgtccatccagccaattccccgatcgcgaacaagaacccggacaatccgaaaaagaccaccaccctgtcctacgacgtctacaaggacaaacgcttcagcgaagaccagtacgaattacacatcccaattgcgattaataagtgcccaaagaatatcttcaaaattaatacagaggtcagggtgctgctcaaacacgacgacaatccgtatgtcatcggcattgacaggggcgagcgcaatctgctctatatcgtggtcgtggatgggaagggcaatattgtggagcagtactccctgaacgagattatcaacaacttcaatgggattaggattaagaccgactatcacagcctgctcgacaagaaagaaaaagagaggtttgaggcccgccaaaactggacctccattgagaatatcaaagaattaaaggccggctatatttcccaagtcgtccacaagatctgcgagctggtggagaaatatgacgccgtgattgcgctcgaagacttaaattctgggttcaagaactcccgcgtgaaggtggaaaaacaggtgtatcagaaattcgagaaaatgctgatcgacaaactcaattatatggtggataagaagtccaacccgtgtgccacagggggcgcgctgaagggctatcagatcaccaacaagttcgagagcttcaagagcatgagcacccagaacgggtttattttctacatcccggcgtggctcacctccaagattgacccgagcaccggcttcgtgaacctcctgaagacaaagtatacctccattgccgacagcaagaagtttatctcctccttcgaccgcattatgtatgtgccggaggaggacctcttcgagttcgccctcgactacaaaaacttcagccgcacagatgcggattacatcaagaagtggaagctgtactcctacgggaacaggatccgcatcttcaggaatccaaaaaaaaataacgtctttgactgggaggaagtgtgcctgacatccgcctacaaggaactgttcaataaatacggcatcaattaccagcagggcgacattcgcgccctcctctgtgagcagtccgacaaagcgttttactccagcttcatggccctcatgtccctgatgctccaaatgaggaatagcatcacagggcgcaccgacgtcgacttcctcatcagcccggtgaagaactccgacgggatcttttacgactcccgcaactatgaggcgcaagagaatgcgatcctcccgaagaacgccgatgcgaacggggcctataatatcgccaggaaagtgctctgggccatcgggcagttcaaaaaggcggaggatgagaagctcgacaaggtgaaaattgccatttccaacaaggagtggctggagtacgcgcagacctccgtgaagcacggctcctctggcagctccggctctagcggctcctctggcagctccggctccaagctggagaagtttacaaactgttacagcctctccaaaaccctcaggtttaaagcgatcccggtgggcaagacccaggagaacatcgacaacaagaggctcctggtggaagacgagaagcgcgccgaagactacaagggcgtgaagaagctgctcgataggtactacctcagctttattaacgacgtgctgcacagcatcaaactcaagaatctcaacaactacatctccctcttccgcaaaaagacccgcaccgagaaggagaacaaggagctggagaacctggagatcaacctccgcaaggaaatcgccaaagcgttcaagggcaatgaagggtacaagagcctcttcaagaaagacatcatcgaaactatcctcccagagtttctcgatgacaaggacgagatcgcgctggtgaactcctttaacgggttcacaaccgcgtttaccggcttctttgataacagggaaaatatgttctccgaggaggccaagtccaccagcatcgccttcaggtgtatcaacgagaacctcacccgctacatttccaatatggacattttcgagaaggtggatgcgatcttcgataagcacgaggtgcaggagatcaaagagaagattctcaattccgattatgacgtcgaggatttcttcgaaggggagttctttaattttgtgctcacacaagagggcattgacgtgtacaacgcgattatcgggggcttcgtcacagagtccggggagaagattaaggggctgaatgagtacatcaatctgtacaatcagaagaccaagcagaaactgccgaaattcaagccgctctacaagcaagtcctgtccgatagggaaagcctctccttctacggcgagggctataccagcgacgaggaggtgctggaagtcttccgcaacacactgaataagaatagcgagattttctcctccatcaagaagctcgagaagctctttaagaactttgacgagtacagctccgccgggattttcgtgaagaacgggccggcgatcagcaccatctccaaggacatctttggcgagtggaacgtcatcagggacaagtggaacgccgagtacgacgacatccacctgaagaagaaggcggtggtgaccgagaagtatgaggacgatcgcaggaagtccttcaaaaaaatcggctccttcagcctcgaacagctccaggagtatgccgatgcggatctgtccgtcgtcgagaagctgaaggaaatcatcattcagaaggtcgacgagatctataaagtgtacgggtccagcgagaagctgttcgacgccgactttgtgctcgagtctggtggttcaagcggaggctcatctggcagcgaaactccgggcacttccgagtcagctactcctgagtctagcggcgggtcgtcaggagggtctacacttaatattgaggatgaacatagattgcacgagacctctaaggaacctgatgtttctcttggatcaacttggttgtcagatttcccacaagcatgggcagagaccggaggtatgggtcttgctgttaggcaggcaccacttattattcctttgaaggcaacctctactcctgtgtcaattaagcaatatccaatgtctcaggaagctaggcttggaattaagcctcacattcaaagacttttggatcagggtattttggtgccatgtcaatcaccttggaacacaccacttttgcctgttaagaagcctggaactaatgattacagaccagtgcaagatttgagggaggttaacaagagagtggaagatattcacccaactgttccaaacccttataatcttttgtctggattgccaccttcacatcaatggtacactgtgcttgatttgaaggatgcatttttctgccttaggttgcatccaacatctcagcctctttttgctttcgagtggagagatcctgaaatgggaatttctggtcaacttacatggaccaggttgcctcagggtttcaagaactcaccaaccttgtttaatgaggcacttcacagggatttggctgattttaggattcaacatcctgatcttatccttttgcagtatgttgatgatcttttgcttgctgcaacttctgaattggattgtcaacagggaactagggcattgcttcaaacacttggaaatttgggttacagagcttcagcaaagaaggctcagatttgccaaaagcaggttaagtatcttggatacttgcttaaggaaggacaaaggtggttgaccgaggctagaaaggaaactgtgatgggtcaaccaacacctaagacccctaggcagcttagagagttcttgggaaaggcaggtttttgtaggcttttcattccaggatttgctgaaatggctgcaccactttatcctttgaccaagcctggaactttgtttaactggggtccagatcaacagaaggcataccaagaaattaagcaggctttgcttactgctccagcacttggtttgcctgatcttacaaagccatttgagttgttcgttgatgaaaagcaaggatatgcaaagggtgtgcttacccagaagttgggaccttggagaaggcctgttgcttacctttctaagaaacttgatccagtggctgcaggttggccaccttgtcttagaatggttgctgcaattgcagtgcttacaaaggatgctggaaagttgactatgggacaacctcttgttattttggcaccacacgctgttgaggcacttgtgaagcagccacctgataggtggttgtcaaacgcaagaatgacccattatcaagctcttcttttggatactgatagggtgcagttcggtcctgttgtggctttgaatccagcaacacttttgccacttcctgaggaaggattgcaacacaactgccttgatattttggctgaggcacatggtacaagacctgatcttaccgatcagccattgcctgatgctgatcacacttggtacacagatggatcttcacttttgcaagaaggacagaggaaggctggtgctgcagttactacagagactgaagtgatttgggctaaggcacttccagctggaacatctgctcaaagagcagagcttattgctttgacccaggcacttaagatggctgaaggaaagaagttgaacgtttacactgattctaggtatgctttcgcaacagctcatattcacggagaaatctatagaaggagaggatggttgacatcagagggaaaggaaattaagaacaaggatgaaattcttgcacttttgaaggctctttttcttcctaagagattgtctattattcattgcccaggacaccaaaagggtcattcagcagaagctaggggaaatagaatggctgatcaggctgcaagaaaggctgcaattactgagacacctgatacctctactcttttgatcgaaaactcttcaccaaattcaaggcttattaactctggcggctcaaaaagaaccgccgacggcagcgaattcgagcccaagaagaagaggaaagtcggaagcggagctactaacttcagcctgctgaagcaggctggagacgtggaggagaaccctggacctatggtgagcaagggcgaggagctgttcaccggggtggtgcccatcctggtcgagctggacggcgacgtaaacggccacaagttcagcgtgtccggcgagggcgagggcgatgccacctacggcaagctgaccctgaagttcatctgcaccaccggcaagctgcccgtgccctggcccaccctcgtgaccaccctgacctatggagtgcagtgcttcagccgctaccccgaccacatgaagcagcacgacttcttcaagtccgccatgcccgaaggctacgtccaggagcgcaccatcttcttcaaggacgacggcaactacaagacccgcgccgaggtgaagttcgagggcgacaccctggtgaaccgcatcgagctgaagggcatcgacttcaaggaggacggcaacatcctggggcacaagctggagtacaactacaacagccacaacgtctatatcatggccgacaagcagaagaacggcatcaaggtgaacttcaagatccgccacaacatcgaggacggcagcgtgcagctcgccgaccactaccagcagaacacccccatcggcgacggccccgtgctgctgcccgacaaccactacctgagcacccagtccgccctgagcaaagaccccaacgagaagcgcgatcacatggtcctgctggagttcgtgaccgccgccgggatcactctcggcatggacgagctgtacaagtctggtggttctcccaagaagaagaggaaagtctaaccggtcatcatcaccatcaccattgagtttaaacccgctgatcagcctcgactgtgccttctagttgccagccatctgttgtttgcccctcccccgtgccttccttgaccctggaaggtgccactcccactgtcctttcctaataaaatgaggaaattgcatcgcattgtctgagtaggtgtcattctattctggggggtggggtggggcaggacagcaagggggaggattgggaagacaatagcaggcatgctggggatgcggtgggctctatggcttctgaggcggaaagaaccagctggggctcgataccgtcgacctctagctagagcttggcgtaatcatggtcatagctgtttcctgtgtgaaattgttatccgctcacaattccacacaacatacgagccggaagcataaagtgtaaagcctagggtgcctaatgagtgagctaactcacattaattgcgttgcgctcactgcccgctttccagtcgggaaacctgtcgtgccagctgcattaatgaatcggccaacgcgcggggagaggcggtttgcgtattgggcgctcttccgcttcctcgctcactgactcgctgcgctcggtcgttcggctgcggcgagcggtatcagctcactcaaaggcggtaatacggttatccacagaatcaggggataacgcaggaaagaacatgtgagcaaaaggccagcaaaaggccaggaaccgtaaaaaggccgcgttgctggcgtttttccataggctccgcccccctgacgagcatcacaaaaatcgacgctcaagtcagaggtggcgaaacccgacaggactataaagataccaggcgtttccccctggaagctccctcgtgcgctctcctgttccgaccctgccgcttaccggatacctgtccgcctttctcccttcgggaagcgtggcgctttctcatagctcacgctgtaggtatctcagttcggtgtaggtcgttcgctccaagctgggctgtgtgcacgaaccccccgttcagcccgaccgctgcgccttatccggtaactatcgtcttgagtccaacccggtaagacacgacttatcgccactggcagcagccactggtaacaggattagcagagcgaggtatgtaggcggtgctacagagttcttgaagtggtggcctaactacggctacactagaagaacagtatttggtatctgcgctctgctgaagccagttaccttcggaaaaagagttggtagctcttgatccggcaaacaaaccaccgctggtagcggtggtttttttgtttgcaagcagcagattacgcgcagaaaaaaaggatctcaagaagatcctttgatcttttctacggggtctgacactcagtggaacgaaaactcacgttaagggattttggtcatgagattatcaaaaaggatcttcacctagatccttttaaattaaaaatgaagttttaaatcaatctaaagtatatatgagtaaacttggtctgacagttaccaatgcttaatcagtgaggcacctatctcagcgatctgtctatttcgttcatccatagttgcctgactccccgtcgtgtagataactacgatacgggagggcttaccatctggccccagtgctgcaatgataccgcgagacccacgctcaccggctccagatttatcagcaataaaccagccagccggaagggccgagcgcagaagtggtcctgcaactttatccgcctccatccagtctattaattgttgccgggaagctagagtaagtagttcgccagttaatagtttgcgcaacgttgttgccattgctacaggcatcgtggtgtcacgctcgtcgtttggtatggcttcattcagctccggttcccaacgatcaaggcgagttacatgatcccccatgttgtgcaaaaaagcggttagctccttcggtcctccgatcgttgtcagaagtaagttggccgcagtgttatcactcatggttatggcagcactgcataattctcttactgtcatgccatccgtaagatgcttttctgtgactggtgagtactcaaccaagtcattctgagaatagtgtatgcggcgaccgagttgctc

SEQ ID NO: 388 - DNA, 10416 bp, synthetic construct
  source 1..10416: mol_type = other DNA
ttgcccggcgtcaatacgggataataccgcgccacatagcagaactttaaaagtgctcatcattggaaaacgttcttcggggcgaaaactctcaaggatcttaccgctgttgagatccagttcgatgtaacccactcgtgcacccaactgatcttcagcatcttttactttcaccagcgtttctgggtgagcaaaaacaggaaggcaaaatgccgcaaaaaagggaataagggcgacacggaaatgttgaatactcatactcttcctttttcaatattattgaagcatttatcagggttattgtctcatgagcggatacatatttgaatgtatttagaaaaataaacaaataggggttccgcgcacatttccccgaaaagtgccacctgacgtcgacggatcgggagatcgatctcccgatcccctagggtcgactctcagtacaatctgctctgatgccgcatagttaagccagtatctgctccctgcttgtgtgttggaggtcgctgagtagtgcgcgagcaaaatttaagctacaacaaggcaaggcttgaccgacaattgcatgaagaatctgcttagggttaggcgttttgcgctgcttcgcgatgtacgggccagatatacgcgttgacattgattattgactagttattaatagtaatcaattacggggtcattagttcatagcccatatatggagttccgcgttacataacttacggtaaatggcccgcctggctgaccgcccaacgacccccgcccattgacgtcaataatgacgtatgttcccatagtaacgccaatagggactttccattgacgtcaatgggtggagtatttacggtaaactgcccacttggcagtacatcaagtgtatcatatgccaagtacgccccctattgacgtcaatgacggtaaatggcccgcctggcattatgcccagtacatgaccttatgggactttcctacttggcagtacatctacgtattagtcatcgctattaccatggtgatgcggttttggcagtacatcaatgggcgtggatagcggtttgactcacggggatttccaagtctccaccccattgacgtcaatgggagtttgttttggcaccaaaatcaacgggactttccaaaatgtcgtaacaactccgccccattgacgcaaatgggcggtaggcgtgtacggtgggaggtctatataagcagagctggtttagtgaaccgtcagatccgctagagatccgcggccgctaatacgactcactatagggagagccgccaccatgaaacggacagccgacggaagcgagttcgagtcaccaaagaagaagcggaaagtcgctcttgattttctttctaggcttccattgccacctccagtttctccaatttgtacttttgtgtcacctgctgcacaaaaggcattccagcctccaaggtcatgcggatctggtggttcaagcggaggctcatctggcagcgaaactccgggcacttccgagtcagctactcctgagtctagcggcgggtcgtcaggagggtcttccgacaaagcgttttactccagcttcatggccctcatgtccctgatgctccaaatgaggaatagcatcacagggcgcaccgacgtcgacttcctcatcagcccggtgaagaactccgacgggatcttttacgactcccgcaactatgaggcgcaagagaatgcgatcctcccgaagaacgccgatgcgaacggggcctataatatcgccaggaaagtgctctgggccatcgggcagttcaaaaaggcggaggatgagaagctcgacaaggtgaaaattgccatttccaacaaggagtggctggagtacgcgcagacctccgtgaagcacggctcctctggcagctccggctctagcggctcctctggcagctccggctccaagctggagaagtttacaaactgttacagcctctccaaaaccctcaggtttaaagcgatcccggtgggcaagacccaggagaacatcgacaacaagaggctcctggtggaagacgagaagcgcgccgaagactacaagggcgtgaagaagctgctcgataggtactacctcagctttattaacgacgtgctgcacagcatcaaactcaagaatctcaacaactacatctccctcttccgcaaaaagacccgcaccgagaaggagaacaaggagctggagaacctggagatcaacctccgcaaggaaatcgccaaagcgttcaagggcaatgaagggtacaagagcctcttcaagaaagacatcatcgaaactatcctcccagagtttctcgatgacaaggacgagatcgcgctggtgaactcctttaacgggttcacaaccgcgtttaccggcttctttgataacagggaaaatatgttctccgaggaggccaagtccaccagcatcgccttcaggtgtatcaacgagaacctcacccgctacatttccaatatggacattttcgagaaggtggatgcgatcttcgataagcacgaggtgcaggagatcaaagagaagattctcaattccgattatgacgtcgaggatttcttcgaaggggagttctttaattttgtgctcacacaagagggcattgacgtgtacaacgcgattatcgggggcttcgtcacagagtccggggagaagattaaggggctgaatgagtacatcaatctgtacaatcagaagaccaagcagaaactgccgaaattcaagccgctctacaagcaagtcctgtccgatagggaaagcctctccttctacggcgagggctataccagcgacgaggaggtgctggaagtcttccgcaacacactgaataagaatagcgagattttctcctccatcaagaagctcgagaagctctttaagaactttgacgagtacagctccgccgggattttcgtgaagaacgggccggcgatcagcaccatctccaaggacatctttggcgagtggaacgtcatcagggacaagtggaacgccgagtacgacgacatccacctgaagaagaaggcggtggtgaccgagaagtatgaggacgatcgcaggaagtccttcaaaaaaatcggctccttcagcctcgaacagctccaggagtatgccgatgcggatctgtccgtcgtcgagaagctgaaggaaatcatcattcagaaggtcgacgagatctataaagtgtacgggtccagcgagaagctgttcgacgccgactttgtgctcgagaagtccctcaaaaagaatgacgccgtggtggccattatgaaagacctgctcgactccgtgaagtccttcgaaaattacattaaagcgttctttggggaggggaaggaaactaacagggatgagtccttctatggcgactttgtcctcgcgtacgacatcctgctgaaggtcgaccacatttacgacgcgatccgcaactacgtgacacagaagccgtactccaaagacaagttcaagctgtacttccagaacccgcaatttatggggggctgggacaaggataaagagacagactaccgcgcgacaattctccgctatggctccaaatactatctggccatcatggacaagaagtacgcgaagtgcctgcagaagatcgacaaagacgacgtcaatggcaactatgaaaagatcaactacaagctgctgccgggcccgaacaagatgctcccgaaggtgttcttcagcaagaagtggatggcctactacaatccaagcgaggatattcagaaaatctataaaaacgggaccttcaagaagggggacatgtttaacctcaacgactgccacaagctcattgatttcttcaaggatagcatttcccgctacccgaaatggtccaatgcgtacgattttaacttctccgagacagaaaagtacaaagacatcgcgggcttttacagggaggtggaggagcaagggtataaagtttcttttgaatccgcgagcaagaaggaagtcgacaagctcgtcgaggagggcaagctctacatgttccaaatttataacaaggacttttccgacaagagccatgggaccccaaacctccacaccatgtacttcaaactgctctttgacgagaacaaccacgggcaaatcaggctgagcggcggcgccgaattattcatgcgcagggcctccctcaagaaggaagagctggtcgtccatccagccaattccccgatcgcgaacaagaacccggacaatccgaaaaagaccaccaccctgtcctacgacgtctacaaggacaaacgcttcagcgaagaccagtacgaattacacatcccaattgcgattaataagtgcccaaagaatatcttcaaaattaatacagaggtcagggtgctgctcaaacacgacgacaatccgtatgtcatcggcattgacaggggcgagcgcaatctgctctatatcgtggtcgtggatgggaagggcaatattgtggagcagtactccctgaacgagattatcaacaacttcaatgggattaggattaagaccgactatcacagcctgctcgacaagaaagaaaaagagaggtttgaggcccgccaaaactggacctccattgagaatatcaaagaattaaaggccggctatatttcccaagtcgtccacaagatctgcgagctggtggagaaatatgacgccgtgattgcgctcgaagacttaaattctgggttcaagaactcccgcgtgaaggtggaaaaacaggtgtatcagaaattcgagaaaatgctgatcgacaaactcaattatatggtggataagaagtccaacccgtgtgccacagggggcgcgctgaagggctatcagatcaccaacaagttcgagagcttcaagagcatgagcacccagaacgggtttattttctacatcccggcgtggctcacctccaagattgacccgagcaccggcttcgtgaacctcctgaagacaaagtatacctccattgccgacagcaagaagtttatctcctccttcgaccgcattatgtatgtgccggaggaggacctcttcgagttcgccctcgactacaaaaacttcagccgcacagatgcggattacatcaagaagtggaagctgtactcctacgggaacaggatccgcatcttcaggaatccaaaaaaaaataacgtctttgactgggaggaagtgtgcctgacatccgcctacaaggaactgttcaataaatacggcatcaattaccagcagggcgacattcgcgccctcctctgtgagcagtctggtggttcaagcggaggctcatctggcagcgaaactccgggcacttccgagtcagctactcctgagtctagcggcgggtcgtcaggagggtctacacttaatattgaggatgaacatagattgcacgagacctctaaggaacctgatgtttctcttggatcaacttggttgtcagatttcccacaagcatgggcagagaccggaggtatgggtcttgctgttaggcaggcaccacttattattcctttgaaggcaacctctactcctgtgtcaattaagcaatatccaatgtctcaggaagctaggcttggaattaagcctcacattcaaagacttttggatcagggtattttggtgccatgtcaatcaccttggaacacaccacttttgcctgttaagaagcctggaactaatgattacagaccagtgcaagatttgagggaggttaacaagagagtggaagatattcacccaactgttccaaacccttataatcttttgtctggattgccaccttcacatcaatggtacactgtgcttgatttgaaggatgcatttttctgccttaggttgcatccaacatctcagcctctttttgctttcgagtggagagatcctgaaatgggaatttctggtcaacttacatggaccaggttgcctcagggtttcaagaactcaccaaccttgtttaatgaggcacttcacagggatttggctgattttaggattcaacatcctgatcttatccttttgcagtatgttgatgatcttttgcttgctgcaacttctgaattggattgtcaacagggaactagggcattgcttcaaacacttggaaatttgggttacagagcttcagcaaagaaggctcagatttgccaaaagcaggttaagtatcttggatacttgcttaaggaaggacaaaggtggttgaccgaggctagaaaggaaactgtgatgggtcaaccaacacctaagacccctaggcagcttagagagttcttgggaaaggcaggtttttgtaggcttttcattccaggatttgctgaaatggctgcaccactttatcctttgaccaagcctggaactttgtttaactggggtccagatcaacagaaggcataccaagaaattaagcaggctttgcttactgctccagcacttggtttgcctgatcttacaaagccatttgagttgttcgttgatgaaaagcaaggatatgcaaagggtgtgcttacccagaagttgggaccttggagaaggcctgttgcttacctttctaagaaacttgatccagtggctgcaggttggccaccttgtcttagaatggttgctgcaattgcagtgcttacaaaggatgctggaaagttgactatgggacaacctcttgttattttggcaccacacgctgttgaggcacttgtgaagcagccacctgataggtggttgtcaaacgcaagaatgacccattatcaagctcttcttttggatactgatagggtgcagttcggtcctgttgtggctttgaatccagcaacacttttgccacttcctgaggaaggattgcaacacaactgccttgatattttggctgaggcacatggtacaagacctgatcttaccgatcagccattgcctgatgctgatcacacttggtacacagatggatcttcacttttgcaagaaggacagaggaaggctggtgctgcagttactacagagactgaagtgatttgggctaaggcacttccagctggaacatctgctcaaagagcagagcttattgctttgacccaggcacttaagatggctgaaggaaagaagttgaacgtttacactgattctaggtatgctttcgcaacagctcatattcacggagaaatctatagaaggagaggatggttgacatcagagggaaaggaaattaagaacaaggatgaaattcttgcacttttgaaggctctttttcttcctaagagattgtctattattcattgcccaggacaccaaaagggtcattcagcagaagctaggggaaatagaatggctgatcaggctgcaagaaaggctgcaattactgagacacctgatacctctactcttttgatcgaaaactcttcaccaaattcaaggcttattaactctggcggctcaaaaagaaccgccgacggcagcgaattcgagcccaagaagaagaggaaagtcggaagcggagctactaacttcagcctgctgaagcaggctggagacgtggaggagaaccctggacctatggtgagcaagggcgaggagctgttcaccggggtggtgcccatcctggtcgagctggacggcgacgtaaacggccacaagttcagcgtgtccggcgagggcgagggcgatgccacctacggcaagctgaccctgaagttcatctgcaccaccggcaagctgcccgtgccctggcccaccctcgtgaccaccctgacctatggagtgcagtgcttcagccgctaccccgaccacatgaagcagcacgacttcttcaagtccgccatgcccgaaggctacgtccaggagcgcaccatcttcttcaaggacgacggcaactacaagacccgcgccgaggtgaagttcgagggcgacaccctggtgaaccgcatcgagctgaagggcatcgacttcaaggaggacggcaacatcctggggcacaagctggagtacaactacaacagccacaacgtctatatcatggccgacaagcagaagaacggcatcaaggtgaacttcaagatccgccacaacatcgaggacggcagcgtgcagctcgccgaccactaccagcagaacacccccatcggcgacggccccgtgctgctgcccgacaaccactacctgagcacccagtccgccctgagcaaagaccccaacgagaagcgcgatcacatggtcctgctggagttcgtgaccgccgccgggatcactctcggcatggacgagctgtacaagtctggtggttctcccaagaagaagaggaaagtctaaccggtcatcatcaccatcaccattgagtttaaacccgctgatcagcctcgactgtgccttctagttgccagccatctgttgtttgcccctcccccgtgccttccttgaccctggaaggtgccactcccactgtcctttcctaataaaatgaggaaattgcatcgcattgtctgagtaggtgtcattctattctggggggtggggtggggcaggacagcaagggggaggattgggaagacaatagcaggcatgctggggatgcggtgggctctatggcttctgaggcggaaagaaccagctggggctcgataccgtcgacctctagctagagcttggcgtaatcatggtcatagctgtttcctgtgtgaaattgttatccgctcacaattccacacaacatacgagccggaagcataaagtgtaaagcctagggtgcctaatgagtgagctaactcacattaattgcgttgcgctcactgcccgctttccagtcgggaaacctgtcgtgccagctgcattaatgaatcggccaacgcgcggggagaggcggtttgcgtattgggcgctcttccgcttcctcgctcactgactcgctgcgctcggtcgttcggctgcggcgagcggtatcagctcactcaaaggcggtaatacggttatccacagaatcaggggataacgcaggaaagaacatgtgagcaaaaggccagcaaaaggccaggaaccgtaaaaaggccgcgttgctggcgtttttccataggctccgcccccctgacgagcatcacaaaaatcgacgctcaagtcagaggtggcgaaacccgacaggactataaagataccaggcgtttccccctggaagctccctcgtgcgctctcctgttccgaccctgccgcttaccggatacctgtccgcctttctcccttcgggaagcgtggcgctttctcatagctcacgctgtaggtatctcagttcggtgtaggtcgttcgctccaagctgggctgtgtgcacgaaccccccgttcagcccgaccgctgcgccttatccggtaactatcgtcttgagtccaacccggtaagacacgacttatcgccactggcagcagccactggtaacaggattagcagagcgaggtatgtaggcggtgctacagagttcttgaagtggtggcctaactacggctacactagaagaacagtatttggtatctgcgctctgctgaagccagttaccttcggaaaaagagttggtagctcttgatccggcaaacaaaccaccgctggtagcggtggtttttttgtttgcaagcagcagattacgcgcagaaaaaaaggatctcaagaagatcctttgatcttttctacggggtctgacactcagtggaacgaaaactcacgttaagggattttggtcatgagattatcaaaaaggatcttcacctagatccttttaaattaaaaatgaagttttaaatcaatctaaagtatatatgagtaaacttggtctgacagttaccaatgcttaatcagtgaggcacctatctcagcgatctgtctatttcgttcatccatagttgcctgactccccgtcgtgtagataactacgatacgggagggcttaccatctggccccagtgctgcaatgataccgcgagacccacgctcaccggctccagatttatcagcaataaaccagccagccggaagggccgagcgcagaagtggtcctgcaactttatccgcctccatccagtctattaattgttgccgggaagctagagtaagtagttcgccagttaatagtttgcgcaacgttgttgccattgctacaggcatcgtggtgtcacgctcgtcgtttggtatggcttcattcagctccggttcccaacgatcaaggcgagttacatgatcccccatgttgtgcaaaaaagcggttagctccttcggtcctccgatcgttgtcagaagtaagttggccgcagtgttatcactcatggttatggcagcactgcataattctcttactgtcatgccatccgtaagatgcttttctgtgactggtgagtactcaaccaagtcattctgagaatagtgtatgcggcgaccgagttgctc

SEQ ID NO: 389 - DNA, 10368 bp, synthetic construct
  source 1..10368: mol_type = other DNA
ttgcccggcgtcaatacgggataataccgcgccacatagcagaactttaaaagtgctcatcattggaaaacgttcttcggggcgaaaactctcaaggatcttaccgctgttgagatccagttcgatgtaacccactcgtgcacccaactgatcttcagcatcttttactttcaccagcgtttctgggtgagcaaaaacaggaaggcaaaatgccgcaaaaaagggaataagggcgacacggaaatgttgaatactcatactcttcctttttcaatattattgaagcatttatcagggttattgtctcatgagcggatacatatttgaatgtatttagaaaaataaacaaataggggttccgcgcacatttccccgaaaagtgccacctgacgtcgacggatcgggagatcgatctcccgatcccctagggtcgactctcagtacaatctgctctgatgccgcatagttaagccagtatctgctccctgcttgtgtgttggaggtcgctgagtagtgcgcgagcaaaatttaagctacaacaaggcaaggcttgaccgacaattgcatgaagaatctgcttagggttaggcgttttgcgctgcttcgcgatgtacgggccagatatacgcgttgacattgattattgactagttattaatagtaatcaattacggggtcattagttcatagcccatatatggagttccgcgttacataacttacggtaaatggcccgcctggctgaccgcccaacgacccccgcccattgacgtcaataatgacgtatgttcccatagtaacgccaatagggactttccattgacgtcaatgggtggagtatttacggtaaactgcccacttggcagtacatcaagtgtatcatatgccaagtacgccccctattgacgtcaatgacggtaaatggcccgcctggcattatgcccagtacatgaccttatgggactttcctacttggcagtacatctacgtattagtcatcgctattaccatggtgatgcggttttggcagtacatcaatgggcgtggatagcggtttgactcacggggatttccaagtctccaccccattgacgtcaatgggagtttgttttggcaccaaaatcaacgggactttccaaaatgtcgtaacaactccgccccattgacgcaaatgggcggtaggcgtgtacggtgggaggtctatataagcagagctggtttagtgaaccgtcagatccgctagagatccgcggccgctaatacgactcactatagggagagccgccaccatgaaacggacagccgacggaagcgagttcgagtcaccaaagaagaagcggaaagtcgctcttgattttctttctaggcttccattgccacctccagtttctccaatttgtacttttgtgtcacctgctgcacaaaaggcattccagcctccaaggtcatgcggatctggtggttcaagcggaggctcatctggcagcgaaactccgggcacttccgagtcagctactcctgagtctagcggcgggtcgtcaggagggtcttccaagctggagaagtttacaaactgttacagcctctccaaaaccctcaggtttaaagcgatcccggtgggcaagacccaggagaacatcgacaacaagaggctcctggtggaagacgagaagcgcgccgaagactacaagggcgtgaagaagctgctcgataggtactacctcagctttattaacgacgtgctgcacagcatcaaactcaagaatctcaacaactacatctccctcttccgcaaaaagacccgcaccgagaaggagaacaaggagctggagaacctggagatcaacctccgcaaggaaatcgccaaagcgttcaagggcaatgaagggtacaagagcctcttcaagaaagacatcatcgaaactatcctcccagagtttctcgatgacaaggacgagatcgcgctggtgaactcctttaacgggttcacaaccgcgtttaccggcttctttgataacagggaaaatatgttctccgaggaggccaagtccaccagcatcgccttcaggtgtatcaacgagaacctcacccgctacatttccaatatggacattttcgagaaggtggatgcgatcttcgataagcacgaggtgcaggagatcaaagagaagattctcaattccgattatgacgtcgaggatttcttcgaaggggagttctttaattttgtgctcacacaagagggcattgacgtgtacaacgcgattatcgggggcttcgtcacagagtccggggagaagattaaggggctgaatgagtacatcaatctgtacaatcagaagaccaagcagaaactgccgaaattcaagccgctctacaagcaagtcctgtccgatagggaaagcctctccttctacggcgagggctataccagcgacgaggaggtgctggaagtcttccgcaacacactgaataagaatagcgagattttctcctccatcaagaagctcgagaagctctttaagaactttgacgagtacagctccgccgggattttcgtgaagaacgggccggcgatcagcaccatctccaaggacatctttggcgagtggaacgtcatcagggacaagtggaacgccgagtacgacgacatccacctgaagaagaaggcggtggtgaccgagaagtatgaggacgatcgcaggaagtccttcaaaaaaatcggctccttcagcctcgaacagctccaggagtatgccgatgcggatctgtccgtcgtcgagaagctgaaggaaatcatcattcagaaggtcgacgagatctataaagtgtacgggtccagcgagaagctgttcgacgccgactttgtgctcgagaagtccctcaaaaagaatgacgccgtggtggccattatgaaagacctgctcgactccgtgaagtccttcgaaaattacattaaagcgttctttggggaggggaaggaaactaacagggatgagtccttctatggcgactttgtcctcgcgtacgacatcctgctgaaggtcgaccacatttacgacgcgatccgcaactacgtgacacagaagccgtactccaaagacaagttcaagctgtacttccagaacccgcaatttatggggggctgggacaaggataaagagacagactaccgcgcgacaattctccgctatggctccaaatactatctggccatcatggacaagaagtacgcgaagtgcctgcagaagatcgacaaagacgacgtcaatggcaactatgaaaagatcaactacaagctgctgccgggcccgaacaagatgctcccgaaggtgttcttcagcaagaagtggatggcctactacaatccaagcgaggatattcagaaaatctataaaaacgggaccttcaagaagggggacatgtttaacctcaacgactgccacaagctcattgatttcttcaaggatagcatttcccgctacccgaaatggtccaatgcgtacgattttaacttctccgagacagaaaagtacaaagacatcgcgggcttttacagggaggtggaggagcaagggtataaagtttcttttgaatccgcgagcaagaaggaagtcgacaagctcgtcgaggagggcaagctctacatgttccaaatttataacaaggacttttccgacaagagccatgggaccccaaacctccacaccatgtacttcaaactgctctttgacgagaacaaccacgggcaaatcaggctgagcggcggcgccgaattattcatgcgcagggcctccctcaagaaggaagagctggtcgtccatccagccaattccccgatcgcgaacaagaacccggacaatccgaaaaagaccaccaccctgtcctacgacgtctacaaggacaaacgcttcagcgaagaccagtacgaattacacatcccaattgcgattaataagtgcccaaagaatatcttcaaaattaatacagaggtcagggtgctgctcaaacacgacgacaatccgtatgtcatcggcattgacaggggcgagcgcaatctgctctatatcgtggtcgtggatgggaagggcaatattgtggagcagtactccctgaacgagattatcaacaacttcaatgggattaggattaagaccgactatcacagcctgctcgacaagaaagaaaaagagaggtttgaggcccgccaaaactggacctccattgagaatatcaaagaattaaaggccggctatatttcccaagtcgtccacaagatctgcgagctggtggagaaatatgacgccgtgattgcgctcgaagacttaaattctgggttcaagaactcccgcgtgaaggtggaaaaacaggtgtatcagaaattcgagaaaatgctgatcgacaaactcaattatatggtggataagaagtccaacccgtgtgccacagggggcgcgctgaagggctatcagatcaccaacaagttcgagagcttcaagagcatgagcacccagaacgggtttattttctacatcccggcgtggctcacctccaagattgacccgagcaccggcttcgtgaacctcctgaagacaaagtatacctccattgccgacagcaagaagtttatctcctccttcgaccgcattatgtatgtgccggaggaggacctcttcgagttcgccctcgactacaaaaacttcagccgcacagatgcggattacatcaagaagtggaagctgtactcctacgggaacaggatccgcatcttcaggaatccaaaaaaaaataacgtctttgactgggaggaagtgtgcctgacatccgcctacaaggaactgttcaataaatacggcatcaattaccagcagggcgacattcgcgccctcctctgtgagcagtccgacaaagcgttttactccagcttcatggccctcatgtccctgatgctccaaatgaggaatagcatcacagggcgcaccgacgtcgacttcctcatcagcccggtgaagaactccgacgggatcttttacgactcccgcaactatgaggcgcaagagaatgcgatcctcccgaagaacgccgatgcgaacggggcctataatatcgccaggaaagtgctctgggccatcgggcagttcaaaaaggcggaggatgagaagctcgacaaggtgaaaattgccatttccaacaaggagtggctggagtacgcgcagacctccgtgaagcactctggtggttcaagcggaggctcatctggcagcgaaactccgggcacttccgagtcagctactcctgagtctagcggcgggtcgtcaggagggtctacacttaatattgaggatgaacatagattgcacgagacctctaaggaacctgatgtttctcttggatcaacttggttgtcagatttcccacaagcatgggcagagaccggaggtatgggtcttgctgttaggcaggcaccacttattattcctttgaaggcaacctctactcctgtgtcaattaagcaatatccaatgtctcaggaagctaggcttggaattaagcctcacattcaaagacttttggatcagggtattttggtgccatgtcaatcaccttggaacacaccacttttgcctgttaagaagcctggaactaatgattacagaccagtgcaagatttgagggaggttaacaagagagtggaagatattcacccaactgttccaaacccttataatcttttgtctggattgccaccttcacatcaatggtacactgtgcttgatttgaaggatgcatttttctgccttaggttgcatccaacatctcagcctctttttgctttcgagtggagagatcctgaaatgggaatttctggtcaacttacatggaccaggttgcctcagggtttcaagaactcaccaaccttgtttaatgaggcacttcacagggatttggctgattttaggattcaacatcctgatcttatccttttgcagtatgttgatgatcttttgcttgctgcaacttctgaattggattgtcaacagggaactagggcattgcttcaaacacttggaaatttgggttacagagcttcagcaaagaaggctcagatttgccaaaagcaggttaagtatcttggatacttgcttaaggaaggacaaaggtggttgaccgaggctagaaaggaaactgtgatgggtcaaccaacacctaagacccctaggcagcttagagagttcttgggaaaggcaggtttttgtaggcttttcattccaggatttgctgaaatggctgcaccactttatcctttgaccaagcctggaactttgtttaactggggtccagatcaacagaaggcataccaagaaattaagcaggctttgcttactgctccagcacttggtttgcctgatcttacaaagccatttgagttgttcgttgatgaaaagcaaggatatgcaaagggtgtgcttacccagaagttgggaccttggagaaggcctgttgcttacctttctaagaaacttgatccagtggctgcaggttggccaccttgtcttagaatggttgctgcaattgcagtgcttacaaaggatgctggaaagttgactatgggacaacctcttgttattttggcaccacacgctgttgaggcacttgtgaagcagccacctgataggtggttgtcaaacgcaagaatgacccattatcaagctcttcttttggatactgatagggtgcagttcggtcctgttgtggctttgaatccagcaacacttttgccacttcctgaggaaggattgcaacacaactgccttgatattttggctgaggcacatggtacaagacctgatcttaccgatcagccattgcctgatgctgatcacacttggtacacagatggatcttcacttttgcaagaaggacagaggaaggctggtgctgcagttactacagagactgaagtgatttgggctaaggcacttccagctggaacatctgctcaaagagcagagcttattgctttgacccaggcacttaagatggctgaaggaaagaagttgaacgtttacactgattctaggtatgctttcgcaacagctcatattcacggagaaatctatagaaggagaggatggttgacatcagagggaaaggaaattaagaacaaggatgaaattcttgcacttttgaaggctctttttcttcctaagagattgtctattattcattgcccaggacaccaaaagggtcattcagcagaagctaggggaaatagaatggctgatcaggctgcaagaaaggctgcaattactgagacacctgatacctctactcttttgatcgaaaactcttcaccaaattcaaggcttattaactctggcggctcaaaaagaaccgccgacggcagcgaattcgagcccaagaagaagaggaaagtcggaagcggagctactaacttcagcctgctgaagcaggctggagacgtggaggagaaccctggacctatggtgagcaagggcgaggagctgttcaccggggtggtgcccatcctggtcgagctggacggcgacgtaaacggccacaagttcagcgtgtccggcgagggcgagggcgatgccacctacggcaagctgaccctgaagttcatctgcaccaccggcaagctgcccgtgccctggcccaccctcgtgaccaccctgacctatggagtgcagtgcttcagccgctaccccgaccacatgaagcagcacgacttcttcaagtccgccatgcccgaaggctacgtccaggagcgcaccatcttcttcaaggacgacggcaactacaagacccgcgccgaggtgaagttcgagggcgacaccctggtgaaccgcatcgagctgaagggcatcgacttcaaggaggacggcaacatcctggggcacaagctggagtacaactacaacagccacaacgtctatatcatggccgacaagcagaagaacggcatcaaggtgaacttcaagatccgccacaacatcgaggacggcagcgtgcagctcgccgaccactaccagcagaacacccccatcggcgacggccccgtgctgctgcccgacaaccactacctgagcacccagtccgccctgagcaaagaccccaacgagaagcgcgatcacatggtcctgctggagttcgtgaccgccgccgggatcactctcggcatggacgagctgtacaagtctggtggttctcccaagaagaagaggaaagtctaaccggtcatcatcaccatcaccattgagtttaaacccgctgatcagcctcgactgtgccttctagttgccagccatctgttgtttgcccctcccccgtgccttccttgaccctggaaggtgccactcccactgtcctttcctaataaaatgaggaaattgcatcgcattgtctgagtaggtgtcattctattctggggggtggggtggggcaggacagcaagggggaggattgggaagacaatagcaggcatgctggggatgcggtgggctctatggcttctgaggcggaaagaaccagctggggctcgataccgtcgacctctagctagagcttggcgtaatcatggtcatagctgtttcctgtgtgaaattgttatccgctcacaattccacacaacatacgagccggaagcataaagtgtaaagcctagggtgcctaatgagtgagctaactcacattaattgcgttgcgctcactgcccgctttccagtcgggaaacctgtcgtgccagctgcattaatgaatcggccaacgcgcggggagaggcggtttgcgtattgggcgctcttccgcttcctcgctcactgactcgctgcgctcggtcgttcggctgcggcgagcggtatcagctcactcaaaggcggtaatacggttatccacagaatcaggggataacgcaggaaagaacatgtgagcaaaaggccagcaaaaggccaggaaccgtaaaaaggccgcgttgctggcgtttttccataggctccgcccccctgacgagcatcacaaaaatcgacgctcaagtcagaggtggcgaaacccgacaggactataaagataccaggcgtttccccctggaagctccctcgtgcgctctcctgttccgaccctgccgcttaccggatacctgtccgcctttctcccttcgggaagcgtggcgctttctcatagctcacgctgtaggtatctcagttcggtgtaggtcgttcgctccaagctgggctgtgtgcacgaaccccccgttcagcccgaccgctgcgccttatccggtaactatcgtcttgagtccaacccggtaagacacgacttatcgccactggcagcagccactggtaacaggattagcagagcgaggtatgtaggcggtgctacagagttcttgaagtggtggcctaactacggctacactagaagaacagtatttggtatctgcgctctgctgaagccagttaccttcggaaaaagagttggtagctcttgatccggcaaacaaaccaccgctggtagcggtggtttttttgtttgcaagcagcagattacgcgcagaaaaaaaggatctcaagaagatcctttgatcttttctacggggtctgacactcagtggaacgaaaactcacgttaagggattttggtcatgagattatcaaaaaggatcttcacctagatccttttaaattaaaaatgaagttttaaatcaatctaaagtatatatgagtaaacttggtctgacagttaccaatgcttaatcagtgaggcacctatctcagcgatctgtctatttcgttcatccatagttgcctgactccccgtcgtgtagataactacgatacgggagggcttaccatctggccccagtgctgcaatgataccgcgagacccacgctcaccggctccagatttatcagcaataaaccagccagccggaagggccgagcgcagaagtggtcctgcaactttatccgcctccatccagtctattaattgttgccgggaagctagagtaagtagttcgccagttaatagtttgcgcaacgttgttgccattgctacaggcatcgtggtgtcacgctcgtcgtttggtatggcttcattcagctccggttcccaacgatcaaggcgagttacatgatcccccatgttgtgcaaaaaagcggttagctccttcggtcctccgatcgttgtcagaagtaagttggccgcagtgttatcactcatggttatggcagcactgcataattctcttactgtcatgccatccgtaagatgcttttctgtgactggtgagtactcaaccaagtcattctgagaatagtgtatgcggcgaccgagttgctc

SEQ ID NO: 390 - protein, 1387 aa, synthetic construct
RTEKENKELENLEINLRKEIAKAFKGNEGYKSLFKKDIIETILPEFLDDKDEIALVNSFNGFTTAFTGFFDNRENMFSEEAKSTSIAFRCINENLTRYISNMDIFEKVDAIFDKHEVQEIKEKILNSDYDVEDFFEGEFFNFVLTQEGIDVYNAIIGGFVTESGEKIKGLNEYINLYNQKTKQKLPKFKPLYKQVLSDRESLSFYGENQTTQKGQKNSRERMKRIEEGIKELGSQILKEHPVENTQLQNEKLYLYYLQNGRDMYVDQELDINRLSDYDVDHIVPQSFLKDDSIDNKVLTRSDKNRGKSDNVPSEEVVKKMKNYWRQLLNAKLITQRKFDNLTKAERGGLSEGYTSDEEVLEVFRNTLNKNSEIFSSIKKLEKLFKNFDEYSSAGIFVKNGPAISTISKDIFGEWNVIRDKWNAEYDDIHLKKKAVVTEKYEDDRRKSFKKIGSFSLEQLQEYADADLSVVEKLKEIIIQKVDEIYKVYGSSEKLFDADFVLEKSLKKNDAVVAIMKDLLDSVKSFENYIKAFFGEGKETNRDESFYGDFVLAYDILLKVDHIYDAIRNYVTQKPYSKDKFKLYFQNPQFMGGWDKDKETDYRATILRYGSKYYLAIMDKKYAKCLQKIDKDDVNGNYEKINYKLLPGPNKMLPKVFFSKKWMAYYNPSEDIQKIYKNGTFKKGDMFNLNDCHKLIDFFKDSISRYPKWSNAYDFNFSETEKYKDIAGFYREVEEQGYKVSFESASKKEVDKLVEEGKLYMFQIYNKDFSDKSHGTPNLHTMYFKLLFDENNHGQIRLSGGAELFMRRASLKKEELVVHPANSPIANKNPDNPKKTTTLSYDVYKDKRFSEDQYELHIPIAINKCPKNIFKINTEVRVLLKHDDNPYVIGIDRGERNLLYIVVVDGKGNIVEQYSLNEIINNFNGIRIKTDYHSLLDKKEKERFEARQNWTSIENIKELKAGYISQVVHKICELVEKYDAVIALEDLNSGFKNSRVKVEKQVYQKFEKMLIDKLNYMVDKKSNPCATGGALKGYQITNKFESFKSMSTQNGFIFYIPAWLTSKIDPSTGFVNLLKTKYTSIADSKKFISSFDRIMYVPEEDLFEFALDYKNFSRTDADYIKKWKLYSYGNRIRIFRNPKKNNVFDWEEVCLTSAYKELFNKYGINYQQGDIRALLCEQSDKAFYSSFMALMSLMLQMRNSITGRTDVDFLISPVKNSDGIFYDSRNYEAQENAILPKNADANGAYNIARKVLWAIGQFKKAEDEKLDKVKIAISNKEWLEYAQTSVKHGSSGSSGSSGSSGSSGSKLEKFTNCYSLSKTLRFKAIPVGKTQENIDNKRLLVEDEKRAEDYKGVKKLLDRYYLSFINDVLHSIKLKNLNNYISLFRKKT

SEQ ID NO: 391 - protein, 1387 aa, synthetic construct
SDGIFYDSRNYEAQENAILPKNADANGAYNIARKVLWAIGQFKKAEDEKLDKVKIAISNKEWLEYAQTSVKHGSSGSSGSSGSSGSSGSKLEKFTNCYSLSKTLRFKAIPVGKTQENIDNKRLLVEDEKRAEDYKGVKKLLDRYYLSFINDVLHSIKLKNLNNYISLFRKKTRTEKENKELENLEINLRKEIAKAFKGNEGYKSLFKKDIIETILPEFLDDKDEIALVNSFNGFTTAFTGFFDNRENMFSEEAKSTSIAFRCINENLTRYISNMDIFEKVDAIFDKHEVQEIKEKILNSDYDVEDFFEGEFFNFVLTQEGIDVYNAIIGGFVTESGEKIKGLNEYINLYNQKTKQKLPKFKPLYKQVLSDRESLSFYGENQTTQKGQKNSRERMKRIEEGIKELGSQILKEHPVENTQLQNEKLYLYYLQNGRDMYVDQELDINRLSDYDVDHIVPQSFLKDDSIDNKVLTRSDKNRGKSDNVPSEEVVKKMKNYWRQLLNAKLITQRKFDNLTKAERGGLSEGYTSDEEVLEVFRNTLNKNSEIFSSIKKLEKLFKNFDEYSSAGIFVKNGPAISTISKDIFGEWNVIRDKWNAEYDDIHLKKKAVVTEKYEDDRRKSFKKIGSFSLEQLQEYADADLSVVEKLKEIIIQKVDEIYKVYGSSEKLFDADFVLEKSLKKNDAVVAIMKDLLDSVKSFENYIKAFFGEGKETNRDESFYGDFVLAYDILLKVDHIYDAIRNYVTQKPYSKDKFKLYFQNPQFMGGWDKDKETDYRATILRYGSKYYLAIMDKKYAKCLQKIDKDDVNGNYEKINYKLLPGPNKMLPKVFFSKKWMAYYNPSEDIQKIYKNGTFKKGDMFNLNDCHKLIDFFKDSISRYPKWSNAYDFNFSETEKYKDIAGFYREVEEQGYKVSFESASKKEVDKLVEEGKLYMFQIYNKDFSDKSHGTPNLHTMYFKLLFDENNHGQIRLSGGAELFMRRASLKKEELVVHPANSPIANKNPDNPKKTTTLSYDVYKDKRFSEDQYELHIPIAINKCPKNIFKINTEVRVLLKHDDNPYVIGIDRGERNLLYIVVVDGKGNIVEQYSLNEIINNFNGIRIKTDYHSLLDKKEKERFEARQNWTSIENIKELKAGYISQVVHKICELVEKYDAVIALEDLNSGFKNSRVKVEKQVYQKFEKMLIDKLNYMVDKKSNPCATGGALKGYQITNKFESFKSMSTQNGFIFYIPAWLTSKIDPSTGFVNLLKTKYTSIADSKKFISSFDRIMYVPEEDLFEFALDYKNFSRTDADYIKKWKLYSYGNRIRIFRNPKKNNVFDWEEVCLTSAYKELFNKYGINYQQGDIRALLCEQSDKAFYSSFMALMSLMLQMRNSITGRTDVDFLISPVKN

SEQ ID NO: 392 - protein, 1387 aa, synthetic construct
KDKFKLYFQNPQFMGGWDKDKETDYRATILRYGSKYYLAIMDKKYAKCLQKIDKDDVNGNYEKINYKLLPGPNKMLPKVFFSKKWMAYYNPSEDIQKIYKNGTFKKGDMFNLNDCHKLIDFFKDSISRYPKWSNAYDFNFSETEKYKDIAGFYREVEEQGYKVSFESASKKEVDKLVEEGKLYMFQIYNKDFSDKSHGTPNLHTMYFKLLFDENNHGQIRLSGGAELFMRRASLKKEELVVHPANSPIANKNPDNPKKTTTLSYDVYKDKRFSEDQYELHIPIAINKCPKNIFKINTEVRVLLKHDDNPYVIGIDRGERNLLYIVVVDGKGNIVEQYSLNEIINNFNGIRIKTDYHSLLDKKEKERFEARQNWTSIENIKELKAGYISQVVHKICELVEKYDAVIALEDLNSGFKNSRVKVEKQVYQKFEKMLIDKLNYMVDKKSNPCATGGALKGYQITNKFESFKSMSTQNGFIFYIPAWLTSKIDPSTGFVNLLKTKYTSIADSKKFISSFDRIMYVPEEDLFEFALDYKNFSRTDADYIKKWKLYSYGNRIRIFRNPKKNNVFDWEEVCLTSAYKELFNKYGINYQQGDIRALLCEQSDKAFYSSFMALMSLMLQMRNSITGRTDVDFLISPVKNSDGIFYDSRNYEAQENAILPKNADANGAYNIARKVLWAIGQFKKAEDEKLDKVKIAISNKEWLEYAQTSVKHGSSGSSGSSGSSGSSGSKLEKFTNCYSLSKTLRFKAIPVGKTQENIDNKRLLVEDEKRAEDYKGVKKLLDRYYLSFINDVLHSIKLKNLNNYISLFRKKTRTEKENKELENLEINLRKEIAKAFKGNEGYKSLFKKDIIETILPEFLDDKDEIALVNSFNGFTTAFTGFFDNRENMFSEEAKSTSIAFRCINENLTRYISNMDIFEKVDAIFDKHEVQEIKEKILNSDYDVEDFFEGEFFNFVLTQEGIDVYNAIIGGFVTESGEKIKGLNEYINLYNQKTKQKLPKFKPLYKQVLSDRESLSFYGENQTTQKGQKNSRERMKRIEEGIKELGSQILKEHPVENTQLQNEKLYLYYLQNGRDMYVDQELDINRLSDYDVDHIVPQSFLKDDSIDNKVLTRSDKNRGKSDNVPSEEVVKKMKNYWRQLLNAKLITQRKFDNLTKAERGGLSEGYTSDEEVLEVFRNTLNKNSEIFSSIKKLEKLFKNFDEYSSAGIFVKNGPAISTISKDIFGEWNVIRDKWNAEYDDIHLKKKAVVTEKYEDDRRKSFKKIGSFSLEQLQEYADADLSVVEKLKEIIIQKVDEIYKVYGSSEKLFDADFVLEKSLKKNDAVVAIMKDLLDSVKSFENYIKAFFGEGKETNRDESFYGDFVLAYDILLKVDHIYDAIRNYVTQKPYS

SEQ ID NO: 393 - protein, 1387 aa, synthetic construct
KSLKKNDAVVAIMKDLLDSVKSFENYIKAFFGEGKETNRDESFYGDFVLAYDILLKVDHIYDAIRNYVTQKPYSKDKFKLYFQNPQFMGGWDKDKETDYRATILRYGSKYYLAIMDKKYAKCLQKIDKDDVNGNYEKINYKLLPGPNKMLPKVFFSKKWMAYYNPSEDIQKIYKNGTFKKGDMFNLNDCHKLIDFFKDSISRYPKWSNAYDFNFSETEKYKDIAGFYREVEEQGYKVSFESASKKEVDKLVEEGKLYMFQIYNKDFSDKSHGTPNLHTMYFKLLFDENNHGQIRLSGGAELFMRRASLKKEELVVHPANSPIANKNPDNPKKTTTLSYDVYKDKRFSEDQYELHIPIAINKCPKNIFKINTEVRVLLKHDDNPYVIGIDRGERNLLYIVVVDGKGNIVEQYSLNEIINNFNGIRIKTDYHSLLDKKEKERFEARQNWTSIENIKELKAGYISQVVHKICELVEKYDAVIALEDLNSGFKNSRVKVEKQVYQKFEKMLIDKLNYMVDKKSNPCATGGALKGYQITNKFESFKSMSTQNGFIFYIPAWLTSKIDPSTGFVNLLKTKYTSIADSKKFISSFDRIMYVPEEDLFEFALDYKNFSRTDADYIKKWKLYSYGNRIRIFRNPKKNNVFDWEEVCLTSAYKELFNKYGINYQQGDIRALLCEQSDKAFYSSFMALMSLMLQMRNSITGRTDVDFLISPVKNSDGIFYDSRNYEAQENAILPKNADANGAYNIARKVLWAIGQFKKAEDEKLDKVKIAISNKEWLEYAQTSVKHGSSGSSGSSGSSGSSGSKLEKFTNCYSLSKTLRFKAIPVGKTQENIDNKRLLVEDEKRAEDYKGVKKLLDRYYLSFINDVLHSIKLKNLNNYISLFRKKTRTEKENKELENLEINLRKEIAKAFKGNEGYKSLFKKDIIETILPEFLDDKDEIALVNSFNGFTTAFTGFFDNRENMFSEEAKSTSIAFRCINENLTRYISNMDIFEKVDAIFDKHEVQEIKEKILNSDYDVEDFFEGEFFNFVLTQEGIDVYNAIIGGFVTESGEKIKGLNEYINLYNQKTKQKLPKFKPLYKQVLSDRESLSFYGENQTTQKGQKNSRERMKRIEEGIKELGSQILKEHPVENTQLQNEKLYLYYLQNGRDMYVDQELDINRLSDYDVDHIVPQSFLKDDSIDNKVLTRSDKNRGKSDNVPSEEVVKKMKNYWRQLLNAKLITQRKFDNLTKAERGGLSEGYTSDEEVLEVFRNTLNKNSEIFSSIKKLEKLFKNFDEYSSAGIFVKNGPAISTISKDIFGEWNVIRDKWNAEYDDIHLKKKAVVTEKYEDDRRKSFKKIGSFSLEQLQEYADADLSVVEKLKEIIIQKVDEIYKVYGSSEKLFDADFVLE

SEQ ID NO: 394 - protein, 1387 aa, synthetic construct
SDKAFYSSFMALMSLMLQMRNSITGRTDVDFLISPVKNSDGIFYDSRNYEAQENAILPKNADANGAYNIARKVLWAIGQFKKAEDEKLDKVKIAISNKEWLEYAQTSVKHGSSGSSGSSGSSGSSGSKLEKFTNCYSLSKTLRFKAIPVGKTQENIDNKRLLVEDEKRAEDYKGVKKLLDRYYLSFINDVLHSIKLKNLNNYISLFRKKTRTEKENKELENLEINLRKEIAKAFKGNEGYKSLFKKDIIETILPEFLDDKDEIALVNSFNGFTTAFTGFFDNRENMFSEEAKSTSIAFRCINENLTRYISNMDIFEKVDAIFDKHEVQEIKEKILNSDYDVEDFFEGEFFNFVLTQEGIDVYNAIIGGFVTESGEKIKGLNEYINLYNQKTKQKLPKFKPLYKQVLSDRESLSFYGENQTTQKGQKNSRERMKRIEEGIKELGSQILKEHPVENTQLQNEKLYLYYLQNGRDMYVDQELDINRLSDYDVDHIVPQSFLKDDSIDNKVLTRSDKNRGKSDNVPSEEVVKKMKNYWRQLLNAKLITQRKFDNLTKAERGGLSEGYTSDEEVLEVFRNTLNKNSEIFSSIKKLEKLFKNFDEYSSAGIFVKNGPAISTISKDIFGEWNVIRDKWNAEYDDIHLKKKAVVTEKYEDDRRKSFKKIGSFSLEQLQEYADADLSVVEKLKEIIIQKVDEIYKVYGSSEKLFDADFVLEKSLKKNDAVVAIMKDLLDSVKSFENYIKAFFGEGKETNRDESFYGDFVLAYDILLKVDHIYDAIRNYVTQKPYSKDKFKLYFQNPQFMGGWDKDKETDYRATILRYGSKYYLAIMDKKYAKCLQKIDKDDVNGNYEKINYKLLPGPNKMLPKVFFSKKWMAYYNPSEDIQKIYKNGTFKKGDMFNLNDCHKLIDFFKDSISRYPKWSNAYDFNFSETEKYKDIAGFYREVEEQGYKVSFESASKKEVDKLVEEGKLYMFQIYNKDFSDKSHGTPNLHTMYFKLLFDENNHGQIRLSGGAELFMRRASLKKEELVVHPANSPIANKNPDNPKKTTTLSYDVYKDKRFSEDQYELHIPIAINKCPKNIFKINTEVRVLLKHDDNPYVIGIDRGERNLLYIVVVDGKGNIVEQYSLNEIINNFNGIRIKTDYHSLLDKKEKERFEARQNWTSIENIKELKAGYISQVVHKICELVEKYDAVIALEDLNSGFKNSRVKVEKQVYQKFEKMLIDKLNYMVDKKSNPCATGGALKGYQITNKFESFKSMSTQNGFIFYIPAWLTSKIDPSTGFVNLLKTKYTSIADSKKFISSFDRIMYVPEEDLFEFALDYKNFSRTDADYIKKWKLYSYGNRIRIFRNPKKNNVFDWEEVCLTSAYKELFNKYGINYQQGDIRALLCEQ

SEQ ID NO: 395 - protein, 1389 aa, synthetic construct
RTEKENKELENLEINLRKEIAKAFKGNEGYKSLFKKDIIETILPEFLDDKDEIALVNSFNGFTTAFTGFFDNRENMFSEEAKSTSIAFRCINENLTRYISNMDIFEKVDAIFDKHEVQEIKEKILNSDYDVEDFFEGEFFNFVLTQEGIDVYNAIIGGFVTESGEKIKGLNEYINLYNQKTKQKLPKFKPLYKQVLSDRESLSFYGSGENQTTQKGQKNSRERMKRIEEGIKELGSQILKEHPVENTQLQNEKLYLYYLQNGRDMYVDQELDINRLSDYDVDHIVPQSFLKDDSIDNKVLTRSDKNRGKSDNVPSEEVVKKMKNYWRQLLNAKLITQRKFDNLTKAERGGLSEGYTSDEEVLEVFRNTLNKNSEIFSSIKKLEKLFKNFDEYSSAGIFVKNGPAISTISKDIFGEWNVIRDKWNAEYDDIHLKKKAVVTEKYEDDRRKSFKKIGSFSLEQLQEYADADLSVVEKLKEIIIQKVDEIYKVYGSSEKLFDADFVLEKSLKKNDAVVAIMKDLLDSVKSFENYIKAFFGEGKETNRDESFYGDFVLAYDILLKVDHIYDAIRNYVTQKPYSKDKFKLYFQNPQFMGGWDKDKETDYRATILRYGSKYYLAIMDKKYAKCLQKIDKDDVNGNYEKINYKLLPGPNKMLPKVFFSKKWMAYYNPSEDIQKIYKNGTFKKGDMFNLNDCHKLIDFFKDSISRYPKWSNAYDFNFSETEKYKDIAGFYREVEEQGYKVSFESASKKEVDKLVEEGKLYMFQIYNKDFSDKSHGTPNLHTMYFKLLFDENNHGQIRLSGGAELFMRRASLKKEELVVHPANSPIANKNPDNPKKTTTLSYDVYKDKRFSEDQYELHIPIAINKCPKNIFKINTEVRVLLKHDDNPYVIGIDRGERNLLYIVVVDGKGNIVEQYSLNEIINNFNGIRIKTDYHSLLDKKEKERFEARQNWTSIENIKELKAGYISQVVHKICELVEKYDAVIALEDLNSGFKNSRVKVEKQVYQKFEKMLIDKLNYMVDKKSNPCATGGALKGYQITNKFESFKSMSTQNGFIFYIPAWLTSKIDPSTGFVNLLKTKYTSIADSKKFISSFDRIMYVPEEDLFEFALDYKNFSRTDADYIKKWKLYSYGNRIRIFRNPKKNNVFDWEEVCLTSAYKELFNKYGINYQQGDIRALLCEQSDKAFYSSFMALMSLMLQMRNSITGRTDVDFLISPVKNSDGIFYDSRNYEAQENAILPKNADANGAYNIARKVLWAIGQFKKAEDEKLDKVKIAISNKEWLEYAQTSVKHGSSGSSGSSGSSGSSGSKLEKFTNCYSLSKTLRFKAIPVGKTQENIDNKRLLVEDEKRAEDYKGVKKLLDRYYLSFINDVLHSIKLKNLNNYISLFRKKT

SEQ ID NO: 396 - protein, 1389 aa, synthetic construct
SDGIFYDSRNYEAQENAILPKNADANGAYNIARKVLWAIGQFKKAEDEKLDKVKIAISNKEWLEYAQTSVKHGSSGSSGSSGSSGSSGSKLEKFTNCYSLSKTLRFKAIPVGKTQENIDNKRLLVEDEKRAEDYKGVKKLLDRYYLSFINDVLHSIKLKNLNNYISLFRKKTRTEKENKELENLEINLRKEIAKAFKGNEGYKSLFKKDIIETILPEFLDDKDEIALVNSFNGFTTAFTGFFDNRENMFSEEAKSTSIAFRCINENLTRYISNMDIFEKVDAIFDKHEVQEIKEKILNSDYDVEDFFEGEFFNFVLTQEGIDVYNAIIGGFVTESGEKIKGLNEYINLYNQKTKQKLPKFKPLYKQVLSDRESLSFYGSGENQTTQKGQKNSRERMKRIEEGIKELGSQILKEHPVENTQLQNEKLYLYYLQNGRDMYVDQELDINRLSDYDVDHIVPQSFLKDDSIDNKVLTRSDKNRGKSDNVPSEEVVKKMKNYWRQLLNAKLITQRKFDNLTKAERGGLSEGYTSDEEVLEVFRNTLNKNSEIFSSIKKLEKLFKNFDEYSSAGIFVKNGPAISTISKDIFGEWNVIRDKWNAEYDDIHLKKKAVVTEKYEDDRRKSFKKIGSFSLEQLQEYADADLSVVEKLKEIIIQKVDEIYKVYGSSEKLFDADFVLEKSLKKNDAVVAIMKDLLDSVKSFENYIKAFFGEGKETNRDESFYGDFVLAYDILLKVDHIYDAIRNYVTQKPYSKDKFKLYFQNPQFMGGWDKDKETDYRATILRYGSKYYLAIMDKKYAKCLQKIDKDDVNGNYEKINYKLLPGPNKMLPKVFFSKKWMAYYNPSEDIQKIYKNGTFKKGDMFNLNDCHKLIDFFKDSISRYPKWSNAYDFNFSETEKYKDIAGFYREVEEQGYKVSFESASKKEVDKLVEEGKLYMFQIYNKDFSDKSHGTPNLHTMYFKLLFDENNHGQIRLSGGAELFMRRASLKKEELVVHPANSPIANKNPDNPKKTTTLSYDVYKDKRFSEDQYELHIPIAINKCPKNIFKINTEVRVLLKHDDNPYVIGIDRGERNLLYIVVVDGKGNIVEQYSLNEIINNFNGIRIKTDYHSLLDKKEKERFEARQNWTSIENIKELKAGYISQVVHKICELVEKYDAVIALEDLNSGFKNSRVKVEKQVYQKFEKMLIDKLNYMVDKKSNPCATGGALKGYQITNKFESFKSMSTQNGFIFYIPAWLTSKIDPSTGFVNLLKTKYTSIADSKKFISSFDRIMYVPEEDLFEFALDYKNFSRTDADYIKKWKLYSYGNRIRIFRNPKKNNVFDWEEVCLTSAYKELFNKYGINYQQGDIRALLCEQSDKAFYSSFMALMSLMLQMRNSITGRTDVDFLISPVKN

SEQ ID NO: 397 - protein, 1389 aa, synthetic construct
KDKFKLYFQNPQFMGGWDKDKETDYRATILRYGSKYYLAIMDKKYAKCLQKIDKDDVNGNYEKINYKLLPGPNKMLPKVFFSKKWMAYYNPSEDIQKIYKNGTFKKGDMFNLNDCHKLIDFFKDSISRYPKWSNAYDFNFSETEKYKDIAGFYREVEEQGYKVSFESASKKEVDKLVEEGKLYMFQIYNKDFSDKSHGTPNLHTMYFKLLFDENNHGQIRLSGGAELFMRRASLKKEELVVHPANSPIANKNPDNPKKTTTLSYDVYKDKRFSEDQYELHIPIAINKCPKNIFKINTEVRVLLKHDDNPYVIGIDRGERNLLYIVVVDGKGNIVEQYSLNEIINNFNGIRIKTDYHSLLDKKEKERFEARQNWTSIENIKELKAGYISQVVHKICELVEKYDAVIALEDLNSGFKNSRVKVEKQVYQKFEKMLIDKLNYMVDKKSNPCATGGALKGYQITNKFESFKSMSTQNGFIFYIPAWLTSKIDPSTGFVNLLKTKYTSIADSKKFISSFDRIMYVPEEDLFEFALDYKNFSRTDADYIKKWKLYSYGNRIRIFRNPKKNNVFDWEEVCLTSAYKELFNKYGINYQQGDIRALLCEQSDKAFYSSFMALMSLMLQMRNSITGRTDVDFLISPVKNSDGIFYDSRNYEAQENAILPKNADANGAYNIARKVLWAIGQFKKAEDEKLDKVKIAISNKEWLEYAQTSVKHGSSGSSGSSGSSGSSGSKLEKFTNCYSLSKTLRFKAIPVGKTQENIDNKRLLVEDEKRAEDYKGVKKLLDRYYLSFINDVLHSIKLKNLNNYISLFRKKTRTEKENKELENLEINLRKEIAKAFKGNEGYKSLFKKDIIETILPEFLDDKDEIALVNSFNGFTTAFTGFFDNRENMFSEEAKSTSIAFRCINENLTRYISNMDIFEKVDAIFDKHEVQEIKEKILNSDYDVEDFFEGEFFNFVLTQEGIDVYNAIIGGFVTESGEKIKGLNEYINLYNQKTKQKLPKFKPLYKQVLSDRESLSFYGSGENQTTQKGQKNSRERMKRIEEGIKELGSQILKEHPVENTQLQNEKLYLYYLQNGRDMYVDQELDINRLSDYDVDHIVPQSFLKDDSIDNKVLTRSDKNRGKSDNVPSEEVVKKMKNYWRQLLNAKLITQRKFDNLTKAERGGLSEGYTSDEEVLEVFRNTLNKNSEIFSSIKKLEKLFKNFDEYSSAGIFVKNGPAISTISKDIFGEWNVIRDKWNAEYDDIHLKKKAVVTEKYEDDRRKSFKKIGSFSLEQLQEYADADLSVVEKLKEIIIQKVDEIYKVYGSSEKLFDADFVLEKSLKKNDAVVAIMKDLLDSVKSFENYIKAFFGEGKETNRDESFYGDFVLAYDILLKVDHIYDAIRNYVTQKPYS

SEQ ID NO: 398 - protein, 1389 aa, synthetic construct
KSLKKNDAVVAIMKDLLDSVKSFENYIKAFFGEGKETNRDESFYGDFVLAYDILLKVDHIYDAIRNYVTQKPYSKDKFKLYFQNPQFMGGWDKDKETDYRATILRYGSKYYLAIMDKKYAKCLQKIDKDDVNGNYEKINYKLLPGPNKMLPKVFFSKKWMAYYNPSEDIQKIYKNGTFKKGDMFNLNDCHKLIDFFKDSISRYPKWSNAYDFNFSETEKYKDIAGFYREVEEQGYKVSFESASKKEVDKLVEEGKLYMFQIYNKDFSDKSHGTPNLHTMYFKLLFDENNHGQIRLSGGAELFMRRASLKKEELVVHPANSPIANKNPDNPKKTTTLSYDVYKDKRFSEDQYELHIPIAINKCPKNIFKINTEVRVLLKHDDNPYVIGIDRGERNLLYIVVVDGKGNIVEQYSLNEIINNFNGIRIKTDYHSLLDKKEKERFEARQNWTSIENIKELKAGYISQVVHKICELVEKYDAVIALEDLNSGFKNSRVKVEKQVYQKFEKMLIDKLNYMVDKKSNPCATGGALKGYQITNKFESFKSMSTQNGFIFYIPAWLTSKIDPSTGFVNLLKTKYTSIADSKKFISSFDRIMYVPEEDLFEFALDYKNFSRTDADYIKKWKLYSYGNRIRIFRNPKKNNVFDWEEVCLTSAYKELFNKYGINYQQGDIRALLCEQSDKAFYSSFMALMSLMLQMRNSITGRTDVDFLISPVKNSDGIFYDSRNYEAQENAILPKNADANGAYNIARKVLWAIGQFKKAEDEKLDKVKIAISNKEWLEYAQTSVKHGSSGSSGSSGSSGSSGSKLEKFTNCYSLSKTLRFKAIPVGKTQENIDNKRLLVEDEKRAEDYKGVKKLLDRYYLSFINDVLHSIKLKNLNNYISLFRKKTRTEKENKELENLEINLRKEIAKAFKGNEGYKSLFKKDIIETILPEFLDDKDEIALVNSFNGFTTAFTGFFDNRENMFSEEAKSTSIAFRCINENLTRYISNMDIFEKVDAIFDKHEVQEIKEKILNSDYDVEDFFEGEFFNFVLTQEGIDVYNAIIGGFVTESGEKIKGLNEYINLYNQKTKQKLPKFKPLYKQVLSDRESLSFYGSGENQTTQKGQKNSRERMKRIEEGIKELGSQILKEHPVENTQLQNEKLYLYYLQNGRDMYVDQELDINRLSDYDVDHIVPQSFLKDDSIDNKVLTRSDKNRGKSDNVPSEEVVKKMKNYWRQLLNAKLITQRKFDNLTKAERGGLSEGYTSDEEVLEVFRNTLNKNSEIFSSIKKLEKLFKNFDEYSSAGIFVKNGPAISTISKDIFGEWNVIRDKWNAEYDDIHLKKKAVVTEKYEDDRRKSFKKIGSFSLEQLQEYADADLSVVEKLKEIIIQKVDEIYKVYGSSEKLFDADFVLE

SEQ ID NO: 399 - protein, 1389 aa, synthetic construct
SDKAFYSSFMALMSLMLQMRNSITGRTDVDFLISPVKNSDGIFYDSRNYEAQENAILPKNADANGAYNIARKVLWAIGQFKKAEDEKLDKVKIAISNKEWLEYAQTSVKHGSSGSSGSSGSSGSSGSKLEKFTNCYSLSKTLRFKAIPVGKTQENIDNKRLLVEDEKRAEDYKGVKKLLDRYYLSFINDVLHSIKLKNLNNYISLFRKKTRTEKENKELENLEINLRKEIAKAFKGNEGYKSLFKKDIIETILPEFLDDKDEIALVNSFNGFTTAFTGFFDNRENMFSEEAKSTSIAFRCINENLTRYISNMDIFEKVDAIFDKHEVQEIKEKILNSDYDVEDFFEGEFFNFVLTQEGIDVYNAIIGGFVTESGEKIKGLNEYINLYNQKTKQKLPKFKPLYKQVLSDRESLSFYGSGENQTTQKGQKNSRERMKRIEEGIKELGSQILKEHPVENTQLQNEKLYLYYLQNGRDMYVDQELDINRLSDYDVDHIVPQSFLKDDSIDNKVLTRSDKNRGKSDNVPSEEVVKKMKNYWRQLLNAKLITQRKFDNLTKAERGGLSEGYTSDEEVLEVFRNTLNKNSEIFSSIKKLEKLFKNFDEYSSAGIFVKNGPAISTISKDIFGEWNVIRDKWNAEYDDIHLKKKAVVTEKYEDDRRKSFKKIGSFSLEQLQEYADADLSVVEKLKEIIIQKVDEIYKVYGSSEKLFDADFVLEKSLKKNDAVVAIMKDLLDSVKSFENYIKAFFGEGKETNRDESFYGDFVLAYDILLKVDHIYDAIRNYVTQKPYSKDKFKLYFQNPQFMGGWDKDKETDYRATILRYGSKYYLAIMDKKYAKCLQKIDKDDVNGNYEKINYKLLPGPNKMLPKVFFSKKWMAYYNPSEDIQKIYKNGTFKKGDMFNLNDCHKLIDFFKDSISRYPKWSNAYDFNFSETEKYKDIAGFYREVEEQGYKVSFESASKKEVDKLVEEGKLYMFQIYNKDFSDKSHGTPNLHTMYFKLLFDENNHGQIRLSGGAELFMRRASLKKEELVVHPANSPIANKNPDNPKKTTTLSYDVYKDKRFSEDQYELHIPIAINKCPKNIFKINTEVRVLLKHDDNPYVIGIDRGERNLLYIVVVDGKGNIVEQYSLNEIINNFNGIRIKTDYHSLLDKKEKERFEARQNWTSIENIKELKAGYISQVVHKICELVEKYDAVIALEDLNSGFKNSRVKVEKQVYQKFEKMLIDKLNYMVDKKSNPCATGGALKGYQITNKFESFKSMSTQNGFIFYIPAWLTSKIDPSTGFVNLLKTKYTSIADSKKFISSFDRIMYVPEEDLFEFALDYKNFSRTDADYIKKWKLYSYGNRIRIFRNPKKNNVFDWEEVCLTSAYKELFNKYGINYQQGDIRALLCEQ

SEQ ID NO: 400 - protein, 1371 aa, synthetic construct
SKLEKFTNCYSLSKTLRFKAIPVGKTQENIDNKRLLVEDEKRAEDYKGVKKLLDRYYLSFINDVLHSIKLKNLNNYISLFRKKTRTEKENKELENLEINLRKEIAKAFKGNEGYKSLFKKDIIETILPEFLDDKDEIALVNSFNGFTTAFTGFFDNRENMFSEEAKSTSIAFRCINENLTRYISNMDIFEKVDAIFDKHEVQEIKEKILNSDYDVEDFFEGEFFNFVLTQEGIDVYNAIIGGFVTESGEKIKGLNEYINLYNQKTKQKLPKFKPLYKQVLSDRESLSFYGENQTTQKGQKNSRERMKRIEEGIKELGSQILKEHPVENTQLQNEKLYLYYLQNGRDMYVDQELDINRLSDYDVDHIVPQSFLKDDSIDNKVLTRSDKNRGKSDNVPSEEVVKKMKNYWRQLLNAKLITQRKFDNLTKAERGGLSEGYTSDEEVLEVFRNTLNKNSEIFSSIKKLEKLFKNFDEYSSAGIFVKNGPAISTISKDIFGEWNVIRDKWNAEYDDIHLKKKAVVTEKYEDDRRKSFKKIGSFSLEQLQEYADADLSVVEKLKEIIIQKVDEIYKVYGSSEKLFDADFVLEKSLKKNDAVVAIMKDLLDSVKSFENYIKAFFGEGKETNRDESFYGDFVLAYDILLKVDHIYDAIRNYVTQKPYSKDKFKLYFQNPQFMGGWDKDKETDYRATILRYGSKYYLAIMDKKYAKCLQKIDKDDVNGNYEKINYKLLPGPNKMLPKVFFSKKWMAYYNPSEDIQKIYKNGTFKKGDMFNLNDCHKLIDFFKDSISRYPKWSNAYDFNFSETEKYKDIAGFYREVEEQGYKVSFESASKKEVDKLVEEGKLYMFQIYNKDFSDKSHGTPNLHTMYFKLLFDENNHGQIRLSGGAELFMRRASLKKEELVVHPANSPIANKNPDNPKKTTTLSYDVYKDKRFSEDQYELHIPIAINKCPKNIFKINTEVRVLLKHDDNPYVIGIDRGERNLLYIVVVDGKGNIVEQYSLNEIINNFNGIRIKTDYHSLLDKKEKERFEARQNWTSIENIKELKAGYISQVVHKICELVEKYDAVIALEDLNSGFKNSRVKVEKQVYQKFEKMLIDKLNYMVDKKSNPCATGGALKGYQITNKFESFKSMSTQNGFIFYIPAWLTSKIDPSTGFVNLLKTKYTSIADSKKFISSFDRIMYVPEEDLFEFALDYKNFSRTDADYIKKWKLYSYGNRIRIFRNPKKNNVFDWEEVCLTSAYKELFNKYGINYQQGDIRALLCEQSDKAFYSSFMALMSLMLQMRNSITGRTDVDFLISPVKNSDGIFYDSRNYEAQENAILPKNADANGAYNIARKVLWAIGQFKKAEDEKLDKVKIAISNKEWLEYAQTSVKH

SEQ ID NO: 401 - protein, 1373 aa, synthetic construct
SKLEKFTNCYSLSKTLRFKAIPVGKTQENIDNKRLLVEDEKRAEDYKGVKKLLDRYYLSFINDVLHSIKLKNLNNYISLFRKKTRTEKENKELENLEINLRKEIAKAFKGNEGYKSLFKKDIIETILPEFLDDKDEIALVNSFNGFTTAFTGFFDNRENMFSEEAKSTSIAFRCINENLTRYISNMDIFEKVDAIFDKHEVQEIKEKILNSDYDVEDFFEGEFFNFVLTQEGIDVYNAIIGGFVTESGEKIKGLNEYINLYNQKTKQKLPKFKPLYKQVLSDRESLSFYGSGENQTTQKGQKNSRERMKRIEEGIKELGSQILKEHPVENTQLQNEKLYLYYLQNGRDMYVDQELDINRLSDYDVDHIVPQSFLKDDSIDNKVLTRSDKNRGKSDNVPSEEVVKKMKNYWRQLLNAKLITQRKFDNLTKAERGGLSEGYTSDEEVLEVFRNTLNKNSEIFSSIKKLEKLFKNFDEYSSAGIFVKNGPAISTISKDIFGEWNVIRDKWNAEYDDIHLKKKAVVTEKYEDDRRKSFKKIGSFSLEQLQEYADADLSVVEKLKEIIIQKVDEIYKVYGSSEKLFDADFVLEKSLKKNDAVVAIMKDLLDSVKSFENYIKAFFGEGKETNRDESFYGDFVLAYDILLKVDHIYDAIRNYVTQKPYSKDKFKLYFQNPQFMGGWDKDKETDYRATILRYGSKYYLAIMDKKYAKCLQKIDKDDVNGNYEKINYKLLPGPNKMLPKVFFSKKWMAYYNPSEDIQKIYKNGTFKKGDMFNLNDCHKLIDFFKDSISRYPKWSNAYDFNFSETEKYKDIAGFYREVEEQGYKVSFESASKKEVDKLVEEGKLYMFQIYNKDFSDKSHGTPNLHTMYFKLLFDENNHGQIRLSGGAELFMRRASLKKEELVVHPANSPIANKNPDNPKKTTTLSYDVYKDKRFSEDQYELHIPIAINKCPKNIFKINTEVRVLLKHDDNPYVIGIDRGERNLLYIVVVDGKGNIVEQYSLNEIINNFNGIRIKTDYHSLLDKKEKERFEARQNWTSIENIKELKAGYISQVVHKICELVEKYDAVIALEDLNSGFKNSRVKVEKQVYQKFEKMLIDKLNYMVDKKSNPCATGGALKGYQITNKFESFKSMSTQNGFIFYIPAWLTSKIDPSTGFVNLLKTKYTSIADSKKFISSFDRIMYVPEEDLFEFALDYKNFSRTDADYIKKWKLYSYGNRIRIFRNPKKNNVFDWEEVCLTSAYKELFNKYGINYQQGDIRALLCEQSDKAFYSSFMALMSLMLQMRNSITGRTDVDFLISPVKNSDGIFYDSRNYEAQENAILPKNADANGAYNIARKVLWAIGQFKKAEDEKLDKVKIAISNKEWLEYAQTSVKH

SEQ ID NO: 402 - DNA, 4161 bp, synthetic construct
  source 1..4161: mol_type = other DNA
cgcaccgagaaggagaacaaggagctggagaacctggagatcaacctccgcaaggaaatcgccaaagcgttcaagggcaatgaagggtacaagagcctcttcaagaaagacatcatcgaaactatcctcccagagtttctcgatgacaaggacgagatcgcgctggtgaactcctttaacgggttcacaaccgcgtttaccggcttctttgataacagggaaaatatgttctccgaggaggccaagtccaccagcatcgccttcaggtgtatcaacgagaacctcacccgctacatttccaatatggacattttcgagaaggtggatgcgatcttcgataagcacgaggtgcaggagatcaaagagaagattctcaattccgattatgacgtcgaggatttcttcgaaggggagttctttaattttgtgctcacacaagagggcattgacgtgtacaacgcgattatcgggggcttcgtcacagagtccggggagaagattaaggggctgaatgagtacatcaatctgtacaatcagaagaccaagcagaaactgccgaaattcaagccgctctacaagcaagtcctgtccgatagggaaagcctctccttctacggcgagaaccagaccacccagaagggacagaagaacagccgcgagagaatgaagcggatcgaagagggcatcaaagagctgggcagccagatcctgaaagaacaccccgtggaaaacacccagctgcagaacgagaagctgtacctgtactacctgcagaatgggcgggatatgtacgtggaccaggaactggacatcaaccggctgtccgactacgatgtggaccatatcgtgcctcagagctttctgaaggacgactccatcgacaacaaggtgctgaccagaagcgacaagaaccggggcaagagcgacaacgtgccctccgaagaggtcgtgaagaagatgaagaactactggcggcagctgctgaacgccaagctgattacccagagaaagttcgacaatctgaccaaggccgagagaggcggcctgagcgagggctataccagcgacgaggaggtgctggaagtcttccgcaacacactgaataagaatagcgagattttctcctccatcaagaagctcgagaagctctttaagaactttgacgagtacagctccgccgggattttcgtgaagaacgggccggcgatcagcaccatctccaaggacatctttggcgagtggaacgtcatcagggacaagtggaacgccgagtacgacgacatccacctgaagaagaaggcggtggtgaccgagaagtatgaggacgatcgcaggaagtccttcaaaaaaatcggctccttcagcctcgaacagctccaggagtatgccgatgcggatctgtccgtcgtcgagaagctgaaggaaatcatcattcagaaggtcgacgagatctataaagtgtacgggtccagcgagaagctgttcgacgccgactttgtgctcgagaagtccctcaaaaagaatgacgccgtggtggccattatgaaagacctgctcgactccgtgaagtccttcgaaaattacattaaagcgttctttggggaggggaaggaaactaacagggatgagtccttctatggcgactttgtcctcgcgtacgacatcctgctgaaggtcgaccacatttacgacgcgatccgcaactacgtgacacagaagccgtactccaaagacaagttcaagctgtacttccagaacccgcaatttatggggggctgggacaaggataaagagacagactaccgcgcgacaattctccgctatggctccaaatactatctggccatcatggacaagaagtacgcgaagtgcctgcagaagatcgacaaagacgacgtcaatggcaactatgaaaagatcaactacaagctgctgccgggcccgaacaagatgctcccgaaggtgttcttcagcaagaagtggatggcctactacaatccaagcgaggatattcagaaaatctataaaaacgggaccttcaagaagggggacatgtttaacctcaacgactgccacaagctcattgatttcttcaaggatagcatttcccgctacccgaaatggtccaatgcgtacgattttaacttctccgagacagaaaagtacaaagacatcgcgggcttttacagggaggtggaggagcaagggtataaagtttcttttgaatccgcgagcaagaaggaagtcgacaagctcgtcgaggagggcaagctctacatgttccaaatttataacaaggacttttccgacaagagccatgggaccccaaacctccacaccatgtacttcaaactgctctttgacgagaacaaccacgggcaaatcaggctgagcggcggcgccgaattattcatgcgcagggcctccctcaagaaggaagagctggtcgtccatccagccaattccccgatcgcgaacaagaacccggacaatccgaaaaagaccaccaccctgtcctacgacgtctacaaggacaaacgcttcagcgaagaccagtacgaattacacatcccaattgcgattaataagtgcccaaagaatatcttcaaaattaatacagaggtcagggtgctgctcaaacacgacgacaatccgtatgtcatcggcattgacaggggcgagcgcaatctgctctatatcgtggtcgtggatgggaagggcaatattgtggagcagtactccctgaacgagattatcaacaacttcaatgggattaggattaagaccgactatcacagcctgctcgacaagaaagaaaaagagaggtttgaggcccgccaaaactggacctccattgagaatatcaaagaattaaaggccggctatatttcccaagtcgtccacaagatctgcgagctggtggagaaatatgacgccgtgattgcgctcgaagacttaaattctgggttcaagaactcccgcgtgaaggtggaaaaacaggtgtatcagaaattcgagaaaatgctgatcgacaaactcaattatatggtggataagaagtccaacccgtgtgccacagggggcgcgctgaagggctatcagatcaccaacaagttcgagagcttcaagagcatgagcacccagaacgggtttattttctacatcccggcgtggctcacctccaagattgacccgagcaccggcttcgtgaacctcctgaagacaaagtatacctccattgccgacagcaagaagtttatctcctccttcgaccgcattatgtatgtgccggaggaggacctcttcgagttcgccctcgactacaaaaacttcagccgcacagatgcggattacatcaagaagtggaagctgtactcctacgggaacaggatccgcatcttcaggaatccaaaaaaaaataacgtctttgactgggaggaagtgtgcctgacatccgcctacaaggaactgttcaataaatacggcatcaattaccagcagggcgacattcgcgccctcctctgtgagcagtccgacaaagcgttttactccagcttcatggccctcatgtccctgatgctccaaatgaggaatagcatcacagggcgcaccgacgtcgacttcctcatcagcccggtgaagaactccgacgggatcttttacgactcccgcaactatgaggcgcaagagaatgcgatcctcccgaagaacgccgatgcgaacggggcctataatatcgccaggaaagtgctctgggccatcgggcagttcaaaaaggcggaggatgagaagctcgacaaggtgaaaattgccatttccaacaaggagtggctggagtacgcgcagacctccgtgaagcacggctcctctggcagctccggctctagcggctcctctggcagctccggctccaagctggagaagtttacaaactgttacagcctctccaaaaccctcaggtttaaagcgatcccggtgggcaagacccaggagaacatcgacaacaagaggctcctggtggaagacgagaagcgcgccgaagactacaagggcgtgaagaagctgctcgataggtactacctcagctttattaacgacgtgctgcacagcatcaaactcaagaatctcaacaactacatctccctcttccgcaaaaagacc

SEQ ID NO: 403 - DNA, 4161 bp, synthetic construct
  source 1..4161: mol_type = other DNA
tccgacgggatcttttacgactcccgcaactatgaggcgcaagagaatgcgatcctcccgaagaacgccgatgcgaacggggcctataatatcgccaggaaagtgctctgggccatcgggcagttcaaaaaggcggaggatgagaagctcgacaaggtgaaaattgccatttccaacaaggagtggctggagtacgcgcagacctccgtgaagcacggctcctctggcagctccggctctagcggctcctctggcagctccggctccaagctggagaagtttacaaactgttacagcctctccaaaaccctcaggtttaaagcgatcccggtgggcaagacccaggagaacatcgacaacaagaggctcctggtggaagacgagaagcgcgccgaagactacaagggcgtgaagaagctgctcgataggtactacctcagctttattaacgacgtgctgcacagcatcaaactcaagaatctcaacaactacatctccctcttccgcaaaaagacccgcaccgagaaggagaacaaggagctggagaacctggagatcaacctccgcaaggaaatcgccaaagcgttcaagggcaatgaagggtacaagagcctcttcaagaaagacatcatcgaaactatcctcccagagtttctcgatgacaaggacgagatcgcgctggtgaactcctttaacgggttcacaaccgcgtttaccggcttctttgataacagggaaaatatgttctccgaggaggccaagtccaccagcatcgccttcaggtgtatcaacgagaacctcacccgctacatttccaatatggacattttcgagaaggtggatgcgatcttcgataagcacgaggtgcaggagatcaaagagaagattctcaattccgattatgacgtcgaggatttcttcgaaggggagttctttaattttgtgctcacacaagagggcattgacgtgtacaacgcgattatcgggggcttcgtcacagagtccggggagaagattaaggggctgaatgagtacatcaatctgtacaatcagaagaccaagcagaaactgccgaaattcaagccgctctacaagcaagtcctgtccgatagggaaagcctctccttctacggcgagaaccagaccacccagaagggacagaagaacagccgcgagagaatgaagcggatcgaagagggcatcaaagagctgggcagccagatcctgaaagaacaccccgtggaaaacacccagctgcagaacgagaagctgtacctgtactacctgcagaatgggcgggatatgtacgtggaccaggaactggacatcaaccggctgtccgactacgatgtggaccatatcgtgcctcagagctttctgaaggacgactccatcgacaacaaggtgctgaccagaagcgacaagaaccggggcaagagcgacaacgtgccctccgaagaggtcgtgaagaagatgaagaactactggcggcagctgctgaacgccaagctgattacccagagaaagttcgacaatctgaccaaggccgagagaggcggcctgagcgagggctataccagcgacgaggaggtgctggaagtcttccgcaacacactgaataagaatagcgagattttctcctccatcaagaagctcgagaagctctttaagaactttgacgagtacagctccgccgggattttcgtgaagaacgggccggcgatcagcaccatctccaaggacatctttggcgagtggaacgtcatcagggacaagtggaacgccgagtacgacgacatccacctgaagaagaaggcggtggtgaccgagaagtatgaggacgatcgcaggaagtccttcaaaaaaatcggctccttcagcctcgaacagctccaggagtatgccgatgcggatctgtccgtcgtcgagaagctgaaggaaatcatcattcagaaggtcgacgagatctataaagtgtacgggtccagcgagaagctgttcgacgccgactttgtgctcgagaagtccctcaaaaagaatgacgccgtggtggccattatgaaagacctgctcgactccgtgaagtccttcgaaaattacattaaagcgttctttggggaggggaaggaaactaacagggatgagtccttctatggcgactttgtcctcgcgtacgacatcctgctgaaggtcgaccacatttacgacgcgatccgcaactacgtgacacagaagccgtactccaaagacaagttcaagctgtacttccagaacccgcaatttatggggggctgggacaaggataaagagacagactaccgcgcgacaattctccgctatggctccaaatactatctggccatcatggacaagaagtacgcgaagtgcctgcagaagatcgacaaagacgacgtcaatggcaactatgaaaagatcaactacaagctgctgccgggcccgaacaagatgctcccgaaggtgttcttcagcaagaagtggatggcctactacaatccaagcgaggatattcagaaaatctataaaaacgggaccttcaagaagggggacatgtttaacctcaacgactgccacaagctcattgatttcttcaaggatagcatttcccgctacccgaaatggtccaatgcgtacgattttaacttctccgagacagaaaagtacaaagacatcgcgggcttttacagggaggtggaggagcaagggtataaagtttcttttgaatccgcgagcaagaaggaagtcgacaagctcgtcgaggagggcaagctctacatgttccaaatttataacaaggacttttccgacaagagccatgggaccccaaacctccacaccatgtacttcaaactgctctttgacgagaacaaccacgggcaaatcaggctgagcggcggcgccgaattattcatgcgcagggcctccctcaagaaggaagagctggtcgtccatccagccaattccccgatcgcgaacaagaacccggacaatccgaaaaagaccaccaccctgtcctacgacgtctacaaggacaaacgcttcagcgaagaccagtacgaattacacatcccaattgcgattaataagtgcccaaagaatatcttcaaaattaatacagaggtcagggtgctgctcaaacacgacgacaatccgtatgtcatcggcattgacaggggcgagcgcaatctgctctatatcgtggtcgtggatgggaagggcaatattgtggagcagtactccctgaacgagattatcaacaacttcaatgggattaggattaagaccgactatcacagcctgctcgacaagaaagaaaaagagaggtttgaggcccgccaaaactggacctccattgagaatatcaaagaattaaaggccggctatatttcccaagtcgtccacaagatctgcgagctggtggagaaatatgacgccgtgattgcgctcgaagacttaaattctgggttcaagaactcccgcgtgaaggtggaaaaacaggtgtatcagaaattcgagaaaatgctgatcgacaaactcaattatatggtggataagaagtccaacccgtgtgccacagggggcgcgctgaagggctatcagatcaccaacaagttcgagagcttcaagagcatgagcacccagaacgggtttattttctacatcccggcgtggctcacctccaagattgacccgagcaccggcttcgtgaacctcctgaagacaaagtatacctccattgccgacagcaagaagtttatctcctccttcgaccgcattatgtatgtgccggaggaggacctcttcgagttcgccctcgactacaaaaacttcagccgcacagatgcggattacatcaagaagtggaagctgtactcctacgggaacaggatccgcatcttcaggaatccaaaaaaaaataacgtctttgactgggaggaagtgtgcctgacatccgcctacaaggaactgttcaataaatacggcatcaattaccagcagggcgacattcgcgccctcctctgtgagcagtccgacaaagcgttttactccagcttcatggccctcatgtccctgatgctccaaatgaggaatagcatcacagggcgcaccgacgtcgacttcctcatcagcccggtgaagaac

SEQ ID NO: 404 - DNA, 4161 bp, synthetic construct
  source 1..4161: mol_type = other DNA
aaagacaagttcaagctgtacttccagaacccgcaatttatggggggctgggacaaggataaagagacagactaccgcgcgacaattctccgctatggctccaaatactatctggccatcatggacaagaagtacgcgaagtgcctgcagaagatcgacaaagacgacgtcaatggcaactatgaaaagatcaactacaagctgctgccgggcccgaacaagatgctcccgaaggtgttcttcagcaagaagtggatggcctactacaatccaagcgaggatattcagaaaatctataaaaacgggaccttcaagaagggggacatgtttaacctcaacgactgccacaagctcattgatttcttcaaggatagcatttcccgctacccgaaatggtccaatgcgtacgattttaacttctccgagacagaaaagtacaaagacatcgcgggcttttacagggaggtggaggagcaagggtataaagtttcttttgaatccgcgagcaagaaggaagtcgacaagctcgtcgaggagggcaagctctacatgttccaaatttataacaaggacttttccgacaagagccatgggaccccaaacctccacaccatgtacttcaaactgctctttgacgagaacaaccacgggcaaatcaggctgagcggcggcgccgaattattcatgcgcagggcctccctcaagaaggaagagctggtcgtccatccagccaattccccgatcgcgaacaagaacccggacaatccgaaaaagaccaccaccctgtcctacgacgtctacaaggacaaacgcttcagcgaagaccagtacgaattacacatcccaattgcgattaataagtgcccaaagaatatcttcaaaattaatacagaggtcagggtgctgctcaaacacgacgacaatccgtatgtcatcggcattgacaggggcgagcgcaatctgctctatatcgtggtcgtggatgggaagggcaatattgtggagcagtactccctgaacgagattatcaacaacttcaatgggattaggattaagaccgactatcacagcctgctcgacaagaaagaaaaagagaggtttgaggcccgccaaaactggacctccattgagaatatcaaagaattaaaggccggctatatttcccaagtcgtccacaagatctgcgagctggtggagaaatatgacgccgtgattgcgctcgaagacttaaattctgggttcaagaactcccgcgtgaaggtggaaaaacaggtgtatcagaaattcgagaaaatgctgatcgacaaactcaattatatggtggataagaagtccaacccgtgtgccacagggggcgcgctgaagggctatcagatcaccaacaagttcgagagcttcaagagcatgagcacccagaacgggtttattttctacatcccggcgtggctcacctccaagattgacccgagcaccggcttcgtgaacctcctgaagacaaagtatacctccattgccgacagcaagaagtttatctcctccttcgaccgcattatgtatgtgccggaggaggacctcttcgagttcgccctcgactacaaaaacttcagccgcacagatgcggattacatcaagaagtggaagctgtactcctacgggaacaggatccgcatcttcaggaatccaaaaaaaaataacgtctttgactgggaggaagtgtgcctgacatccgcctacaaggaactgttcaataaatacggcatcaattaccagcagggcgacattcgcgccctcctctgtgagcagtccgacaaagcgttttactccagcttcatggccctcatgtccctgatgctccaaatgaggaatagcatcacagggcgcaccgacgtcgacttcctcatcagcccggtgaagaactccgacgggatcttttacgactcccgcaactatgaggcgcaagagaatgcgatcctcccgaagaacgccgatgcgaacggggcctataatatcgccaggaaagtgctctgggccatcgggcagttcaaaaaggcggaggatgagaagctcgacaaggtgaaaattgccatttccaacaaggagtggctggagtacgcgcagacctccgtgaagcacggctcctctggcagctccggctctagcggctcctctggcagctccggctccaagctggagaagtttacaaactgttacagcctctccaaaaccctcaggtttaaagcgatcccggtgggcaagacccaggagaacatcgacaacaagaggctcctggtggaagacgagaagcgcgccgaagactacaagggcgtgaagaagctgctcgataggtactacctcagctttattaacgacgtgctgcacagcatcaaactcaagaatctcaacaactacatctccctcttccgcaaaaagacccgcaccgagaaggagaacaaggagctggagaacctggagatcaacctccgcaaggaaatcgccaaagcgttcaagggcaatgaagggtacaagagcctcttcaagaaagacatcatcgaaactatcctcccagagtttctcgatgacaaggacgagatcgcgctggtgaactcctttaacgggttcacaaccgcgtttaccggcttctttgataacagggaaaatatgttctccgaggaggccaagtccaccagcatcgccttcaggtgtatcaacgagaacctcacccgctacatttccaatatggacattttcgagaaggtggatgcgatcttcgataagcacgaggtgcaggagatcaaagagaagattctcaattccgattatgacgtcgaggatttcttcgaaggggagttctttaattttgtgctcacacaagagggcattgacgtgtacaacgcgattatcgggggcttcgtcacagagtccggggagaagattaaggggctgaatgagtacatcaatctgtacaatcagaagaccaagcagaaactgccgaaattcaagccgctctacaagcaagtcctgtccgatagggaaagcctctccttctacggcgagaaccagaccacccagaagggacagaagaacagccgcgagagaatgaagcggatcgaagagggcatcaaagagctgggcagccagatcctgaaagaacaccccgtggaaaacacccagctgcagaacgagaagctgtacctgtactacctgcagaatgggcgggatatgtacgtggaccaggaactggacatcaaccggctgtccgactacgatgtggaccatatcgtgcctcagagctttctgaaggacgactccatcgacaacaaggtgctgaccagaagcgacaagaaccggggcaagagcgacaacgtgccctccgaagaggtcgtgaagaagatgaagaactactggcggcagctgctgaacgccaagctgattacccagagaaagttcgacaatctgaccaaggccgagagaggcggcctgagcgagggctataccagcgacgaggaggtgctggaagtcttccgcaacacactgaataagaatagcgagattttctcctccatcaagaagctcgagaagctctttaagaactttgacgagtacagctccgccgggattttcgtgaagaacgggccggcgatcagcaccatctccaaggacatctttggcgagtggaacgtcatcagggacaagtggaacgccgagtacgacgacatccacctgaagaagaaggcggtggtgaccgagaagtatgaggacgatcgcaggaagtccttcaaaaaaatcggctccttcagcctcgaacagctccaggagtatgccgatgcggatctgtccgtcgtcgagaagctgaaggaaatcatcattcagaaggtcgacgagatctataaagtgtacgggtccagcgagaagctgttcgacgccgactttgtgctcgagaagtccctcaaaaagaatgacgccgtggtggccattatgaaagacctgctcgactccgtgaagtccttcgaaaattacattaaagcgttctttggggaggggaaggaaactaacagggatgagtccttctatggcgactttgtcctcgcgtacgacatcctgctgaaggtcgaccacatttacgacgcgatccgcaactacgtgacacagaagccgtactcc

SEQ ID NO: 405 - DNA, 4161 bp, synthetic construct
  source 1..4161: mol_type = other DNA
aagtccctcaaaaagaatgacgccgtggtggccattatgaaagacctgctcgactccgtgaagtccttcgaaaattacattaaagcgttctttggggaggggaaggaaactaacagggatgagtccttctatggcgactttgtcctcgcgtacgacatcctgctgaaggtcgaccacatttacgacgcgatccgcaactacgtgacacagaagccgtactccaaagacaagttcaagctgtacttccagaacccgcaatttatggggggctgggacaaggataaagagacagactaccgcgcgacaattctccgctatggctccaaatactatctggccatcatggacaagaagtacgcgaagtgcctgcagaagatcgacaaagacgacgtcaatggcaactatgaaaagatcaactacaagctgctgccgggcccgaacaagatgctcccgaaggtgttcttcagcaagaagtggatggcctactacaatccaagcgaggatattcagaaaatctataaaaacgggaccttcaagaagggggacatgtttaacctcaacgactgccacaagctcattgatttcttcaaggatagcatttcccgctacccgaaatggtccaatgcgtacgattttaacttctccgagacagaaaagtacaaagacatcgcgggcttttacagggaggtggaggagcaagggtataaagtttcttttgaatccgcgagcaagaaggaagtcgacaagctcgtcgaggagggcaagctctacatgttccaaatttataacaaggacttttccgacaagagccatgggaccccaaacctccacaccatgtacttcaaactgctctttgacgagaacaaccacgggcaaatcaggctgagcggcggcgccgaattattcatgcgcagggcctccctcaagaaggaagagctggtcgtccatccagccaattccccgatcgcgaacaagaacccggacaatccgaaaaagaccaccaccctgtcctacgacgtctacaaggacaaacgcttcagcgaagaccagtacgaattacacatcccaattgcgattaataagtgcccaaagaatatcttcaaaattaatacagaggtcagggtgctgctcaaacacgacgacaatccgtatgtcatcggcattgacaggggcgagcgcaatctgctctatatcgtggtcgtggatgggaagggcaatattgtggagcagtactccctgaacgagattatcaacaacttcaatgggattaggattaagaccgactatcacagcctgctcgacaagaaagaaaaagagaggtttgaggcccgccaaaactggacctccattgagaatatcaaagaattaaaggccggctatatttcccaagtcgtccacaagatctgcgagctggtggagaaatatgacgccgtgattgcgctcgaagacttaaattctgggttcaagaactcccgcgtgaaggtggaaaaacaggtgtatcagaaattcgagaaaatgctgatcgacaaactcaattatatggtggataagaagtccaacccgtgtgccacagggggcgcgctgaagggctatcagatcaccaacaagttcgagagcttcaagagcatgagcacccagaacgggtttattttctacatcccggcgtggctcacctccaagattgacccgagcaccggcttcgtgaacctcctgaagacaaagtatacctccattgccgacagcaagaagtttatctcctccttcgaccgcattatgtatgtgccggaggaggacctcttcgagttcgccctcgactacaaaaacttcagccgcacagatgcggattacatcaagaagtggaagctgtactcctacgggaacaggatccgcatcttcaggaatccaaaaaaaaataacgtctttgactgggaggaagtgtgcctgacatccgcctacaaggaactgttcaataaatacggcatcaattaccagcagggcgacattcgcgccctcctctgtgagcagtccgacaaagcgttttactccagcttcatggccctcatgtccctgatgctccaaatgaggaatagcatcacagggcgcaccgacgtcgacttcctcatcagcccggtgaagaactccgacgggatcttttacgactcccgcaactatgaggcgcaagagaatgcgatcctcccgaagaacgccgatgcgaacggggcctataatatcgccaggaaagtgctctgggccatcgggcagttcaaaaaggcggaggatgagaagctcgacaaggtgaaaattgccatttccaacaaggagtggctggagtacgcgcagacctccgtgaagcacggctcctctggcagctccggctctagcggctcctctggcagctccggctccaagctggagaagtttacaaactgttacagcctctccaaaaccctcaggtttaaagcgatcccggtgggcaagacccaggagaacatcgacaacaagaggctcctggtggaagacgagaagcgcgccgaagactacaagggcgtgaagaagctgctcgataggtactacctcagctttattaacgacgtgctgcacagcatcaaactcaagaatctcaacaactacatctccctcttccgcaaaaagacccgcaccgagaaggagaacaaggagctggagaacctggagatcaacctccgcaaggaaatcgccaaagcgttcaagggcaatgaagggtacaagagcctcttcaagaaagacatcatcgaaactatcctcccagagtttctcgatgacaaggacgagatcgcgctggtgaactcctttaacgggttcacaaccgcgtttaccggcttctttgataacagggaaaatatgttctccgaggaggccaagtccaccagcatcgccttcaggtgtatcaacgagaacctcacccgctacatttccaatatggacattttcgagaaggtggatgcgatcttcgataagcacgaggtgcaggagatcaaagagaagattctcaattccgattatgacgtcgaggatttcttcgaaggggagttctttaattttgtgctcacacaagagggcattgacgtgtacaacgcgattatcgggggcttcgtcacagagtccggggagaagattaaggggctgaatgagtacatcaatctgtacaatcagaagaccaagcagaaactgccgaaattcaagccgctctacaagcaagtcctgtccgatagggaaagcctctccttctacggcgagaaccagaccacccagaagggacagaagaacagccgcgagagaatgaagcggatcgaagagggcatcaaagagctgggcagccagatcctgaaagaacaccccgtggaaaacacccagctgcagaacgagaagctgtacctgtactacctgcagaatgggcgggatatgtacgtggaccaggaactggacatcaaccggctgtccgactacgatgtggaccatatcgtgcctcagagctttctgaaggacgactccatcgacaacaaggtgctgaccagaagcgacaagaaccggggcaagagcgacaacgtgccctccgaagaggtcgtgaagaagatgaagaactactggcggcagctgctgaacgccaagctgattacccagagaaagttcgacaatctgaccaaggccgagagaggcggcctgagcgagggctataccagcgacgaggaggtgctggaagtcttccgcaacacactgaataagaatagcgagattttctcctccatcaagaagctcgagaagctctttaagaactttgacgagtacagctccgccgggattttcgtgaagaacgggccggcgatcagcaccatctccaaggacatctttggcgagtggaacgtcatcagggacaagtggaacgccgagtacgacgacatccacctgaagaagaaggcggtggtgaccgagaagtatgaggacgatcgcaggaagtccttcaaaaaaatcggctccttcagcctcgaacagctccaggagtatgccgatgcggatctgtccgtcgtcgagaagctgaaggaaatcatcattcagaaggtcgacgagatctataaagtgtacgggtccagcgagaagctgttcgacgccgactttgtgctcgag

SEQ ID NO: 406 - DNA, 4161 bp, synthetic construct
  source 1..4161: mol_type = other DNA
tccgacaaagcgttttactccagcttcatggccctcatgtccctgatgctccaaatgaggaatagcatcacagggcgcaccgacgtcgacttcctcatcagcccggtgaagaactccgacgggatcttttacgactcccgcaactatgaggcgcaagagaatgcgatcctcccgaagaacgccgatgcgaacggggcctataatatcgccaggaaagtgctctgggccatcgggcagttcaaaaaggcggaggatgagaagctcgacaaggtgaaaattgccatttccaacaaggagtggctggagtacgcgcagacctccgtgaagcacggctcctctggcagctccggctctagcggctcctctggcagctccggctccaagctggagaagtttacaaactgttacagcctctccaaaaccctcaggtttaaagcgatcccggtgggcaagacccaggagaacatcgacaacaagaggctcctggtggaagacgagaagcgcgccgaagactacaagggcgtgaagaagctgctcgataggtactacctcagctttattaacgacgtgctgcacagcatcaaactcaagaatctcaacaactacatctccctcttccgcaaaaagacccgcaccgagaaggagaacaaggagctggagaacctggagatcaacctccgcaaggaaatcgccaaagcgttcaagggcaatgaagggtacaagagcctcttcaagaaagacatcatcgaaactatcctcccagagtttctcgatgacaaggacgagatcgcgctggtgaactcctttaacgggttcacaaccgcgtttaccggcttctttgataacagggaaaatatgttctccgaggaggccaagtccaccagcatcgccttcaggtgtatcaacgagaacctcacccgctacatttccaatatggacattttcgagaaggtggatgcgatcttcgataagcacgaggtgcaggagatcaaagagaagattctcaattccgattatgacgtcgaggatttcttcgaaggggagttctttaattttgtgctcacacaagagggcattgacgtgtacaacgcgattatcgggggcttcgtcacagagtccggggagaagattaaggggctgaatgagtacatcaatctgtacaatcagaagaccaagcagaaactgccgaaattcaagccgctctacaagcaagtcctgtccgatagggaaagcctctccttctacggcgagaaccagaccacccagaagggacagaagaacagccgcgagagaatgaagcggatcgaagagggcatcaaagagctgggcagccagatcctgaaagaacaccccgtggaaaacacccagctgcagaacgagaagctgtacctgtactacctgcagaatgggcgggatatgtacgtggaccaggaactggacatcaaccggctgtccgactacgatgtggaccatatcgtgcctcagagctttctgaaggacgactccatcgacaacaaggtgctgaccagaagcgacaagaaccggggcaagagcgacaacgtgccctccgaagaggtcgtgaagaagatgaagaactactggcggcagctgctgaacgccaagctgattacccagagaaagttcgacaatctgaccaaggccgagagaggcggcctgagcgagggctataccagcgacgaggaggtgctggaagtcttccgcaacacactgaataagaatagcgagattttctcctccatcaagaagctcgagaagctctttaagaactttgacgagtacagctccgccgggattttcgtgaagaacgggccggcgatcagcaccatctccaaggacatctttggcgagtggaacgtcatcagggacaagtggaacgccgagtacgacgacatccacctgaagaagaaggcggtggtgaccgagaagtatgaggacgatcgcaggaagtccttcaaaaaaatcggctccttcagcctcgaacagctccaggagtatgccgatgcggatctgtccgtcgtcgagaagctgaaggaaatcatcattcagaaggtcgacgagatctataaagtgtacgggtccagcgagaagctgttcgacgccgactttgtgctcgagaagtccctcaaaaagaatgacgccgtggtggccattatgaaagacctgctcgactccgtgaagtccttcgaaaattacattaaagcgttctttggggaggggaaggaaactaacagggatgagtccttctatggcgactttgtcctcgcgtacgacatcctgctgaaggtcgaccacatttacgacgcgatccgcaactacgtgacacagaagccgtactccaaagacaagttcaagctgtacttccagaacccgcaatttatggggggctgggacaaggataaagagacagactaccgcgcgacaattctccgctatggctccaaatactatctggccatcatggacaagaagtacgcgaagtgcctgcagaagatcgacaaagacgacgtcaatggcaactatgaaaagatcaactacaagctgctgccgggcccgaacaagatgctcccgaaggtgttcttcagcaagaagtggatggcctactacaatccaagcgaggatattcagaaaatctataaaaacgggaccttcaagaagggggacatgtttaacctcaacgactgccacaagctcattgatttcttcaaggatagcatttcccgctacccgaaatggtccaatgcgtacgattttaacttctccgagacagaaaagtacaaagacatcgcgggcttttacagggaggtggaggagcaagggtataaagtttcttttgaatccgcgagcaagaaggaagtcgacaagctcgtcgaggagggcaagctctacatgttccaaatttataacaaggacttttccgacaagagccatgggaccccaaacctccacaccatgtacttcaaactgctctttgacgagaacaaccacgggcaaatcaggctgagcggcggcgccgaattattcatgcgcagggcctccctcaagaaggaagagctggtcgtccatccagccaattccccgatcgcgaacaagaacccggacaatccgaaaaagaccaccaccctgtcctacgacgtctacaaggacaaacgcttcagcgaagaccagtacgaattacacatcccaattgcgattaataagtgcccaaagaatatcttcaaaattaatacagaggtcagggtgctgctcaaacacgacgacaatccgtatgtcatcggcattgacaggggcgagcgcaatctgctctatatcgtggtcgtggatgggaagggcaatattgtggagcagtactccctgaacgagattatcaacaacttcaatgggattaggattaagaccgactatcacagcctgctcgacaagaaagaaaaagagaggtttgaggcccgccaaaactggacctccattgagaatatcaaagaattaaaggccggctatatttcccaagtcgtccacaagatctgcgagctggtggagaaatatgacgccgtgattgcgctcgaagacttaaattctgggttcaagaactcccgcgtgaaggtggaaaaacaggtgtatcagaaattcgagaaaatgctgatcgacaaactcaattatatggtggataagaagtccaacccgtgtgccacagggggcgcgctgaagggctatcagatcaccaacaagttcgagagcttcaagagcatgagcacccagaacgggtttattttctacatcccggcgtggctcacctccaagattgacccgagcaccggcttcgtgaacctcctgaagacaaagtatacctccattgccgacagcaagaagtttatctcctccttcgaccgcattatgtatgtgccggaggaggacctcttcgagttcgccctcgactacaaaaacttcagccgcacagatgcggattacatcaagaagtggaagctgtactcctacgggaacaggatccgcatcttcaggaatccaaaaaaaaataacgtctttgactgggaggaagtgtgcctgacatccgcctacaaggaactgttcaataaatacggcatcaattaccagcagggcgacattcgcgccctcctctgtgagcag

SEQ ID NO: 407 - DNA, 4167 bp, synthetic construct
  source 1..4167: mol_type = other DNA
cgcaccgagaaggagaacaaggagctggagaacctggagatcaacctccgcaaggaaatcgccaaagcgttcaagggcaatgaagggtacaagagcctcttcaagaaagacatcatcgaaactatcctcccagagtttctcgatgacaaggacgagatcgcgctggtgaactcctttaacgggttcacaaccgcgtttaccggcttctttgataacagggaaaatatgttctccgaggaggccaagtccaccagcatcgccttcaggtgtatcaacgagaacctcacccgctacatttccaatatggacattttcgagaaggtggatgcgatcttcgataagcacgaggtgcaggagatcaaagagaagattctcaattccgattatgacgtcgaggatttcttcgaaggggagttctttaattttgtgctcacacaagagggcattgacgtgtacaacgcgattatcgggggcttcgtcacagagtccggggagaagattaaggggctgaatgagtacatcaatctgtacaatcagaagaccaagcagaaactgccgaaattcaagccgctctacaagcaagtcctgtccgatagggaaagcctctccttctacggcagcggcgagaaccagaccacccagaagggacagaagaacagccgcgagagaatgaagcggatcgaagagggcatcaaagagctgggcagccagatcctgaaagaacaccccgtggaaaacacccagctgcagaacgagaagctgtacctgtactacctgcagaatgggcgggatatgtacgtggaccaggaactggacatcaaccggctgtccgactacgatgtggaccatatcgtgcctcagagctttctgaaggacgactccatcgacaacaaggtgctgaccagaagcgacaagaaccggggcaagagcgacaacgtgccctccgaagaggtcgtgaagaagatgaagaactactggcggcagctgctgaacgccaagctgattacccagagaaagttcgacaatctgaccaaggccgagagaggcggcctgagcgagggctataccagcgacgaggaggtgctggaagtcttccgcaacacactgaataagaatagcgagattttctcctccatcaagaagctcgagaagctctttaagaactttgacgagtacagctccgccgggattttcgtgaagaacgggccggcgatcagcaccatctccaaggacatctttggcgagtggaacgtcatcagggacaagtggaacgccgagtacgacgacatccacctgaagaagaaggcggtggtgaccgagaagtatgaggacgatcgcaggaagtccttcaaaaaaatcggctccttcagcctcgaacagctccaggagtatgccgatgcggatctgtccgtcgtcgagaagctgaaggaaatcatcattcagaaggtcgacgagatctataaagtgtacgggtccagcgagaagctgttcgacgccgactttgtgctcgagaagtccctcaaaaagaatgacgccgtggtggccattatgaaagacctgctcgactccgtgaagtccttcgaaaattacattaaagcgttctttggggaggggaaggaaactaacagggatgagtccttctatggcgactttgtcctcgcgtacgacatcctgctgaaggtcgaccacatttacgacgcgatccgcaactacgtgacacagaagccgtactccaaagacaagttcaagctgtacttccagaacccgcaatttatggggggctgggacaaggataaagagacagactaccgcgcgacaattctccgctatggctccaaatactatctggccatcatggacaagaagtacgcgaagtgcctgcagaagatcgacaaagacgacgtcaatggcaactatgaaaagatcaactacaagctgctgccgggcccgaacaagatgctcccgaaggtgttcttcagcaagaagtggatggcctactacaatccaagcgaggatattcagaaaatctataaaaacgggaccttcaagaagggggacatgtttaacctcaacgactgccacaagctcattgatttcttcaaggatagcatttcccgctacccgaaatggtccaatgcgtacgattttaacttctccgagacagaaaagtacaaagacatcgcgggcttttacagggaggtggaggagcaagggtataaagtttcttttgaatccgcgagcaagaaggaagtcgacaagctcgtcgaggagggcaagctctacatgttccaaatttataacaaggacttttccgacaagagccatgggaccccaaacctccacaccatgtacttcaaactgctctttgacgagaacaaccacgggcaaatcaggctgagcggcggcgccgaattattcatgcgcagggcctccctcaagaaggaagagctggtcgtccatccagccaattccccgatcgcgaacaagaacccggacaatccgaaaaagaccaccaccctgtcctacgacgtctacaaggacaaacgcttcagcgaagaccagtacgaattacacatcccaattgcgattaataagtgcccaaagaatatcttcaaaattaatacagaggtcagggtgctgctcaaacacgacgacaatccgtatgtcatcggcattgacaggggcgagcgcaatctgctctatatcgtggtcgtggatgggaagggcaatattgtggagcagtactccctgaacgagattatcaacaacttcaatgggattaggattaagaccgactatcacagcctgctcgacaagaaagaaaaagagaggtttgaggcccgccaaaactggacctccattgagaatatcaaagaattaaaggccggctatatttcccaagtcgtccacaagatctgcgagctggtggagaaatatgacgccgtgattgcgctcgaagacttaaattctgggttcaagaactcccgcgtgaaggtggaaaaacaggtgtatcagaaattcgagaaaatgctgatcgacaaactcaattatatggtggataagaagtccaacccgtgtgccacagggggcgcgctgaagggctatcagatcaccaacaagttcgagagcttcaagagcatgagcacccagaacgggtttattttctacatcccggcgtggctcacctccaagattgacccgagcaccggcttcgtgaacctcctgaagacaaagtatacctccattgccgacagcaagaagtttatctcctccttcgaccgcattatgtatgtgccggaggaggacctcttcgagttcgccctcgactacaaaaacttcagccgcacagatgcggattacatcaagaagtggaagctgtactcctacgggaacaggatccgcatcttcaggaatccaaaaaaaaataacgtctttgactgggaggaagtgtgcctgacatccgcctacaaggaactgttcaataaatacggcatcaattaccagcagggcgacattcgcgccctcctctgtgagcagtccgacaaagcgttttactccagcttcatggccctcatgtccctgatgctccaaatgaggaatagcatcacagggcgcaccgacgtcgacttcctcatcagcccggtgaagaactccgacgggatcttttacgactcccgcaactatgaggcgcaagagaatgcgatcctcccgaagaacgccgatgcgaacggggcctataatatcgccaggaaagtgctctgggccatcgggcagttcaaaaaggcggaggatgagaagctcgacaaggtgaaaattgccatttccaacaaggagtggctggagtacgcgcagacctccgtgaagcacggctcctctggcagctccggctctagcggctcctctggcagctccggctccaagctggagaagtttacaaactgttacagcctctccaaaaccctcaggtttaaagcgatcccggtgggcaagacccaggagaacatcgacaacaagaggctcctggtggaagacgagaagcgcgccgaagactacaagggcgtgaagaagctgctcgataggtactacctcagctttattaacgacgtgctgcacagcatcaaactcaagaatctcaacaactacatctccctcttccgcaaaaagacc

SEQ ID NO: 408 - DNA, 4167 bp, synthetic construct
  source 1..4167: mol_type = other DNA
tccgacgggatcttttacgactcccgcaactatgaggcgcaagagaatgcgatcctcccgaagaacgccgatgcgaacggggcctataatatcgccaggaaagtgctctgggccatcgggcagttcaaaaaggcggaggatgagaagctcgacaaggtgaaaattgccatttccaacaaggagtggctggagtacgcgcagacctccgtgaagcacggctcctctggcagctccggctctagcggctcctctggcagctccggctccaagctggagaagtttacaaactgttacagcctctccaaaaccctcaggtttaaagcgatcccggtgggcaagacccaggagaacatcgacaacaagaggctcctggtggaagacgagaagcgcgccgaagactacaagggcgtgaagaagctgctcgataggtactacctcagctttattaacgacgtgctgcacagcatcaaactcaagaatctcaacaactacatctccctcttccgcaaaaagacccgcaccgagaaggagaacaaggagctggagaacctggagatcaacctccgcaaggaaatcgccaaagcgttcaagggcaatgaagggtacaagagcctcttcaagaaagacatcatcgaaactatcctcccagagtttctcgatgacaaggacgagatcgcgctggtgaactcctttaacgggttcacaaccgcgtttaccggcttctttgataacagggaaaatatgttctccgaggaggccaagtccaccagcatcgccttcaggtgtatcaacgagaacctcacccgctacatttccaatatggacattttcgagaaggtggatgcgatcttcgataagcacgaggtgcaggagatcaaagagaagattctcaattccgattatgacgtcgaggatttcttcgaaggggagttctttaattttgtgctcacacaagagggcattgacgtgtacaacgcgattatcgggggcttcgtcacagagtccggggagaagattaaggggctgaatgagtacatcaatctgtacaatcagaagaccaagcagaaactgccgaaattcaagccgctctacaagcaagtcctgtccgatagggaaagcctctccttctacggcagcggcgagaaccagaccacccagaagggacagaagaacagccgcgagagaatgaagcggatcgaagagggcatcaaagagctgggcagccagatcctgaaagaacaccccgtggaaaacacccagctgcagaacgagaagctgtacctgtactacctgcagaatgggcgggatatgtacgtggaccaggaactggacatcaaccggctgtccgactacgatgtggaccatatcgtgcctcagagctttctgaaggacgactccatcgacaacaaggtgctgaccagaagcgacaagaaccggggcaagagcgacaacgtgccctccgaagaggtcgtgaagaagatgaagaactactggcggcagctgctgaacgccaagctgattacccagagaaagttcgacaatctgaccaaggccgagagaggcggcctgagcgagggctataccagcgacgaggaggtgctggaagtcttccgcaacacactgaataagaatagcgagattttctcctccatcaagaagctcgagaagctctttaagaactttgacgagtacagctccgccgggattttcgtgaagaacgggccggcgatcagcaccatctccaaggacatctttggcgagtggaacgtcatcagggacaagtggaacgccgagtacgacgacatccacctgaagaagaaggcggtggtgaccgagaagtatgaggacgatcgcaggaagtccttcaaaaaaatcggctccttcagcctcgaacagctccaggagtatgccgatgcggatctgtccgtcgtcgagaagctgaaggaaatcatcattcagaaggtcgacgagatctataaagtgtacgggtccagcgagaagctgttcgacgccgactttgtgctcgagaagtccctcaaaaagaatgacgccgtggtggccattatgaaagacctgctcgactccgtgaagtccttcgaaaattacattaaagcgttctttggggaggggaaggaaactaacagggatgagtccttctatggcgactttgtcctcgcgtacgacatcctgctgaaggtcgaccacatttacgacgcgatccgcaactacgtgacacagaagccgtactccaaagacaagttcaagctgtacttccagaacccgcaatttatggggggctgggacaaggataaagagacagactaccgcgcgacaattctccgctatggctccaaatactatctggccatcatggacaagaagtacgcgaagtgcctgcagaagatcgacaaagacgacgtcaatggcaactatgaaaagatcaactacaagctgctgccgggcccgaacaagatgctcccgaaggtgttcttcagcaagaagtggatggcctactacaatccaagcgaggatattcagaaaatctataaaaacgggaccttcaagaagggggacatgtttaacctcaacgactgccacaagctcattgatttcttcaaggatagcatttcccgctacccgaaatggtccaatgcgtacgattttaacttctccgagacagaaaagtacaaagacatcgcgggcttttacagggaggtggaggagcaagggtataaagtttcttttgaatccgcgagcaagaaggaagtcgacaagctcgtcgaggagggcaagctctacatgttccaaatttataacaaggacttttccgacaagagccatgggaccccaaacctccacaccatgtacttcaaactgctctttgacgagaacaaccacgggcaaatcaggctgagcggcggcgccgaattattcatgcgcagggcctccctcaagaaggaagagctggtcgtccatccagccaattccccgatcgcgaacaagaacccggacaatccgaaaaagaccaccaccctgtcctacgacgtctacaaggacaaacgcttcagcgaagaccagtacgaattacacatcccaattgcgattaataagtgcccaaagaatatcttcaaaattaatacagaggtcagggtgctgctcaaacacgacgacaatccgtatgtcatcggcattgacaggggcgagcgcaatctgctctatatcgtggtcgtggatgggaagggcaatattgtggagcagtactccctgaacgagattatcaacaacttcaatgggattaggattaagaccgactatcacagcctgctcgacaagaaagaaaaagagaggtttgaggcccgccaaaactggacctccattgagaatatcaaagaattaaaggccggctatatttcccaagtcgtccacaagatctgcgagctggtggagaaatatgacgccgtgattgcgctcgaagacttaaattctgggttcaagaactcccgcgtgaaggtggaaaaacaggtgtatcagaaattcgagaaaatgctgatcgacaaactcaattatatggtggataagaagtccaacccgtgtgccacagggggcgcgctgaagggctatcagatcaccaacaagttcgagagcttcaagagcatgagcacccagaacgggtttattttctacatcccggcgtggctcacctccaagattgacccgagcaccggcttcgtgaacctcctgaagacaaagtatacctccattgccgacagcaagaagtttatctcctccttcgaccgcattatgtatgtgccggaggaggacctcttcgagttcgccctcgactacaaaaacttcagccgcacagatgcggattacatcaagaagtggaagctgtactcctacgggaacaggatccgcatcttcaggaatccaaaaaaaaataacgtctttgactgggaggaagtgtgcctgacatccgcctacaaggaactgttcaataaatacggcatcaattaccagcagggcgacattcgcgccctcctctgtgagcagtccgacaaagcgttttactccagcttcatggccctcatgtccctgatgctccaaatgaggaatagcatcacagggcgcaccgacgtcgacttcctcatcagcccggtgaagaac

SEQ ID NO: 409 - DNA, 4167 bp, synthetic construct
  source 1..4167: mol_type = other DNA
aaagacaagttcaagctgtacttccagaacccgcaatttatggggggctgggacaaggataaagagacagactaccgcgcgacaattctccgctatggctccaaatactatctggccatcatggacaagaagtacgcgaagtgcctgcagaagatcgacaaagacgacgtcaatggcaactatgaaaagatcaactacaagctgctgccgggcccgaacaagatgctcccgaaggtgttcttcagcaagaagtggatggcctactacaatccaagcgaggatattcagaaaatctataaaaacgggaccttcaagaagggggacatgtttaacctcaacgactgccacaagctcattgatttcttcaaggatagcatttcccgctacccgaaatggtccaatgcgtacgattttaacttctccgagacagaaaagtacaaagacatcgcgggcttttacagggaggtggaggagcaagggtataaagtttcttttgaatccgcgagcaagaaggaagtcgacaagctcgtcgaggagggcaagctctacatgttccaaatttataacaaggacttttccgacaagagccatgggaccccaaacctccacaccatgtacttcaaactgctctttgacgagaacaaccacgggcaaatcaggctgagcggcggcgccgaattattcatgcgcagggcctccctcaagaaggaagagctggtcgtccatccagccaattccccgatcgcgaacaagaacccggacaatccgaaaaagaccaccaccctgtcctacgacgtctacaaggacaaacgcttcagcgaagaccagtacgaattacacatcccaattgcgattaataagtgcccaaagaatatcttcaaaattaatacagaggtcagggtgctgctcaaacacgacgacaatccgtatgtcatcggcattgacaggggcgagcgcaatctgctctatatcgtggtcgtggatgggaagggcaatattgtggagcagtactccctgaacgagattatcaacaacttcaatgggattaggattaagaccgactatcacagcctgctcgacaagaaagaaaaagagaggtttgaggcccgccaaaactggacctccattgagaatatcaaagaattaaaggccggctatatttcccaagtcgtccacaagatctgcgagctggtggagaaatatgacgccgtgattgcgctcgaagacttaaattctgggttcaagaactcccgcgtgaaggtggaaaaacaggtgtatcagaaattcgagaaaatgctgatcgacaaactcaattatatggtggataagaagtccaacccgtgtgccacagggggcgcgctgaagggctatcagatcaccaacaagttcgagagcttcaagagcatgagcacccagaacgggtttattttctacatcccggcgtggctcacctccaagattgacccgagcaccggcttcgtgaacctcctgaagacaaagtatacctccattgccgacagcaagaagtttatctcctccttcgaccgcattatgtatgtgccggaggaggacctcttcgagttcgccctcgactacaaaaacttcagccgcacagatgcggattacatcaagaagtggaagctgtactcctacgggaacaggatccgcatcttcaggaatccaaaaaaaaataacgtctttgactgggaggaagtgtgcctgacatccgcctacaaggaactgttcaataaatacggcatcaattaccagcagggcgacattcgcgccctcctctgtgagcagtccgacaaagcgttttactccagcttcatggccctcatgtccctgatgctccaaatgaggaatagcatcacagggcgcaccgacgtcgacttcctcatcagcccggtgaagaactccgacgggatcttttacgactcccgcaactatgaggcgcaagagaatgcgatcctcccgaagaacgccgatgcgaacggggcctataatatcgccaggaaagtgctctgggccatcgggcagttcaaaaaggcggaggatgagaagctcgacaaggtgaaaattgccatttccaacaaggagtggctggagtacgcgcagacctccgtgaagcacggctcctctggcagctccggctctagcggctcctctggcagctccggctccaagctggagaagtttacaaactgttacagcctctccaaaaccctcaggtttaaagcgatcccggtgggcaagacccaggagaacatcgacaacaagaggctcctggtggaagacgagaagcgcgccgaagactacaagggcgtgaagaagctgctcgataggtactacctcagctttattaacgacgtgctgcacagcatcaaactcaagaatctcaacaactacatctccctcttccgcaaaaagacccgcaccgagaaggagaacaaggagctggagaacctggagatcaacctccgcaaggaaatcgccaaagcgttcaagggcaatgaagggtacaagagcctcttcaagaaagacatcatcgaaactatcctcccagagtttctcgatgacaaggacgagatcgcgctggtgaactcctttaacgggttcacaaccgcgtttaccggcttctttgataacagggaaaatatgttctccgaggaggccaagtccaccagcatcgccttcaggtgtatcaacgagaacctcacccgctacatttccaatatggacattttcgagaaggtggatgcgatcttcgataagcacgaggtgcaggagatcaaagagaagattctcaattccgattatgacgtcgaggatttcttcgaaggggagttctttaattttgtgctcacacaagagggcattgacgtgtacaacgcgattatcgggggcttcgtcacagagtccggggagaagattaaggggctgaatgagtacatcaatctgtacaatcagaagaccaagcagaaactgccgaaattcaagccgctctacaagcaagtcctgtccgatagggaaagcctctccttctacggcagcggcgagaaccagaccacccagaagggacagaagaacagccgcgagagaatgaagcggatcgaagagggcatcaaagagctgggcagccagatcctgaaagaacaccccgtggaaaacacccagctgcagaacgagaagctgtacctgtactacctgcagaatgggcgggatatgtacgtggaccaggaactggacatcaaccggctgtccgactacgatgtggaccatatcgtgcctcagagctttctgaaggacgactccatcgacaacaaggtgctgaccagaagcgacaagaaccggggcaagagcgacaacgtgccctccgaagaggtcgtgaagaagatgaagaactactggcggcagctgctgaacgccaagctgattacccagagaaagttcgacaatctgaccaaggccgagagaggcggcctgagcgagggctataccagcgacgaggaggtgctggaagtcttccgcaacacactgaataagaatagcgagattttctcctccatcaagaagctcgagaagctctttaagaactttgacgagtacagctccgccgggattttcgtgaagaacgggccggcgatcagcaccatctccaaggacatctttggcgagtggaacgtcatcagggacaagtggaacgccgagtacgacgacatccacctgaagaagaaggcggtggtgaccgagaagtatgaggacgatcgcaggaagtccttcaaaaaaatcggctccttcagcctcgaacagctccaggagtatgccgatgcggatctgtccgtcgtcgagaagctgaaggaaatcatcattcagaaggtcgacgagatctataaagtgtacgggtccagcgagaagctgttcgacgccgactttgtgctcgagaagtccctcaaaaagaatgacgccgtggtggccattatgaaagacctgctcgactccgtgaagtccttcgaaaattacattaaagcgttctttggggaggggaaggaaactaacagggatgagtccttctatggcgactttgtcctcgcgtacgacatcctgctgaaggtcgaccacatttacgacgcgatccgcaactacgtgacacagaagccgtactcc

SEQ ID NO: 410 - DNA, 4167 bp, synthetic construct
  source 1..4167: mol_type = other DNA
aagtccctcaaaaagaatgacgccgtggtggccattatgaaagacctgctcgactccgtgaagtccttcgaaaattacattaaagcgttctttggggaggggaaggaaactaacagggatgagtccttctatggcgactttgtcctcgcgtacgacatcctgctgaaggtcgaccacatttacgacgcgatccgcaactacgtgacacagaagccgtactccaaagacaagttcaagctgtacttccagaacccgcaatttatggggggctgggacaaggataaagagacagactaccgcgcgacaattctccgctatggctccaaatactatctggccatcatggacaagaagtacgcgaagtgcctgcagaagatcgacaaagacgacgtcaatggcaactatgaaaagatcaactacaagctgctgccgggcccgaacaagatgctcccgaaggtgttcttcagcaagaagtggatggcctactacaatccaagcgaggatattcagaaaatctataaaaacgggaccttcaagaagggggacatgtttaacctcaacgactgccacaagctcattgatttcttcaaggatagcatttcccgctacccgaaatggtccaatgcgtacgattttaacttctccgagacagaaaagtacaaagacatcgcgggcttttacagggaggtggaggagcaagggtataaagtttcttttgaatccgcgagcaagaaggaagtcgacaagctcgtcgaggagggcaagctctacatgttccaaatttataacaaggacttttccgacaagagccatgggaccccaaacctccacaccatgtacttcaaactgctctttgacgagaacaaccacgggcaaatcaggctgagcggcggcgccgaattattcatgcgcagggcctccctcaagaaggaagagctggtcgtccatccagccaattccccgatcgcgaacaagaacccggacaatccgaaaaagaccaccaccctgtcctacgacgtctacaaggacaaacgcttcagcgaagaccagtacgaattacacatcccaattgcgattaataagtgcccaaagaatatcttcaaaattaatacagaggtcagggtgctgctcaaacacgacgacaatccgtatgtcatcggcattgacaggggcgagcgcaatctgctctatatcgtggtcgtggatgggaagggcaatattgtggagcagtactccctgaacgagattatcaacaacttcaatgggattaggattaagaccgactatcacagcctgctcgacaagaaagaaaaagagaggtttgaggcccgccaaaactggacctccattgagaatatcaaagaattaaaggccggctatatttcccaagtcgtccacaagatctgcgagctggtggagaaatatgacgccgtgattgcgctcgaagacttaaattctgggttcaagaactcccgcgtgaaggtggaaaaacaggtgtatcagaaattcgagaaaatgctgatcgacaaactcaattatatggtggataagaagtccaacccgtgtgccacagggggcgcgctgaagggctatcagatcaccaacaagttcgagagcttcaagagcatgagcacccagaacgggtttattttctacatcccggcgtggctcacctccaagattgacccgagcaccggcttcgtgaacctcctgaagacaaagtatacctccattgccgacagcaagaagtttatctcctccttcgaccgcattatgtatgtgccggaggaggacctcttcgagttcgccctcgactacaaaaacttcagccgcacagatgcggattacatcaagaagtggaagctgtactcctacgggaacaggatccgcatcttcaggaatccaaaaaaaaataacgtctttgactgggaggaagtgtgcctgacatccgcctacaaggaactgttcaataaatacggcatcaattaccagcagggcgacattcgcgccctcctctgtgagcagtccgacaaagcgttttactccagcttcatggccctcatgtccctgatgctccaaatgaggaatagcatcacagggcgcaccgacgtcgacttcctcatcagcccggtgaagaactccgacgggatcttttacgactcccgcaactatgaggcgcaagagaatgcgatcctcccgaagaacgccgatgcgaacggggcctataatatcgccaggaaagtgctctgggccatcgggcagttcaaaaaggcggaggatgagaagctcgacaaggtgaaaattgccatttccaacaaggagtggctggagtacgcgcagacctccgtgaagcacggctcctctggcagctccggctctagcggctcctctggcagctccggctccaagctggagaagtttacaaactgttacagcctctccaaaaccctcaggtttaaagcgatcccggtgggcaagacccaggagaacatcgacaacaagaggctcctggtggaagacgagaagcgcgccgaagactacaagggcgtgaagaagctgctcgataggtactacctcagctttattaacgacgtgctgcacagcatcaaactcaagaatctcaacaactacatctccctcttccgcaaaaagacccgcaccgagaaggagaacaaggagctggagaacctggagatcaacctccgcaaggaaatcgccaaagcgttcaagggcaatgaagggtacaagagcctcttcaagaaagacatcatcgaaactatcctcccagagtttctcgatgacaaggacgagatcgcgctggtgaactcctttaacgggttcacaaccgcgtttaccggcttctttgataacagggaaaatatgttctccgaggaggccaagtccaccagcatcgccttcaggtgtatcaacgagaacctcacccgctacatttccaatatggacattttcgagaaggtggatgcgatcttcgataagcacgaggtgcaggagatcaaagagaagattctcaattccgattatgacgtcgaggatttcttcgaaggggagttctttaattttgtgctcacacaagagggcattgacgtgtacaacgcgattatcgggggcttcgtcacagagtccggggagaagattaaggggctgaatgagtacatcaatctgtacaatcagaagaccaagcagaaactgccgaaattcaagccgctctacaagcaagtcctgtccgatagggaaagcctctccttctacggcagcggcgagaaccagaccacccagaagggacagaagaacagccgcgagagaatgaagcggatcgaagagggcatcaaagagctgggcagccagatcctgaaagaacaccccgtggaaaacacccagctgcagaacgagaagctgtacctgtactacctgcagaatgggcgggatatgtacgtggaccaggaactggacatcaaccggctgtccgactacgatgtggaccatatcgtgcctcagagctttctgaaggacgactccatcgacaacaaggtgctgaccagaagcgacaagaaccggggcaagagcgacaacgtgccctccgaagaggtcgtgaagaagatgaagaactactggcggcagctgctgaacgccaagctgattacccagagaaagttcgacaatctgaccaaggccgagagaggcggcctgagcgagggctataccagcgacgaggaggtgctggaagtcttccgcaacacactgaataagaatagcgagattttctcctccatcaagaagctcgagaagctctttaagaactttgacgagtacagctccgccgggattttcgtgaagaacgggccggcgatcagcaccatctccaaggacatctttggcgagtggaacgtcatcagggacaagtggaacgccgagtacgacgacatccacctgaagaagaaggcggtggtgaccgagaagtatgaggacgatcgcaggaagtccttcaaaaaaatcggctccttcagcctcgaacagctccaggagtatgccgatgcggatctgtccgtcgtcgagaagctgaaggaaatcatcattcagaaggtcgacgagatctataaagtgtacgggtccagcgagaagctgttcgacgccgactttgtgctcgag

SEQ ID NO: 411 - DNA, 4167 bp, synthetic construct
  source 1..4167: mol_type = other DNA
tccgacaaagcgttttactccagcttcatggccctcatgtccctgatgctccaaatgaggaatagcatcacagggcgcaccgacgtcgacttcctcatcagcccggtgaagaactccgacgggatcttttacgactcccgcaactatgaggcgcaagagaatgcgatcctcccgaagaacgccgatgcgaacggggcctataatatcgccaggaaagtgctctgggccatcgggcagttcaaaaaggcggaggatgagaagctcgacaaggtgaaaattgccatttccaacaaggagtggctggagtacgcgcagacctccgtgaagcacggctcctctggcagctccggctctagcggctcctctggcagctccggctccaagctggagaagtttacaaactgttacagcctctccaaaaccctcaggtttaaagcgatcccggtgggcaagacccaggagaacatcgacaacaagaggctcctggtggaagacgagaagcgcgccgaagactacaagggcgtgaagaagctgctcgataggtactacctcagctttattaacgacgtgctgcacagcatcaaactcaagaatctcaacaactacatctccctcttccgcaaaaagacccgcaccgagaaggagaacaaggagctggagaacctggagatcaacctccgcaaggaaatcgccaaagcgttcaagggcaatgaagggtacaagagcctcttcaagaaagacatcatcgaaactatcctcccagagtttctcgatgacaaggacgagatcgcgctggtgaactcctttaacgggttcacaaccgcgtttaccggcttctttgataacagggaaaatatgttctccgaggaggccaagtccaccagcatcgccttcaggtgtatcaacgagaacctcacccgctacatttccaatatggacattttcgagaaggtggatgcgatcttcgataagcacgaggtgcaggagatcaaagagaagattctcaattccgattatgacgtcgaggatttcttcgaaggggagttctttaattttgtgctcacacaagagggcattgacgtgtacaacgcgattatcgggggcttcgtcacagagtccggggagaagattaaggggctgaatgagtacatcaatctgtacaatcagaagaccaagcagaaactgccgaaattcaagccgctctacaagcaagtcctgtccgatagggaaagcctctccttctacggcagcggcgagaaccagaccacccagaagggacagaagaacagccgcgagagaatgaagcggatcgaagagggcatcaaagagctgggcagccagatcctgaaagaacaccccgtggaaaacacccagctgcagaacgagaagctgtacctgtactacctgcagaatgggcgggatatgtacgtggaccaggaactggacatcaaccggctgtccgactacgatgtggaccatatcgtgcctcagagctttctgaaggacgactccatcgacaacaaggtgctgaccagaagcgacaagaaccggggcaagagcgacaacgtgccctccgaagaggtcgtgaagaagatgaagaactactggcggcagctgctgaacgccaagctgattacccagagaaagttcgacaatctgaccaaggccgagagaggcggcctgagcgagggctataccagcgacgaggaggtgctggaagtcttccgcaacacactgaataagaatagcgagattttctcctccatcaagaagctcgagaagctctttaagaactttgacgagtacagctccgccgggattttcgtgaagaacgggccggcgatcagcaccatctccaaggacatctttggcgagtggaacgtcatcagggacaagtggaacgccgagtacgacgacatccacctgaagaagaaggcggtggtgaccgagaagtatgaggacgatcgcaggaagtccttcaaaaaaatcggctccttcagcctcgaacagctccaggagtatgccgatgcggatctgtccgtcgtcgagaagctgaaggaaatcatcattcagaaggtcgacgagatctataaagtgtacgggtccagcgagaagctgttcgacgccgactttgtgctcgagaagtccctcaaaaagaatgacgccgtggtggccattatgaaagacctgctcgactccgtgaagtccttcgaaaattacattaaagcgttctttggggaggggaaggaaactaacagggatgagtccttctatggcgactttgtcctcgcgtacgacatcctgctgaaggtcgaccacatttacgacgcgatccgcaactacgtgacacagaagccgtactccaaagacaagttcaagctgtacttccagaacccgcaatttatggggggctgggacaaggataaagagacagactaccgcgcgacaattctccgctatggctccaaatactatctggccatcatggacaagaagtacgcgaagtgcctgcagaagatcgacaaagacgacgtcaatggcaactatgaaaagatcaactacaagctgctgccgggcccgaacaagatgctcccgaaggtgttcttcagcaagaagtggatggcctactacaatccaagcgaggatattcagaaaatctataaaaacgggaccttcaagaagggggacatgtttaacctcaacgactgccacaagctcattgatttcttcaaggatagcatttcccgctacccgaaatggtccaatgcgtacgattttaacttctccgagacagaaaagtacaaagacatcgcgggcttttacagggaggtggaggagcaagggtataaagtttcttttgaatccgcgagcaagaaggaagtcgacaagctcgtcgaggagggcaagctctacatgttccaaatttataacaaggacttttccgacaagagccatgggaccccaaacctccacaccatgtacttcaaactgctctttgacgagaacaaccacgggcaaatcaggctgagcggcggcgccgaattattcatgcgcagggcctccctcaagaaggaagagctggtcgtccatccagccaattccccgatcgcgaacaagaacccggacaatccgaaaaagaccaccaccctgtcctacgacgtctacaaggacaaacgcttcagcgaagaccagtacgaattacacatcccaattgcgattaataagtgcccaaagaatatcttcaaaattaatacagaggtcagggtgctgctcaaacacgacgacaatccgtatgtcatcggcattgacaggggcgagcgcaatctgctctatatcgtggtcgtggatgggaagggcaatattgtggagcagtactccctgaacgagattatcaacaacttcaatgggattaggattaagaccgactatcacagcctgctcgacaagaaagaaaaagagaggtttgaggcccgccaaaactggacctccattgagaatatcaaagaattaaaggccggctatatttcccaagtcgtccacaagatctgcgagctggtggagaaatatgacgccgtgattgcgctcgaagacttaaattctgggttcaagaactcccgcgtgaaggtggaaaaacaggtgtatcagaaattcgagaaaatgctgatcgacaaactcaattatatggtggataagaagtccaacccgtgtgccacagggggcgcgctgaagggctatcagatcaccaacaagttcgagagcttcaagagcatgagcacccagaacgggtttattttctacatcccggcgtggctcacctccaagattgacccgagcaccggcttcgtgaacctcctgaagacaaagtatacctccattgccgacagcaagaagtttatctcctccttcgaccgcattatgtatgtgccggaggaggacctcttcgagttcgccctcgactacaaaaacttcagccgcacagatgcggattacatcaagaagtggaagctgtactcctacgggaacaggatccgcatcttcaggaatccaaaaaaaaataacgtctttgactgggaggaagtgtgcctgacatccgcctacaaggaactgttcaataaatacggcatcaattaccagcagggcgacattcgcgccctcctctgtgagcag

SEQ ID NO: 412 - DNA, 4113 bp, synthetic construct
  source 1..4113: mol_type = other DNA
tccaagctggagaagtttacaaactgttacagcctctccaaaaccctcaggtttaaagcgatcccggtgggcaagacccaggagaacatcgacaacaagaggctcctggtggaagacgagaagcgcgccgaagactacaagggcgtgaagaagctgctcgataggtactacctcagctttattaacgacgtgctgcacagcatcaaactcaagaatctcaacaactacatctccctcttccgcaaaaagacccgcaccgagaaggagaacaaggagctggagaacctggagatcaacctccgcaaggaaatcgccaaagcgttcaagggcaatgaagggtacaagagcctcttcaagaaagacatcatcgaaactatcctcccagagtttctcgatgacaaggacgagatcgcgctggtgaactcctttaacgggttcacaaccgcgtttaccggcttctttgataacagggaaaatatgttctccgaggaggccaagtccaccagcatcgccttcaggtgtatcaacgagaacctcacccgctacatttccaatatggacattttcgagaaggtggatgcgatcttcgataagcacgaggtgcaggagatcaaagagaagattctcaattccgattatgacgtcgaggatttcttcgaaggggagttctttaattttgtgctcacacaagagggcattgacgtgtacaacgcgattatcgggggcttcgtcacagagtccggggagaagattaaggggctgaatgagtacatcaatctgtacaatcagaagaccaagcagaaactgccgaaattcaagccgctctacaagcaagtcctgtccgatagggaaagcctctccttctacggcgagaaccagaccacccagaagggacagaagaacagccgcgagagaatgaagcggatcgaagagggcatcaaagagctgggcagccagatcctgaaagaacaccccgtggaaaacacccagctgcagaacgagaagctgtacctgtactacctgcagaatgggcgggatatgtacgtggaccaggaactggacatcaaccggctgtccgactacgatgtggaccatatcgtgcctcagagctttctgaaggacgactccatcgacaacaaggtgctgaccagaagcgacaagaaccggggcaagagcgacaacgtgccctccgaagaggtcgtgaagaagatgaagaactactggcggcagctgctgaacgccaagctgattacccagagaaagttcgacaatctgaccaaggccgagagaggcggcctgagcgagggctataccagcgacgaggaggtgctggaagtcttccgcaacacactgaataagaatagcgagattttctcctccatcaagaagctcgagaagctctttaagaactttgacgagtacagctccgccgggattttcgtgaagaacgggccggcgatcagcaccatctccaaggacatctttggcgagtggaacgtcatcagggacaagtggaacgccgagtacgacgacatccacctgaagaagaaggcggtggtgaccgagaagtatgaggacgatcgcaggaagtccttcaaaaaaatcggctccttcagcctcgaacagctccaggagtatgccgatgcggatctgtccgtcgtcgagaagctgaaggaaatcatcattcagaaggtcgacgagatctataaagtgtacgggtccagcgagaagctgttcgacgccgactttgtgctcgagaagtccctcaaaaagaatgacgccgtggtggccattatgaaagacctgctcgactccgtgaagtccttcgaaaattacattaaagcgttctttggggaggggaaggaaactaacagggatgagtccttctatggcgactttgtcctcgcgtacgacatcctgctgaaggtcgaccacatttacgacgcgatccgcaactacgtgacacagaagccgtactccaaagacaagttcaagctgtacttccagaacccgcaatttatggggggctgggacaaggataaagagacagactaccgcgcgacaattctccgctatggctccaaatactatctggccatcatggacaagaagtacgcgaagtgcctgcagaagatcgacaaagacgacgtcaatggcaactatgaaaagatcaactacaagctgctgccgggcccgaacaagatgctcccgaaggtgttcttcagcaagaagtggatggcctactacaatccaagcgaggatattcagaaaatctataaaaacgggaccttcaagaagggggacatgtttaacctcaacgactgccacaagctcattgatttcttcaaggatagcatttcccgctacccgaaatggtccaatgcgtacgattttaacttctccgagacagaaaagtacaaagacatcgcgggcttttacagggaggtggaggagcaagggtataaagtttcttttgaatccgcgagcaagaaggaagtcgacaagctcgtcgaggagggcaagctctacatgttccaaatttataacaaggacttttccgacaagagccatgggaccccaaacctccacaccatgtacttcaaactgctctttgacgagaacaaccacgggcaaatcaggctgagcggcggcgccgaattattcatgcgcagggcctccctcaagaaggaagagctggtcgtccatccagccaattccccgatcgcgaacaagaacccggacaatccgaaaaagaccaccaccctgtcctacgacgtctacaaggacaaacgcttcagcgaagaccagtacgaattacacatcccaattgcgattaataagtgcccaaagaatatcttcaaaattaatacagaggtcagggtgctgctcaaacacgacgacaatccgtatgtcatcggcattgacaggggcgagcgcaatctgctctatatcgtggtcgtggatgggaagggcaatattgtggagcagtactccctgaacgagattatcaacaacttcaatgggattaggattaagaccgactatcacagcctgctcgacaagaaagaaaaagagaggtttgaggcccgccaaaactggacctccattgagaatatcaaagaattaaaggccggctatatttcccaagtcgtccacaagatctgcgagctggtggagaaatatgacgccgtgattgcgctcgaagacttaaattctgggttcaagaactcccgcgtgaaggtggaaaaacaggtgtatcagaaattcgagaaaatgctgatcgacaaactcaattatatggtggataagaagtccaacccgtgtgccacagggggcgcgctgaagggctatcagatcaccaacaagttcgagagcttcaagagcatgagcacccagaacgggtttattttctacatcccggcgtggctcacctccaagattgacccgagcaccggcttcgtgaacctcctgaagacaaagtatacctccattgccgacagcaagaagtttatctcctccttcgaccgcattatgtatgtgccggaggaggacctcttcgagttcgccctcgactacaaaaacttcagccgcacagatgcggattacatcaagaagtggaagctgtactcctacgggaacaggatccgcatcttcaggaatccaaaaaaaaataacgtctttgactgggaggaagtgtgcctgacatccgcctacaaggaactgttcaataaatacggcatcaattaccagcagggcgacattcgcgccctcctctgtgagcagtccgacaaagcgttttactccagcttcatggccctcatgtccctgatgctccaaatgaggaatagcatcacagggcgcaccgacgtcgacttcctcatcagcccggtgaagaactccgacgggatcttttacgactcccgcaactatgaggcgcaagagaatgcgatcctcccgaagaacgccgatgcgaacggggcctataatatcgccaggaaagtgctctgggccatcgggcagttcaaaaaggcggaggatgagaagctcgacaaggtgaaaattgccatttccaacaaggagtggctggagtacgcgcagacctccgtgaagcac

SEQ ID NO: 413 - DNA, 4119 bp, synthetic construct
  source 1..4119: mol_type = other DNA
tccaagctggagaagtttacaaactgttacagcctctccaaaaccctcaggtttaaagcgatcccggtgggcaagacccaggagaacatcgacaacaagaggctcctggtggaagacgagaagcgcgccgaagactacaagggcgtgaagaagctgctcgataggtactacctcagctttattaacgacgtgctgcacagcatcaaactcaagaatctcaacaactacatctccctcttccgcaaaaagacccgcaccgagaaggagaacaaggagctggagaacctggagatcaacctccgcaaggaaatcgccaaagcgttcaagggcaatgaagggtacaagagcctcttcaagaaagacatcatcgaaactatcctcccagagtttctcgatgacaaggacgagatcgcgctggtgaactcctttaacgggttcacaaccgcgtttaccggcttctttgataacagggaaaatatgttctccgaggaggccaagtccaccagcatcgccttcaggtgtatcaacgagaacctcacccgctacatttccaatatggacattttcgagaaggtggatgcgatcttcgataagcacgaggtgcaggagatcaaagagaagattctcaattccgattatgacgtcgaggatttcttcgaaggggagttctttaattttgtgctcacacaagagggcattgacgtgtacaacgcgattatcgggggcttcgtcacagagtccggggagaagattaaggggctgaatgagtacatcaatctgtacaatcagaagaccaagcagaaactgccgaaattcaagccgctctacaagcaagtcctgtccgatagggaaagcctctccttctacggcagcggcgagaaccagaccacccagaagggacagaagaacagccgcgagagaatgaagcggatcgaagagggcatcaaagagctgggcagccagatcctgaaagaacaccccgtggaaaacacccagctgcagaacgagaagctgtacctgtactacctgcagaatgggcgggatatgtacgtggaccaggaactggacatcaaccggctgtccgactacgatgtggaccatatcgtgcctcagagctttctgaaggacgactccatcgacaacaaggtgctgaccagaagcgacaagaaccggggcaagagcgacaacgtgccctccgaagaggtcgtgaagaagatgaagaactactggcggcagctgctgaacgccaagctgattacccagagaaagttcgacaatctgaccaaggccgagagaggcggcctgagcgagggctataccagcgacgaggaggtgctggaagtcttccgcaacacactgaataagaatagcgagattttctcctccatcaagaagctcgagaagctctttaagaactttgacgagtacagctccgccgggattttcgtgaagaacgggccggcgatcagcaccatctccaaggacatctttggcgagtggaacgtcatcagggacaagtggaacgccgagtacgacgacatccacctgaagaagaaggcggtggtgaccgagaagtatgaggacgatcgcaggaagtccttcaaaaaaatcggctccttcagcctcgaacagctccaggagtatgccgatgcggatctgtccgtcgtcgagaagctgaaggaaatcatcattcagaaggtcgacgagatctataaagtgtacgggtccagcgagaagctgttcgacgccgactttgtgctcgagaagtccctcaaaaagaatgacgccgtggtggccattatgaaagacctgctcgactccgtgaagtccttcgaaaattacattaaagcgttctttggggaggggaaggaaactaacagggatgagtccttctatggcgactttgtcctcgcgtacgacatcctgctgaaggtcgaccacatttacgacgcgatccgcaactacgtgacacagaagccgtactccaaagacaagttcaagctgtacttccagaacccgcaatttatggggggctgggacaaggataaagagacagactaccgcgcgacaattctccgctatggctccaaatactatctggccatcatggacaagaagtacgcgaagtgcctgcagaagatcgacaaagacgacgtcaatggcaactatgaaaagatcaactacaagctgctgccgggcccgaacaagatgctcccgaaggtgttcttcagcaagaagtggatggcctactacaatccaagcgaggatattcagaaaatctataaaaacgggaccttcaagaagggggacatgtttaacctcaacgactgccacaagctcattgatttcttcaaggatagcatttcccgctacccgaaatggtccaatgcgtacgattttaacttctccgagacagaaaagtacaaagacatcgcgggcttttacagggaggtggaggagcaagggtataaagtttcttttgaatccgcgagcaagaaggaagtcgacaagctcgtcgaggagggcaagctctacatgttccaaatttataacaaggacttttccgacaagagccatgggaccccaaacctccacaccatgtacttcaaactgctctttgacgagaacaaccacgggcaaatcaggctgagcggcggcgccgaattattcatgcgcagggcctccctcaagaaggaagagctggtcgtccatccagccaattccccgatcgcgaacaagaacccggacaatccgaaaaagaccaccaccctgtcctacgacgtctacaaggacaaacgcttcagcgaagaccagtacgaattacacatcccaattgcgattaataagtgcccaaagaatatcttcaaaattaatacagaggtcagggtgctgctcaaacacgacgacaatccgtatgtcatcggcattgacaggggcgagcgcaatctgctctatatcgtggtcgtggatgggaagggcaatattgtggagcagtactccctgaacgagattatcaacaacttcaatgggattaggattaagaccgactatcacagcctgctcgacaagaaagaaaaagagaggtttgaggcccgccaaaactggacctccattgagaatatcaaagaattaaaggccggctatatttcccaagtcgtccacaagatctgcgagctggtggagaaatatgacgccgtgattgcgctcgaagacttaaattctgggttcaagaactcccgcgtgaaggtggaaaaacaggtgtatcagaaattcgagaaaatgctgatcgacaaactcaattatatggtggataagaagtccaacccgtgtgccacagggggcgcgctgaagggctatcagatcaccaacaagttcgagagcttcaagagcatgagcacccagaacgggtttattttctacatcccggcgtggctcacctccaagattgacccgagcaccggcttcgtgaacctcctgaagacaaagtatacctccattgccgacagcaagaagtttatctcctccttcgaccgcattatgtatgtgccggaggaggacctcttcgagttcgccctcgactacaaaaacttcagccgcacagatgcggattacatcaagaagtggaagctgtactcctacgggaacaggatccgcatcttcaggaatccaaaaaaaaataacgtctttgactgggaggaagtgtgcctgacatccgcctacaaggaactgttcaataaatacggcatcaattaccagcagggcgacattcgcgccctcctctgtgagcagtccgacaaagcgttttactccagcttcatggccctcatgtccctgatgctccaaatgaggaatagcatcacagggcgcaccgacgtcgacttcctcatcagcccggtgaagaactccgacgggatcttttacgactcccgcaactatgaggcgcaagagaatgcgatcctcccgaagaacgccgatgcgaacggggcctataatatcgccaggaaagtgctctgggccatcgggcagttcaaaaaggcggaggatgagaagctcgacaaggtgaaaattgccatttccaacaaggagtggctggagtacgcgcagacctccgtgaagcac

SEQ ID NO: 414 - DNA, 8499 bp, synthetic construct
  source 1..8499: mol_type = other DNA
gacattgattattgactagttattaatagtaatcaattacggggtcattagttcatagcccatatatggagttccgcgttacataacttacggtaaatggcccgcctggctgaccgcccaacgacccccgcccattgacgtcaataatgacgtatgttcccatagtaacgccaatagggactttccattgacgtcaatgggtggagtatttacggtaaactgcccacttggcagtacatcaagtgtatcatatgccaagtacgccccctattgacgtcaatgacggtaaatggcccgcctggcattatgcccagtacatgaccttatgggactttcctacttggcagtacatctacgtattagtcatcgctattaccatggtgatgcggttttggcagtacatcaatgggcgtggatagcggtttgactcacggggatttccaagtctccaccccattgacgtcaatgggagtttgttttggcaccaaaatcaacgggactttccaaaatgtcgtaacaactccgccccattgacgcaaatgggcggtaggcgtgtacggtgggaggtctatataagcagagctggtttagtgaaccgtcagatccgctagagatccgcggccgctaatacgactcactatagggagagccgccaccatgaaacggacagccgacggaagcgagttcgagtcaccaaagaagaagcggaaagtccgcaccgagaaggagaacaaggagctggagaacctggagatcaacctccgcaaggaaatcgccaaagcgttcaagggcaatgaagggtacaagagcctcttcaagaaagacatcatcgaaactatcctcccagagtttctcgatgacaaggacgagatcgcgctggtgaactcctttaacgggttcacaaccgcgtttaccggcttctttgataacagggaaaatatgttctccgaggaggccaagtccaccagcatcgccttcaggtgtatcaacgagaacctcacccgctacatttccaatatggacattttcgagaaggtggatgcgatcttcgataagcacgaggtgcaggagatcaaagagaagattctcaattccgattatgacgtcgaggatttcttcgaaggggagttctttaattttgtgctcacacaagagggcattgacgtgtacaacgcgattatcgggggcttcgtcacagagtccggggagaagattaaggggctgaatgagtacatcaatctgtacaatcagaagaccaagcagaaactgccgaaattcaagccgctctacaagcaagtcctgtccgatagggaaagcctctccttctacggcgagaaccagaccacccagaagggacagaagaacagccgcgagagaatgaagcggatcgaagagggcatcaaagagctgggcagccagatcctgaaagaacaccccgtggaaaacacccagctgcagaacgagaagctgtacctgtactacctgcagaatgggcgggatatgtacgtggaccaggaactggacatcaaccggctgtccgactacgatgtggaccatatcgtgcctcagagctttctgaaggacgactccatcgacaacaaggtgctgaccagaagcgacaagaaccggggcaagagcgacaacgtgccctccgaagaggtcgtgaagaagatgaagaactactggcggcagctgctgaacgccaagctgattacccagagaaagttcgacaatctgaccaaggccgagagaggcggcctgagcgagggctataccagcgacgaggaggtgctggaagtcttccgcaacacactgaataagaatagcgagattttctcctccatcaagaagctcgagaagctctttaagaactttgacgagtacagctccgccgggattttcgtgaagaacgggccggcgatcagcaccatctccaaggacatctttggcgagtggaacgtcatcagggacaagtggaacgccgagtacgacgacatccacctgaagaagaaggcggtggtgaccgagaagtatgaggacgatcgcaggaagtccttcaaaaaaatcggctccttcagcctcgaacagctccaggagtatgccgatgcggatctgtccgtcgtcgagaagctgaaggaaatcatcattcagaaggtcgacgagatctataaagtgtacgggtccagcgagaagctgttcgacgccgactttgtgctcgagaagtccctcaaaaagaatgacgccgtggtggccattatgaaagacctgctcgactccgtgaagtccttcgaaaattacattaaagcgttctttggggaggggaaggaaactaacagggatgagtccttctatggcgactttgtcctcgcgtacgacatcctgctgaaggtcgaccacatttacgacgcgatccgcaactacgtgacacagaagccgtactccaaagacaagttcaagctgtacttccagaacccgcaatttatggggggctgggacaaggataaagagacagactaccgcgcgacaattctccgctatggctccaaatactatctggccatcatggacaagaagtacgcgaagtgcctgcagaagatcgacaaagacgacgtcaatggcaactatgaaaagatcaactacaagctgctgccgggcccgaacaagatgctcccgaaggtgttcttcagcaagaagtggatggcctactacaatccaagcgaggatattcagaaaatctataaaaacgggaccttcaagaagggggacatgtttaacctcaacgactgccacaagctcattgatttcttcaaggatagcatttcccgctacccgaaatggtccaatgcgtacgattttaacttctccgagacagaaaagtacaaagacatcgcgggcttttacagggaggtggaggagcaagggtataaagtttcttttgaatccgcgagcaagaaggaagtcgacaagctcgtcgaggagggcaagctctacatgttccaaatttataacaaggacttttccgacaagagccatgggaccccaaacctccacaccatgtacttcaaactgctctttgacgagaacaaccacgggcaaatcaggctgagcggcggcgccgaattattcatgcgcagggcctccctcaagaaggaagagctggtcgtccatccagccaattccccgatcgcgaacaagaacccggacaatccgaaaaagaccaccaccctgtcctacgacgtctacaaggacaaacgcttcagcgaagaccagtacgaattacacatcccaattgcgattaataagtgcccaaagaatatcttcaaaattaatacagaggtcagggtgctgctcaaacacgacgacaatccgtatgtcatcggcattgacaggggcgagcgcaatctgctctatatcgtggtcgtggatgggaagggcaatattgtggagcagtactccctgaacgagattatcaacaacttcaatgggattaggattaagaccgactatcacagcctgctcgacaagaaagaaaaagagaggtttgaggcccgccaaaactggacctccattgagaatatcaaagaattaaaggccggctatatttcccaagtcgtccacaagatctgcgagctggtggagaaatatgacgccgtgattgcgctcgaagacttaaattctgggttcaagaactcccgcgtgaaggtggaaaaacaggtgtatcagaaattcgagaaaatgctgatcgacaaactcaattatatggtggataagaagtccaacccgtgtgccacagggggcgcgctgaagggctatcagatcaccaacaagttcgagagcttcaagagcatgagcacccagaacgggtttattttctacatcccggcgtggctcacctccaagattgacccgagcaccggcttcgtgaacctcctgaagacaaagtatacctccattgccgacagcaagaagtttatctcctccttcgaccgcattatgtatgtgccggaggaggacctcttcgagttcgccctcgactacaaaaacttcagccgcacagatgcggattacatcaagaagtggaagctgtactcctacgggaacaggatccgcatcttcaggaatccaaaaaaaaataacgtctttgactgggaggaagtgtgcctgacatccgcctacaaggaactgttcaataaatacggcatcaattaccagcagggcgacattcgcgccctcctctgtgagcagtccgacaaagcgttttactccagcttcatggccctcatgtccctgatgctccaaatgaggaatagcatcacagggcgcaccgacgtcgacttcctcatcagcccggtgaagaactccgacgggatcttttacgactcccgcaactatgaggcgcaagagaatgcgatcctcccgaagaacgccgatgcgaacggggcctataatatcgccaggaaagtgctctgggccatcgggcagttcaaaaaggcggaggatgagaagctcgacaaggtgaaaattgccatttccaacaaggagtggctggagtacgcgcagacctccgtgaagcacggctcctctggcagctccggctctagcggctcctctggcagctccggctccaagctggagaagtttacaaactgttacagcctctccaaaaccctcaggtttaaagcgatcccggtgggcaagacccaggagaacatcgacaacaagaggctcctggtggaagacgagaagcgcgccgaagactacaagggcgtgaagaagctgctcgataggtactacctcagctttattaacgacgtgctgcacagcatcaaactcaagaatctcaacaactacatctccctcttccgcaaaaagacctctggcggctcaaaaagaaccgccgacggcagcgaattcgagcccaagaagaagaggaaagtcggaagcggagctactaacttcagcctgctgaagcaggctggagacgtggaggagaaccctggacctatggtgagcaagggcgaggagctgttcaccggggtggtgcccatcctggtcgagctggacggcgacgtaaacggccacaagttcagcgtgtccggcgagggcgagggcgatgccacctacggcaagctgaccctgaagttcatctgcaccaccggcaagctgcccgtgccctggcccaccctcgtgaccaccctgacctatggagtgcagtgcttcagccgctaccccgaccacatgaagcagcacgacttcttcaagtccgccatgcccgaaggctacgtccaggagcgcaccatcttcttcaaggacgacggcaactacaagacccgcgccgaggtgaagttcgagggcgacaccctggtgaaccgcatcgagctgaagggcatcgacttcaaggaggacggcaacatcctggggcacaagctggagtacaactacaacagccacaacgtctatatcatggccgacaagcagaagaacggcatcaaggtgaacttcaagatccgccacaacatcgaggacggcagcgtgcagctcgccgaccactaccagcagaacacccccatcggcgacggccccgtgctgctgcccgacaaccactacctgagcacccagtccgccctgagcaaagaccccaacgagaagcgcgatcacatggtcctgctggagttcgtgaccgccgccgggatcactctcggcatggacgagctgtacaagtctggtggttctcccaagaagaagaggaaagtctaaccggtcatcatcaccatcaccattgagtttaaacccgctgatcagcctcgactgtgccttctagttgccagccatctgttgtttgcccctcccccgtgccttccttgaccctggaaggtgccactcccactgtcctttcctaataaaatgaggaaattgcatcgcattgtctgagtaggtgtcattctattctggggggtggggtggggcaggacagcaagggggaggattgggaagacaatagcaggcatgctggggatgcggtgggctctatggcttctgaggcggaaagaaccagctggggctcgataccgtcgacctctagctagagcttggcgtaatcatggtcatagctgtttcctgtgtgaaattgttatccgctcacaattccacacaacatacgagccggaagcataaagtgtaaagcctagggtgcctaatgagtgagctaactcacattaattgcgttgcgctcactgcccgctttccagtcgggaaacctgtcgtgccagctgcattaatgaatcggccaacgcgcggggagaggcggtttgcgtattgggcgctcttccgcttcctcgctcactgactcgctgcgctcggtcgttcggctgcggcgagcggtatcagctcactcaaaggcggtaatacggttatccacagaatcaggggataacgcaggaaagaacatgtgagcaaaaggccagcaaaaggccaggaaccgtaaaaaggccgcgttgctggcgtttttccataggctccgcccccctgacgagcatcacaaaaatcgacgctcaagtcagaggtggcgaaacccgacaggactataaagataccaggcgtttccccctggaagctccctcgtgcgctctcctgttccgaccctgccgcttaccggatacctgtccgcctttctcccttcgggaagcgtggcgctttctcatagctcacgctgtaggtatctcagttcggtgtaggtcgttcgctccaagctgggctgtgtgcacgaaccccccgttcagcccgaccgctgcgccttatccggtaactatcgtcttgagtccaacccggtaagacacgacttatcgccactggcagcagccactggtaacaggattagcagagcgaggtatgtaggcggtgctacagagttcttgaagtggtggcctaactacggctacactagaagaacagtatttggtatctgcgctctgctgaagccagttaccttcggaaaaagagttggtagctcttgatccggcaaacaaaccaccgctggtagcggtggtttttttgtttgcaagcagcagattacgcgcagaaaaaaaggatctcaagaagatcctttgatcttttctacggggtctgacactcagtggaacgaaaactcacgttaagggattttggtcatgagattatcaaaaaggatcttcacctagatccttttaaattaaaaatgaagttttaaatcaatctaaagtatatatgagtaaacttggtctgacagttaccaatgcttaatcagtgaggcacctatctcagcgatctgtctatttcgttcatccatagttgcctgactccccgtcgtgtagataactacgatacgggagggcttaccatctggccccagtgctgcaatgataccgcgagacccacgctcaccggctccagatttatcagcaataaaccagccagccggaagggccgagcgcagaagtggtcctgcaactttatccgcctccatccagtctattaattgttgccgggaagctagagtaagtagttcgccagttaatagtttgcgcaacgttgttgccattgctacaggcatcgtggtgtcacgctcgtcgtttggtatggcttcattcagctccggttcccaacgatcaaggcgagttacatgatcccccatgttgtgcaaaaaagcggttagctccttcggtcctccgatcgttgtcagaagtaagttggccgcagtgttatcactcatggttatggcagcactgcataattctcttactgtcatgccatccgtaagatgcttttctgtgactggtgagtactcaaccaagtcattctgagaatagtgtatgcggcgaccgagttgctcttgcccggcgtcaatacgggataataccgcgccacatagcagaactttaaaagtgctcatcattggaaaacgttcttcggggcgaaaactctcaaggatcttaccgctgttgagatccagttcgatgtaacccactcgtgcacccaactgatcttcagcatcttttactttcaccagcgtttctgggtgagcaaaaacaggaaggcaaaatgccgcaaaaaagggaataagggcgacacggaaatgttgaatactcatactcttcctttttcaatattattgaagcatttatcagggttattgtctcatgagcggatacatatttgaatgtatttagaaaaataaacaaataggggttccgcgcacatttccccgaaaagtgccacctgacgtcgacggatcgggagatcgatctcccgatcccctagggtcgactctcagtacaatctgctctgatgccgcatagttaagccagtatctgctccctgcttgtgtgttggaggtcgctgagtagtgcgcgagcaaaatttaagctacaacaaggcaaggcttgaccgacaattgcatgaagaatctgcttagggttaggcgttttgcgctgcttcgcgatgtacgggccagatatacgcgtt

SEQ ID NO: 415 - DNA, 8499 bp, synthetic construct
  source 1..8499: mol_type = other DNA
gacattgattattgactagttattaatagtaatcaattacggggtcattagttcatagcccatatatggagttccgcgttacataacttacggtaaatggcccgcctggctgaccgcccaacgacccccgcccattgacgtcaataatgacgtatgttcccatagtaacgccaatagggactttccattgacgtcaatgggtggagtatttacggtaaactgcccacttggcagtacatcaagtgtatcatatgccaagtacgccccctattgacgtcaatgacggtaaatggcccgcctggcattatgcccagtacatgaccttatgggactttcctacttggcagtacatctacgtattagtcatcgctattaccatggtgatgcggttttggcagtacatcaatgggcgtggatagcggtttgactcacggggatttccaagtctccaccccattgacgtcaatgggagtttgttttggcaccaaaatcaacgggactttccaaaatgtcgtaacaactccgccccattgacgcaaatgggcggtaggcgtgtacggtgggaggtctatataagcagagctggtttagtgaaccgtcagatccgctagagatccgcggccgctaatacgactcactatagggagagccgccaccatgaaacggacagccgacggaagcgagttcgagtcaccaaagaagaagcggaaagtctccgacgggatcttttacgactcccgcaactatgaggcgcaagagaatgcgatcctcccgaagaacgccgatgcgaacggggcctataatatcgccaggaaagtgctctgggccatcgggcagttcaaaaaggcggaggatgagaagctcgacaaggtgaaaattgccatttccaacaaggagtggctggagtacgcgcagacctccgtgaagcacggctcctctggcagctccggctctagcggctcctctggcagctccggctccaagctggagaagtttacaaactgttacagcctctccaaaaccctcaggtttaaagcgatcccggtgggcaagacccaggagaacatcgacaacaagaggctcctggtggaagacgagaagcgcgccgaagactacaagggcgtgaagaagctgctcgataggtactacctcagctttattaacgacgtgctgcacagcatcaaactcaagaatctcaacaactacatctccctcttccgcaaaaagacccgcaccgagaaggagaacaaggagctggagaacctggagatcaacctccgcaaggaaatcgccaaagcgttcaagggcaatgaagggtacaagagcctcttcaagaaagacatcatcgaaactatcctcccagagtttctcgatgacaaggacgagatcgcgctggtgaactcctttaacgggttcacaaccgcgtttaccggcttctttgataacagggaaaatatgttctccgaggaggccaagtccaccagcatcgccttcaggtgtatcaacgagaacctcacccgctacatttccaatatggacattttcgagaaggtggatgcgatcttcgataagcacgaggtgcaggagatcaaagagaagattctcaattccgattatgacgtcgaggatttcttcgaaggggagttctttaattttgtgctcacacaagagggcattgacgtgtacaacgcgattatcgggggcttcgtcacagagtccggggagaagattaaggggctgaatgagtacatcaatctgtacaatcagaagaccaagcagaaactgccgaaattcaagccgctctacaagcaagtcctgtccgatagggaaagcctctccttctacggcgagaaccagaccacccagaagggacagaagaacagccgcgagagaatgaagcggatcgaagagggcatcaaagagctgggcagccagatcctgaaagaacaccccgtggaaaacacccagctgcagaacgagaagctgtacctgtactacctgcagaatgggcgggatatgtacgtggaccaggaactggacatcaaccggctgtccgactacgatgtggaccatatcgtgcctcagagctttctgaaggacgactccatcgacaacaaggtgctgaccagaagcgacaagaaccggggcaagagcgacaacgtgccctccgaagaggtcgtgaagaagatgaagaactactggcggcagctgctgaacgccaagctgattacccagagaaagttcgacaatctgaccaaggccgagagaggcggcctgagcgagggctataccagcgacgaggaggtgctggaagtcttccgcaacacactgaataagaatagcgagattttctcctccatcaagaagctcgagaagctctttaagaactttgacgagtacagctccgccgggattttcgtgaagaacgggccggcgatcagcaccatctccaaggacatctttggcgagtggaacgtcatcagggacaagtggaacgccgagtacgacgacatccacctgaagaagaaggcggtggtgaccgagaagtatgaggacgatcgcaggaagtccttcaaaaaaatcggctccttcagcctcgaacagctccaggagtatgccgatgcggatctgtccgtcgtcgagaagctgaaggaaatcatcattcagaaggtcgacgagatctataaagtgtacgggtccagcgagaagctgttcgacgccgactttgtgctcgagaagtccctcaaaaagaatgacgccgtggtggccattatgaaagacctgctcgactccgtgaagtccttcgaaaattacattaaagcgttctttggggaggggaaggaaactaacagggatgagtccttctatggcgactttgtcctcgcgtacgacatcctgctgaaggtcgaccacatttacgacgcgatccgcaactacgtgacacagaagccgtactccaaagacaagttcaagctgtacttccagaacccgcaatttatggggggctgggacaaggataaagagacagactaccgcgcgacaattctccgctatggctccaaatactatctggccatcatggacaagaagtacgcgaagtgcctgcagaagatcgacaaagacgacgtcaatggcaactatgaaaagatcaactacaagctgctgccgggcccgaacaagatgctcccgaaggtgttcttcagcaagaagtggatggcctactacaatccaagcgaggatattcagaaaatctataaaaacgggaccttcaagaagggggacatgtttaacctcaacgactgccacaagctcattgatttcttcaaggatagcatttcccgctacccgaaatggtccaatgcgtacgattttaacttctccgagacagaaaagtacaaagacatcgcgggcttttacagggaggtggaggagcaagggtataaagtttcttttgaatccgcgagcaagaaggaagtcgacaagctcgtcgaggagggcaagctctacatgttccaaatttataacaaggacttttccgacaagagccatgggaccccaaacctccacaccatgtacttcaaactgctctttgacgagaacaaccacgggcaaatcaggctgagcggcggcgccgaattattcatgcgcagggcctccctcaagaaggaagagctggtcgtccatccagccaattccccgatcgcgaacaagaacccggacaatccgaaaaagaccaccaccctgtcctacgacgtctacaaggacaaacgcttcagcgaagaccagtacgaattacacatcccaattgcgattaataagtgcccaaagaatatcttcaaaattaatacagaggtcagggtgctgctcaaacacgacgacaatccgtatgtcatcggcattgacaggggcgagcgcaatctgctctatatcgtggtcgtggatgggaagggcaatattgtggagcagtactccctgaacgagattatcaacaacttcaatgggattaggattaagaccgactatcacagcctgctcgacaagaaagaaaaagagaggtttgaggcccgccaaaactggacctccattgagaatatcaaagaattaaaggccggctatatttcccaagtcgtccacaagatctgcgagctggtggagaaatatgacgccgtgattgcgctcgaagacttaaattctgggttcaagaactcccgcgtgaaggtggaaaaacaggtgtatcagaaattcgagaaaatgctgatcgacaaactcaattatatggtggataagaagtccaacccgtgtgccacagggggcgcgctgaagggctatcagatcaccaacaagttcgagagcttcaagagcatgagcacccagaacgggtttattttctacatcccggcgtggctcacctccaagattgacccgagcaccggcttcgtgaacctcctgaagacaaagtatacctccattgccgacagcaagaagtttatctcctccttcgaccgcattatgtatgtgccggaggaggacctcttcgagttcgccctcgactacaaaaacttcagccgcacagatgcggattacatcaagaagtggaagctgtactcctacgggaacaggatccgcatcttcaggaatccaaaaaaaaataacgtctttgactgggaggaagtgtgcctgacatccgcctacaaggaactgttcaataaatacggcatcaattaccagcagggcgacattcgcgccctcctctgtgagcagtccgacaaagcgttttactccagcttcatggccctcatgtccctgatgctccaaatgaggaatagcatcacagggcgcaccgacgtcgacttcctcatcagcccggtgaagaactctggcggctcaaaaagaaccgccgacggcagcgaattcgagcccaagaagaagaggaaagtcggaagcggagctactaacttcagcctgctgaagcaggctggagacgtggaggagaaccctggacctatggtgagcaagggcgaggagctgttcaccggggtggtgcccatcctggtcgagctggacggcgacgtaaacggccacaagttcagcgtgtccggcgagggcgagggcgatgccacctacggcaagctgaccctgaagttcatctgcaccaccggcaagctgcccgtgccctggcccaccctcgtgaccaccctgacctatggagtgcagtgcttcagccgctaccccgaccacatgaagcagcacgacttcttcaagtccgccatgcccgaaggctacgtccaggagcgcaccatcttcttcaaggacgacggcaactacaagacccgcgccgaggtgaagttcgagggcgacaccctggtgaaccgcatcgagctgaagggcatcgacttcaaggaggacggcaacatcctggggcacaagctggagtacaactacaacagccacaacgtctatatcatggccgacaagcagaagaacggcatcaaggtgaacttcaagatccgccacaacatcgaggacggcagcgtgcagctcgccgaccactaccagcagaacacccccatcggcgacggccccgtgctgctgcccgacaaccactacctgagcacccagtccgccctgagcaaagaccccaacgagaagcgcgatcacatggtcctgctggagttcgtgaccgccgccgggatcactctcggcatggacgagctgtacaagtctggtggttctcccaagaagaagaggaaagtctaaccggtcatcatcaccatcaccattgagtttaaacccgctgatcagcctcgactgtgccttctagttgccagccatctgttgtttgcccctcccccgtgccttccttgaccctggaaggtgccactcccactgtcctttcctaataaaatgaggaaattgcatcgcattgtctgagtaggtgtcattctattctggggggtggggtggggcaggacagcaagggggaggattgggaagacaatagcaggcatgctggggatgcggtgggctctatggcttctgaggcggaaagaaccagctggggctcgataccgtcgacctctagctagagcttggcgtaatcatggtcatagctgtttcctgtgtgaaattgttatccgctcacaattccacacaacatacgagccggaagcataaagtgtaaagcctagggtgcctaatgagtgagctaactcacattaattgcgttgcgctcactgcccgctttccagtcgggaaacctgtcgtgccagctgcattaatgaatcggccaacgcgcggggagaggcggtttgcgtattgggcgctcttccgcttcctcgctcactgactcgctgcgctcggtcgttcggctgcggcgagcggtatcagctcactcaaaggcggtaatacggttatccacagaatcaggggataacgcaggaaagaacatgtgagcaaaaggccagcaaaaggccaggaaccgtaaaaaggccgcgttgctggcgtttttccataggctccgcccccctgacgagcatcacaaaaatcgacgctcaagtcagaggtggcgaaacccgacaggactataaagataccaggcgtttccccctggaagctccctcgtgcgctctcctgttccgaccctgccgcttaccggatacctgtccgcctttctcccttcgggaagcgtggcgctttctcatagctcacgctgtaggtatctcagttcggtgtaggtcgttcgctccaagctgggctgtgtgcacgaaccccccgttcagcccgaccgctgcgccttatccggtaactatcgtcttgagtccaacccggtaagacacgacttatcgccactggcagcagccactggtaacaggattagcagagcgaggtatgtaggcggtgctacagagttcttgaagtggtggcctaactacggctacactagaagaacagtatttggtatctgcgctctgctgaagccagttaccttcggaaaaagagttggtagctcttgatccggcaaacaaaccaccgctggtagcggtggtttttttgtttgcaagcagcagattacgcgcagaaaaaaaggatctcaagaagatcctttgatcttttctacggggtctgacactcagtggaacgaaaactcacgttaagggattttggtcatgagattatcaaaaaggatcttcacctagatccttttaaattaaaaatgaagttttaaatcaatctaaagtatatatgagtaaacttggtctgacagttaccaatgcttaatcagtgaggcacctatctcagcgatctgtctatttcgttcatccatagttgcctgactccccgtcgtgtagataactacgatacgggagggcttaccatctggccccagtgctgcaatgataccgcgagacccacgctcaccggctccagatttatcagcaataaaccagccagccggaagggccgagcgcagaagtggtcctgcaactttatccgcctccatccagtctattaattgttgccgggaagctagagtaagtagttcgccagttaatagtttgcgcaacgttgttgccattgctacaggcatcgtggtgtcacgctcgtcgtttggtatggcttcattcagctccggttcccaacgatcaaggcgagttacatgatcccccatgttgtgcaaaaaagcggttagctccttcggtcctccgatcgttgtcagaagtaagttggccgcagtgttatcactcatggttatggcagcactgcataattctcttactgtcatgccatccgtaagatgcttttctgtgactggtgagtactcaaccaagtcattctgagaatagtgtatgcggcgaccgagttgctcttgcccggcgtcaatacgggataataccgcgccacatagcagaactttaaaagtgctcatcattggaaaacgttcttcggggcgaaaactctcaaggatcttaccgctgttgagatccagttcgatgtaacccactcgtgcacccaactgatcttcagcatcttttactttcaccagcgtttctgggtgagcaaaaacaggaaggcaaaatgccgcaaaaaagggaataagggcgacacggaaatgttgaatactcatactcttcctttttcaatattattgaagcatttatcagggttattgtctcatgagcggatacatatttgaatgtatttagaaaaataaacaaataggggttccgcgcacatttccccgaaaagtgccacctgacgtcgacggatcgggagatcgatctcccgatcccctagggtcgactctcagtacaatctgctctgatgccgcatagttaagccagtatctgctccctgcttgtgtgttggaggtcgctgagtagtgcgcgagcaaaatttaagctacaacaaggcaaggcttgaccgacaattgcatgaagaatctgcttagggttaggcgttttgcgctgcttcgcgatgtacgggccagatatacgcgtt

SEQ ID NO: 416 - DNA, 8499 bp, synthetic construct
  source 1..8499: mol_type = other DNA
gacattgattattgactagttattaatagtaatcaattacggggtcattagttcatagcccatatatggagttccgcgttacataacttacggtaaatggcccgcctggctgaccgcccaacgacccccgcccattgacgtcaataatgacgtatgttcccatagtaacgccaatagggactttccattgacgtcaatgggtggagtatttacggtaaactgcccacttggcagtacatcaagtgtatcatatgccaagtacgccccctattgacgtcaatgacggtaaatggcccgcctggcattatgcccagtacatgaccttatgggactttcctacttggcagtacatctacgtattagtcatcgctattaccatggtgatgcggttttggcagtacatcaatgggcgtggatagcggtttgactcacggggatttccaagtctccaccccattgacgtcaatgggagtttgttttggcaccaaaatcaacgggactttccaaaatgtcgtaacaactccgccccattgacgcaaatgggcggtaggcgtgtacggtgggaggtctatataagcagagctggtttagtgaaccgtcagatccgctagagatccgcggccgctaatacgactcactatagggagagccgccaccatgaaacggacagccgacggaagcgagttcgagtcaccaaagaagaagcggaaagtcaaagacaagttcaagctgtacttccagaacccgcaatttatggggggctgggacaaggataaagagacagactaccgcgcgacaattctccgctatggctccaaatactatctggccatcatggacaagaagtacgcgaagtgcctgcagaagatcgacaaagacgacgtcaatggcaactatgaaaagatcaactacaagctgctgccgggcccgaacaagatgctcccgaaggtgttcttcagcaagaagtggatggcctactacaatccaagcgaggatattcagaaaatctataaaaacgggaccttcaagaagggggacatgtttaacctcaacgactgccacaagctcattgatttcttcaaggatagcatttcccgctacccgaaatggtccaatgcgtacgattttaacttctccgagacagaaaagtacaaagacatcgcgggcttttacagggaggtggaggagcaagggtataaagtttcttttgaatccgcgagcaagaaggaagtcgacaagctcgtcgaggagggcaagctctacatgttccaaatttataacaaggacttttccgacaagagccatgggaccccaaacctccacaccatgtacttcaaactgctctttgacgagaacaaccacgggcaaatcaggctgagcggcggcgccgaattattcatgcgcagggcctccctcaagaaggaagagctggtcgtccatccagccaattccccgatcgcgaacaagaacccggacaatccgaaaaagaccaccaccctgtcctacgacgtctacaaggacaaacgcttcagcgaagaccagtacgaattacacatcccaattgcgattaataagtgcccaaagaatatcttcaaaattaatacagaggtcagggtgctgctcaaacacgacgacaatccgtatgtcatcggcattgacaggggcgagcgcaatctgctctatatcgtggtcgtggatgggaagggcaatattgtggagcagtactccctgaacgagattatcaacaacttcaatgggattaggattaagaccgactatcacagcctgctcgacaagaaagaaaaagagaggtttgaggcccgccaaaactggacctccattgagaatatcaaagaattaaaggccggctatatttcccaagtcgtccacaagatctgcgagctggtggagaaatatgacgccgtgattgcgctcgaagacttaaattctgggttcaagaactcccgcgtgaaggtggaaaaacaggtgtatcagaaattcgagaaaatgctgatcgacaaactcaattatatggtggataagaagtccaacccgtgtgccacagggggcgcgctgaagggctatcagatcaccaacaagttcgagagcttcaagagcatgagcacccagaacgggtttattttctacatcccggcgtggctcacctccaagattgacccgagcaccggcttcgtgaacctcctgaagacaaagtatacctccattgccgacagcaagaagtttatctcctccttcgaccgcattatgtatgtgccggaggaggacctcttcgagttcgccctcgactacaaaaacttcagccgcacagatgcggattacatcaagaagtggaagctgtactcctacgggaacaggatccgcatcttcaggaatccaaaaaaaaataacgtctttgactgggaggaagtgtgcctgacatccgcctacaaggaactgttcaataaatacggcatcaattaccagcagggcgacattcgcgccctcctctgtgagcagtccgacaaagcgttttactccagcttcatggccctcatgtccctgatgctccaaatgaggaatagcatcacagggcgcaccgacgtcgacttcctcatcagcccggtgaagaactccgacgggatcttttacgactcccgcaactatgaggcgcaagagaatgcgatcctcccgaagaacgccgatgcgaacggggcctataatatcgccaggaaagtgctctgggccatcgggcagttcaaaaaggcggaggatgagaagctcgacaaggtgaaaattgccatttccaacaaggagtggctggagtacgcgcagacctccgtgaagcacggctcctctggcagctccggctctagcggctcctctggcagctccggctccaagctggagaagtttacaaactgttacagcctctccaaaaccctcaggtttaaagcgatcccggtgggcaagacccaggagaacatcgacaacaagaggctcctggtggaagacgagaagcgcgccgaagactacaagggcgtgaagaagctgctcgataggtactacctcagctttattaacgacgtgctgcacagcatcaaactcaagaatctcaacaactacatctccctcttccgcaaaaagacccgcaccgagaaggagaacaaggagctggagaacctggagatcaacctccgcaaggaaatcgccaaagcgttcaagggcaatgaagggtacaagagcctcttcaagaaagacatcatcgaaactatcctcccagagtttctcgatgacaaggacgagatcgcgctggtgaactcctttaacgggttcacaaccgcgtttaccggcttctttgataacagggaaaatatgttctccgaggaggccaagtccaccagcatcgccttcaggtgtatcaacgagaacctcacccgctacatttccaatatggacattttcgagaaggtggatgcgatcttcgataagcacgaggtgcaggagatcaaagagaagattctcaattccgattatgacgtcgaggatttcttcgaaggggagttctttaattttgtgctcacacaagagggcattgacgtgtacaacgcgattatcgggggcttcgtcacagagtccggggagaagattaaggggctgaatgagtacatcaatctgtacaatcagaagaccaagcagaaactgccgaaattcaagccgctctacaagcaagtcctgtccgatagggaaagcctctccttctacggcgagaaccagaccacccagaagggacagaagaacagccgcgagagaatgaagcggatcgaagagggcatcaaagagctgggcagccagatcctgaaagaacaccccgtggaaaacacccagctgcagaacgagaagctgtacctgtactacctgcagaatgggcgggatatgtacgtggaccaggaactggacatcaaccggctgtccgactacgatgtggaccatatcgtgcctcagagctttctgaaggacgactccatcgacaacaaggtgctgaccagaagcgacaagaaccggggcaagagcgacaacgtgccctccgaagaggtcgtgaagaagatgaagaactactggcggcagctgctgaacgccaagctgattacccagagaaagttcgacaatctgaccaaggccgagagaggcggcctgagcgagggctataccagcgacgaggaggtgctggaagtcttccgcaacacactgaataagaatagcgagattttctcctccatcaagaagctcgagaagctctttaagaactttgacgagtacagctccgccgggattttcgtgaagaacgggccggcgatcagcaccatctccaaggacatctttggcgagtggaacgtcatcagggacaagtggaacgccgagtacgacgacatccacctgaagaagaaggcggtggtgaccgagaagtatgaggacgatcgcaggaagtccttcaaaaaaatcggctccttcagcctcgaacagctccaggagtatgccgatgcggatctgtccgtcgtcgagaagctgaaggaaatcatcattcagaaggtcgacgagatctataaagtgtacgggtccagcgagaagctgttcgacgccgactttgtgctcgagaagtccctcaaaaagaatgacgccgtggtggccattatgaaagacctgctcgactccgtgaagtccttcgaaaattacattaaagcgttctttggggaggggaaggaaactaacagggatgagtccttctatggcgactttgtcctcgcgtacgacatcctgctgaaggtcgaccacatttacgacgcgatccgcaactacgtgacacagaagccgtactcctctggcggctcaaaaagaaccgccgacggcagcgaattcgagcccaagaagaagaggaaagtcggaagcggagctactaacttcagcctgctgaagcaggctggagacgtggaggagaaccctggacctatggtgagcaagggcgaggagctgttcaccggggtggtgcccatcctggtcgagctggacggcgacgtaaacggccacaagttcagcgtgtccggcgagggcgagggcgatgccacctacggcaagctgaccctgaagttcatctgcaccaccggcaagctgcccgtgccctggcccaccctcgtgaccaccctgacctatggagtgcagtgcttcagccgctaccccgaccacatgaagcagcacgacttcttcaagtccgccatgcccgaaggctacgtccaggagcgcaccatcttcttcaaggacgacggcaactacaagacccgcgccgaggtgaagttcgagggcgacaccctggtgaaccgcatcgagctgaagggcatcgacttcaaggaggacggcaacatcctggggcacaagctggagtacaactacaacagccacaacgtctatatcatggccgacaagcagaagaacggcatcaaggtgaacttcaagatccgccacaacatcgaggacggcagcgtgcagctcgccgaccactaccagcagaacacccccatcggcgacggccccgtgctgctgcccgacaaccactacctgagcacccagtccgccctgagcaaagaccccaacgagaagcgcgatcacatggtcctgctggagttcgtgaccgccgccgggatcactctcggcatggacgagctgtacaagtctggtggttctcccaagaagaagaggaaagtctaaccggtcatcatcaccatcaccattgagtttaaacccgctgatcagcctcgactgtgccttctagttgccagccatctgttgtttgcccctcccccgtgccttccttgaccctggaaggtgccactcccactgtcctttcctaataaaatgaggaaattgcatcgcattgtctgagtaggtgtcattctattctggggggtggggtggggcaggacagcaagggggaggattgggaagacaatagcaggcatgctggggatgcggtgggctctatggcttctgaggcggaaagaaccagctggggctcgataccgtcgacctctagctagagcttggcgtaatcatggtcatagctgtttcctgtgtgaaattgttatccgctcacaattccacacaacatacgagccggaagcataaagtgtaaagcctagggtgcctaatgagtgagctaactcacattaattgcgttgcgctcactgcccgctttccagtcgggaaacctgtcgtgccagctgcattaatgaatcggccaacgcgcggggagaggcggtttgcgtattgggcgctcttccgcttcctcgctcactgactcgctgcgctcggtcgttcggctgcggcgagcggtatcagctcactcaaaggcggtaatacggttatccacagaatcaggggataacgcaggaaagaacatgtgagcaaaaggccagcaaaaggccaggaaccgtaaaaaggccgcgttgctggcgtttttccataggctccgcccccctgacgagcatcacaaaaatcgacgctcaagtcagaggtggcgaaacccgacaggactataaagataccaggcgtttccccctggaagctccctcgtgcgctctcctgttccgaccctgccgcttaccggatacctgtccgcctttctcccttcgggaagcgtggcgctttctcatagctcacgctgtaggtatctcagttcggtgtaggtcgttcgctccaagctgggctgtgtgcacgaaccccccgttcagcccgaccgctgcgccttatccggtaactatcgtcttgagtccaacccggtaagacacgacttatcgccactggcagcagccactggtaacaggattagcagagcgaggtatgtaggcggtgctacagagttcttgaagtggtggcctaactacggctacactagaagaacagtatttggtatctgcgctctgctgaagccagttaccttcggaaaaagagttggtagctcttgatccggcaaacaaaccaccgctggtagcggtggtttttttgtttgcaagcagcagattacgcgcagaaaaaaaggatctcaagaagatcctttgatcttttctacggggtctgacactcagtggaacgaaaactcacgttaagggattttggtcatgagattatcaaaaaggatcttcacctagatccttttaaattaaaaatgaagttttaaatcaatctaaagtatatatgagtaaacttggtctgacagttaccaatgcttaatcagtgaggcacctatctcagcgatctgtctatttcgttcatccatagttgcctgactccccgtcgtgtagataactacgatacgggagggcttaccatctggccccagtgctgcaatgataccgcgagacccacgctcaccggctccagatttatcagcaataaaccagccagccggaagggccgagcgcagaagtggtcctgcaactttatccgcctccatccagtctattaattgttgccgggaagctagagtaagtagttcgccagttaatagtttgcgcaacgttgttgccattgctacaggcatcgtggtgtcacgctcgtcgtttggtatggcttcattcagctccggttcccaacgatcaaggcgagttacatgatcccccatgttgtgcaaaaaagcggttagctccttcggtcctccgatcgttgtcagaagtaagttggccgcagtgttatcactcatggttatggcagcactgcataattctcttactgtcatgccatccgtaagatgcttttctgtgactggtgagtactcaaccaagtcattctgagaatagtgtatgcggcgaccgagttgctcttgcccggcgtcaatacgggataataccgcgccacatagcagaactttaaaagtgctcatcattggaaaacgttcttcggggcgaaaactctcaaggatcttaccgctgttgagatccagttcgatgtaacccactcgtgcacccaactgatcttcagcatcttttactttcaccagcgtttctgggtgagcaaaaacaggaaggcaaaatgccgcaaaaaagggaataagggcgacacggaaatgttgaatactcatactcttcctttttcaatattattgaagcatttatcagggttattgtctcatgagcggatacatatttgaatgtatttagaaaaataaacaaataggggttccgcgcacatttccccgaaaagtgccacctgacgtcgacggatcgggagatcgatctcccgatcccctagggtcgactctcagtacaatctgctctgatgccgcatagttaagccagtatctgctccctgcttgtgtgttggaggtcgctgagtagtgcgcgagcaaaatttaagctacaacaaggcaaggcttgaccgacaattgcatgaagaatctgcttagggttaggcgttttgcgctgcttcgcgatgtacgggccagatatacgcgtt

SEQ ID NO: 417 - DNA, 8499 bp, synthetic construct
  source 1..8499: mol_type = other DNA
gacattgattattgactagttattaatagtaatcaattacggggtcattagttcatagcccatatatggagttccgcgttacataacttacggtaaatggcccgcctggctgaccgcccaacgacccccgcccattgacgtcaataatgacgtatgttcccatagtaacgccaatagggactttccattgacgtcaatgggtggagtatttacggtaaactgcccacttggcagtacatcaagtgtatcatatgccaagtacgccccctattgacgtcaatgacggtaaatggcccgcctggcattatgcccagtacatgaccttatgggactttcctacttggcagtacatctacgtattagtcatcgctattaccatggtgatgcggttttggcagtacatcaatgggcgtggatagcggtttgactcacggggatttccaagtctccaccccattgacgtcaatgggagtttgttttggcaccaaaatcaacgggactttccaaaatgtcgtaacaactccgccccattgacgcaaatgggcggtaggcgtgtacggtgggaggtctatataagcagagctggtttagtgaaccgtcagatccgctagagatccgcggccgctaatacgactcactatagggagagccgccaccatgaaacggacagccgacggaagcgagttcgagtcaccaaagaagaagcggaaagtcaagtccctcaaaaagaatgacgccgtggtggccattatgaaagacctgctcgactccgtgaagtccttcgaaaattacattaaagcgttctttggggaggggaaggaaactaacagggatgagtccttctatggcgactttgtcctcgcgtacgacatcctgctgaaggtcgaccacatttacgacgcgatccgcaactacgtgacacagaagccgtactccaaagacaagttcaagctgtacttccagaacccgcaatttatggggggctgggacaaggataaagagacagactaccgcgcgacaattctccgctatggctccaaatactatctggccatcatggacaagaagtacgcgaagtgcctgcagaagatcgacaaagacgacgtcaatggcaactatgaaaagatcaactacaagctgctgccgggcccgaacaagatgctcccgaaggtgttcttcagcaagaagtggatggcctactacaatccaagcgaggatattcagaaaatctataaaaacgggaccttcaagaagggggacatgtttaacctcaacgactgccacaagctcattgatttcttcaaggatagcatttcccgctacccgaaatggtccaatgcgtacgattttaacttctccgagacagaaaagtacaaagacatcgcgggcttttacagggaggtggaggagcaagggtataaagtttcttttgaatccgcgagcaagaaggaagtcgacaagctcgtcgaggagggcaagctctacatgttccaaatttataacaaggacttttccgacaagagccatgggaccccaaacctccacaccatgtacttcaaactgctctttgacgagaacaaccacgggcaaatcaggctgagcggcggcgccgaattattcatgcgcagggcctccctcaagaaggaagagctggtcgtccatccagccaattccccgatcgcgaacaagaacccggacaatccgaaaaagaccaccaccctgtcctacgacgtctacaaggacaaacgcttcagcgaagaccagtacgaattacacatcccaattgcgattaataagtgcccaaagaatatcttcaaaattaatacagaggtcagggtgctgctcaaacacgacgacaatccgtatgtcatcggcattgacaggggcgagcgcaatctgctctatatcgtggtcgtggatgggaagggcaatattgtggagcagtactccctgaacgagattatcaacaacttcaatgggattaggattaagaccgactatcacagcctgctcgacaagaaagaaaaagagaggtttgaggcccgccaaaactggacctccattgagaatatcaaagaattaaaggccggctatatttcccaagtcgtccacaagatctgcgagctggtggagaaatatgacgccgtgattgcgctcgaagacttaaattctgggttcaagaactcccgcgtgaaggtggaaaaacaggtgtatcagaaattcgagaaaatgctgatcgacaaactcaattatatggtggataagaagtccaacccgtgtgccacagggggcgcgctgaagggctatcagatcaccaacaagttcgagagcttcaagagcatgagcacccagaacgggtttattttctacatcccggcgtggctcacctccaagattgacccgagcaccggcttcgtgaacctcctgaagacaaagtatacctccattgccgacagcaagaagtttatctcctccttcgaccgcattatgtatgtgccggaggaggacctcttcgagttcgccctcgactacaaaaacttcagccgcacagatgcggattacatcaagaagtggaagctgtactcctacgggaacaggatccgcatcttcaggaatccaaaaaaaaataacgtctttgactgggaggaagtgtgcctgacatccgcctacaaggaactgttcaataaatacggcatcaattaccagcagggcgacattcgcgccctcctctgtgagcagtccgacaaagcgttttactccagcttcatggccctcatgtccctgatgctccaaatgaggaatagcatcacagggcgcaccgacgtcgacttcctcatcagcccggtgaagaactccgacgggatcttttacgactcccgcaactatgaggcgcaagagaatgcgatcctcccgaagaacgccgatgcgaacggggcctataatatcgccaggaaagtgctctgggccatcgggcagttcaaaaaggcggaggatgagaagctcgacaaggtgaaaattgccatttccaacaaggagtggctggagtacgcgcagacctccgtgaagcacggctcctctggcagctccggctctagcggctcctctggcagctccggctccaagctggagaagtttacaaactgttacagcctctccaaaaccctcaggtttaaagcgatcccggtgggcaagacccaggagaacatcgacaacaagaggctcctggtggaagacgagaagcgcgccgaagactacaagggcgtgaagaagctgctcgataggtactacctcagctttattaacgacgtgctgcacagcatcaaactcaagaatctcaacaactacatctccctcttccgcaaaaagacccgcaccgagaaggagaacaaggagctggagaacctggagatcaacctccgcaaggaaatcgccaaagcgttcaagggcaatgaagggtacaagagcctcttcaagaaagacatcatcgaaactatcctcccagagtttctcgatgacaaggacgagatcgcgctggtgaactcctttaacgggttcacaaccgcgtttaccggcttctttgataacagggaaaatatgttctccgaggaggccaagtccaccagcatcgccttcaggtgtatcaacgagaacctcacccgctacatttccaatatggacattttcgagaaggtggatgcgatcttcgataagcacgaggtgcaggagatcaaagagaagattctcaattccgattatgacgtcgaggatttcttcgaaggggagttctttaattttgtgctcacacaagagggcattgacgtgtacaacgcgattatcgggggcttcgtcacagagtccggggagaagattaaggggctgaatgagtacatcaatctgtacaatcagaagaccaagcagaaactgccgaaattcaagccgctctacaagcaagtcctgtccgatagggaaagcctctccttctacggcgagaaccagaccacccagaagggacagaagaacagccgcgagagaatgaagcggatcgaagagggcatcaaagagctgggcagccagatcctgaaagaacaccccgtggaaaacacccagctgcagaacgagaagctgtacctgtactacctgcagaatgggcgggatatgtacgtggaccaggaactggacatcaaccggctgtccgactacgatgtggaccatatcgtgcctcagagctttctgaaggacgactccatcgacaacaaggtgctgaccagaagcgacaagaaccggggcaagagcgacaacgtgccctccgaagaggtcgtgaagaagatgaagaactactggcggcagctgctgaacgccaagctgattacccagagaaagttcgacaatctgaccaaggccgagagaggcggcctgagcgagggctataccagcgacgaggaggtgctggaagtcttccgcaacacactgaataagaatagcgagattttctcctccatcaagaagctcgagaagctctttaagaactttgacgagtacagctccgccgggattttcgtgaagaacgggccggcgatcagcaccatctccaaggacatctttggcgagtggaacgtcatcagggacaagtggaacgccgagtacgacgacatccacctgaagaagaaggcggtggtgaccgagaagtatgaggacgatcgcaggaagtccttcaaaaaaatcggctccttcagcctcgaacagctccaggagtatgccgatgcggatctgtccgtcgtcgagaagctgaaggaaatcatcattcagaaggtcgacgagatctataaagtgtacgggtccagcgagaagctgttcgacgccgactttgtgctcgagtctggcggctcaaaaagaaccgccgacggcagcgaattcgagcccaagaagaagaggaaagtcggaagcggagctactaacttcagcctgctgaagcaggctggagacgtggaggagaaccctggacctatggtgagcaagggcgaggagctgttcaccggggtggtgcccatcctggtcgagctggacggcgacgtaaacggccacaagttcagcgtgtccggcgagggcgagggcgatgccacctacggcaagctgaccctgaagttcatctgcaccaccggcaagctgcccgtgccctggcccaccctcgtgaccaccctgacctatggagtgcagtgcttcagccgctaccccgaccacatgaagcagcacgacttcttcaagtccgccatgcccgaaggctacgtccaggagcgcaccatcttcttcaaggacgacggcaactacaagacccgcgccgaggtgaagttcgagggcgacaccctggtgaaccgcatcgagctgaagggcatcgacttcaaggaggacggcaacatcctggggcacaagctggagtacaactacaacagccacaacgtctatatcatggccgacaagcagaagaacggcatcaaggtgaacttcaagatccgccacaacatcgaggacggcagcgtgcagctcgccgaccactaccagcagaacacccccatcggcgacggccccgtgctgctgcccgacaaccactacctgagcacccagtccgccctgagcaaagaccccaacgagaagcgcgatcacatggtcctgctggagttcgtgaccgccgccgggatcactctcggcatggacgagctgtacaagtctggtggttctcccaagaagaagaggaaagtctaaccggtcatcatcaccatcaccattgagtttaaacccgctgatcagcctcgactgtgccttctagttgccagccatctgttgtttgcccctcccccgtgccttccttgaccctggaaggtgccactcccactgtcctttcctaataaaatgaggaaattgcatcgcattgtctgagtaggtgtcattctattctggggggtggggtggggcaggacagcaagggggaggattgggaagacaatagcaggcatgctggggatgcggtgggctctatggcttctgaggcggaaagaaccagctggggctcgataccgtcgacctctagctagagcttggcgtaatcatggtcatagctgtttcctgtgtgaaattgttatccgctcacaattccacacaacatacgagccggaagcataaagtgtaaagcctagggtgcctaatgagtgagctaactcacattaattgcgttgcgctcactgcccgctttccagtcgggaaacctgtcgtgccagctgcattaatgaatcggccaacgcgcggggagaggcggtttgcgtattgggcgctcttccgcttcctcgctcactgactcgctgcgctcggtcgttcggctgcggcgagcggtatcagctcactcaaaggcggtaatacggttatccacagaatcaggggataacgcaggaaagaacatgtgagcaaaaggccagcaaaaggccaggaaccgtaaaaaggccgcgttgctggcgtttttccataggctccgcccccctgacgagcatcacaaaaatcgacgctcaagtcagaggtggcgaaacccgacaggactataaagataccaggcgtttccccctggaagctccctcgtgcgctctcctgttccgaccctgccgcttaccggatacctgtccgcctttctcccttcgggaagcgtggcgctttctcatagctcacgctgtaggtatctcagttcggtgtaggtcgttcgctccaagctgggctgtgtgcacgaaccccccgttcagcccgaccgctgcgccttatccggtaactatcgtcttgagtccaacccggtaagacacgacttatcgccactggcagcagccactggtaacaggattagcagagcgaggtatgtaggcggtgctacagagttcttgaagtggtggcctaactacggctacactagaagaacagtatttggtatctgcgctctgctgaagccagttaccttcggaaaaagagttggtagctcttgatccggcaaacaaaccaccgctggtagcggtggtttttttgtttgcaagcagcagattacgcgcagaaaaaaaggatctcaagaagatcctttgatcttttctacggggtctgacactcagtggaacgaaaactcacgttaagggattttggtcatgagattatcaaaaaggatcttcacctagatccttttaaattaaaaatgaagttttaaatcaatctaaagtatatatgagtaaacttggtctgacagttaccaatgcttaatcagtgaggcacctatctcagcgatctgtctatttcgttcatccatagttgcctgactccccgtcgtgtagataactacgatacgggagggcttaccatctggccccagtgctgcaatgataccgcgagacccacgctcaccggctccagatttatcagcaataaaccagccagccggaagggccgagcgcagaagtggtcctgcaactttatccgcctccatccagtctattaattgttgccgggaagctagagtaagtagttcgccagttaatagtttgcgcaacgttgttgccattgctacaggcatcgtggtgtcacgctcgtcgtttggtatggcttcattcagctccggttcccaacgatcaaggcgagttacatgatcccccatgttgtgcaaaaaagcggttagctccttcggtcctccgatcgttgtcagaagtaagttggccgcagtgttatcactcatggttatggcagcactgcataattctcttactgtcatgccatccgtaagatgcttttctgtgactggtgagtactcaaccaagtcattctgagaatagtgtatgcggcgaccgagttgctcttgcccggcgtcaatacgggataataccgcgccacatagcagaactttaaaagtgctcatcattggaaaacgttcttcggggcgaaaactctcaaggatcttaccgctgttgagatccagttcgatgtaacccactcgtgcacccaactgatcttcagcatcttttactttcaccagcgtttctgggtgagcaaaaacaggaaggcaaaatgccgcaaaaaagggaataagggcgacacggaaatgttgaatactcatactcttcctttttcaatattattgaagcatttatcagggttattgtctcatgagcggatacatatttgaatgtatttagaaaaataaacaaataggggttccgcgcacatttccccgaaaagtgccacctgacgtcgacggatcgggagatcgatctcccgatcccctagggtcgactctcagtacaatctgctctgatgccgcatagttaagccagtatctgctccctgcttgtgtgttggaggtcgctgagtagtgcgcgagcaaaatttaagctacaacaaggcaaggcttgaccgacaattgcatgaagaatctgcttagggttaggcgttttgcgctgcttcgcgatgtacgggccagatatacgcgtt

SEQ ID NO: 418 - DNA, 8499 bp, synthetic construct
  source 1..8499: mol_type = other DNA
gacattgattattgactagttattaatagtaatcaattacggggtcattagttcatagcccatatatggagttccgcgttacataacttacggtaaatggcccgcctggctgaccgcccaacgacccccgcccattgacgtcaataatgacgtatgttcccatagtaacgccaatagggactttccattgacgtcaatgggtggagtatttacggtaaactgcccacttggcagtacatcaagtgtatcatatgccaagtacgccccctattgacgtcaatgacggtaaatggcccgcctggcattatgcccagtacatgaccttatgggactttcctacttggcagtacatctacgtattagtcatcgctattaccatggtgatgcggttttggcagtacatcaatgggcgtggatagcggtttgactcacggggatttccaagtctccaccccattgacgtcaatgggagtttgttttggcaccaaaatcaacgggactttccaaaatgtcgtaacaactccgccccattgacgcaaatgggcggtaggcgtgtacggtgggaggtctatataagcagagctggtttagtgaaccgtcagatccgctagagatccgcggccgctaatacgactcactatagggagagccgccaccatgaaacggacagccgacggaagcgagttcgagtcaccaaagaagaagcggaaagtctccgacaaagcgttttactccagcttcatggccctcatgtccctgatgctccaaatgaggaatagcatcacagggcgcaccgacgtcgacttcctcatcagcccggtgaagaactccgacgggatcttttacgactcccgcaactatgaggcgcaagagaatgcgatcctcccgaagaacgccgatgcgaacggggcctataatatcgccaggaaagtgctctgggccatcgggcagttcaaaaaggcggaggatgagaagctcgacaaggtgaaaattgccatttccaacaaggagtggctggagtacgcgcagacctccgtgaagcacggctcctctggcagctccggctctagcggctcctctggcagctccggctccaagctggagaagtttacaaactgttacagcctctccaaaaccctcaggtttaaagcgatcccggtgggcaagacccaggagaacatcgacaacaagaggctcctggtggaagacgagaagcgcgccgaagactacaagggcgtgaagaagctgctcgataggtactacctcagctttattaacgacgtgctgcacagcatcaaactcaagaatctcaacaactacatctccctcttccgcaaaaagacccgcaccgagaaggagaacaaggagctggagaacctggagatcaacctccgcaaggaaatcgccaaagcgttcaagggcaatgaagggtacaagagcctcttcaagaaagacatcatcgaaactatcctcccagagtttctcgatgacaaggacgagatcgcgctggtgaactcctttaacgggttcacaaccgcgtttaccggcttctttgataacagggaaaatatgttctccgaggaggccaagtccaccagcatcgccttcaggtgtatcaacgagaacctcacccgctacatttccaatatggacattttcgagaaggtggatgcgatcttcgataagcacgaggtgcaggagatcaaagagaagattctcaattccgattatgacgtcgaggatttcttcgaaggggagttctttaattttgtgctcacacaagagggcattgacgtgtacaacgcgattatcgggggcttcgtcacagagtccggggagaagattaaggggctgaatgagtacatcaatctgtacaatcagaagaccaagcagaaactgccgaaattcaagccgctctacaagcaagtcctgtccgatagggaaagcctctccttctacggcgagaaccagaccacccagaagggacagaagaacagccgcgagagaatgaagcggatcgaagagggcatcaaagagctgggcagccagatcctgaaagaacaccccgtggaaaacacccagctgcagaacgagaagctgtacctgtactacctgcagaatgggcgggatatgtacgtggaccaggaactggacatcaaccggctgtccgactacgatgtggaccatatcgtgcctcagagctttctgaaggacgactccatcgacaacaaggtgctgaccagaagcgacaagaaccggggcaagagcgacaacgtgccctccgaagaggtcgtgaagaagatgaagaactactggcggcagctgctgaacgccaagctgattacccagagaaagttcgacaatctgaccaaggccgagagaggcggcctgagcgagggctataccagcgacgaggaggtgctggaagtcttccgcaacacactgaataagaatagcgagattttctcctccatcaagaagctcgagaagctctttaagaactttgacgagtacagctccgccgggattttcgtgaagaacgggccggcgatcagcaccatctccaaggacatctttggcgagtggaacgtcatcagggacaagtggaacgccgagtacgacgacatccacctgaagaagaaggcggtggtgaccgagaagtatgaggacgatcgcaggaagtccttcaaaaaaatcggctccttcagcctcgaacagctccaggagtatgccgatgcggatctgtccgtcgtcgagaagctgaaggaaatcatcattcagaaggtcgacgagatctataaagtgtacgggtccagcgagaagctgttcgacgccgactttgtgctcgagaagtccctcaaaaagaatgacgccgtggtggccattatgaaagacctgctcgactccgtgaagtccttcgaaaattacattaaagcgttctttggggaggggaaggaaactaacagggatgagtccttctatggcgactttgtcctcgcgtacgacatcctgctgaaggtcgaccacatttacgacgcgatccgcaactacgtgacacagaagccgtactccaaagacaagttcaagctgtacttccagaacccgcaatttatggggggctgggacaaggataaagagacagactaccgcgcgacaattctccgctatggctccaaatactatctggccatcatggacaagaagtacgcgaagtgcctgcagaagatcgacaaagacgacgtcaatggcaactatgaaaagatcaactacaagctgctgccgggcccgaacaagatgctcccgaaggtgttcttcagcaagaagtggatggcctactacaatccaagcgaggatattcagaaaatctataaaaacgggaccttcaagaagggggacatgtttaacctcaacgactgccacaagctcattgatttcttcaaggatagcatttcccgctacccgaaatggtccaatgcgtacgattttaacttctccgagacagaaaagtacaaagacatcgcgggcttttacagggaggtggaggagcaagggtataaagtttcttttgaatccgcgagcaagaaggaagtcgacaagctcgtcgaggagggcaagctctacatgttccaaatttataacaaggacttttccgacaagagccatgggaccccaaacctccacaccatgtacttcaaactgctctttgacgagaacaaccacgggcaaatcaggctgagcggcggcgccgaattattcatgcgcagggcctccctcaagaaggaagagctggtcgtccatccagccaattccccgatcgcgaacaagaacccggacaatccgaaaaagaccaccaccctgtcctacgacgtctacaaggacaaacgcttcagcgaagaccagtacgaattacacatcccaattgcgattaataagtgcccaaagaatatcttcaaaattaatacagaggtcagggtgctgctcaaacacgacgacaatccgtatgtcatcggcattgacaggggcgagcgcaatctgctctatatcgtggtcgtggatgggaagggcaatattgtggagcagtactccctgaacgagattatcaacaacttcaatgggattaggattaagaccgactatcacagcctgctcgacaagaaagaaaaagagaggtttgaggcccgccaaaactggacctccattgagaatatcaaagaattaaaggccggctatatttcccaagtcgtccacaagatctgcgagctggtggagaaatatgacgccgtgattgcgctcgaagacttaaattctgggttcaagaactcccgcgtgaaggtggaaaaacaggtgtatcagaaattcgagaaaatgctgatcgacaaactcaattatatggtggataagaagtccaacccgtgtgccacagggggcgcgctgaagggctatcagatcaccaacaagttcgagagcttcaagagcatgagcacccagaacgggtttattttctacatcccggcgtggctcacctccaagattgacccgagcaccggcttcgtgaacctcctgaagacaaagtatacctccattgccgacagcaagaagtttatctcctccttcgaccgcattatgtatgtgccggaggaggacctcttcgagttcgccctcgactacaaaaacttcagccgcacagatgcggattacatcaagaagtggaagctgtactcctacgggaacaggatccgcatcttcaggaatccaaaaaaaaataacgtctttgactgggaggaagtgtgcctgacatccgcctacaaggaactgttcaataaatacggcatcaattaccagcagggcgacattcgcgccctcctctgtgagcagtctggcggctcaaaaagaaccgccgacggcagcgaattcgagcccaagaagaagaggaaagtcggaagcggagctactaacttcagcctgctgaagcaggctggagacgtggaggagaaccctggacctatggtgagcaagggcgaggagctgttcaccggggtggtgcccatcctggtcgagctggacggcgacgtaaacggccacaagttcagcgtgtccggcgagggcgagggcgatgccacctacggcaagctgaccctgaagttcatctgcaccaccggcaagctgcccgtgccctggcccaccctcgtgaccaccctgacctatggagtgcagtgcttcagccgctaccccgaccacatgaagcagcacgacttcttcaagtccgccatgcccgaaggctacgtccaggagcgcaccatcttcttcaaggacgacggcaactacaagacccgcgccgaggtgaagttcgagggcgacaccctggtgaaccgcatcgagctgaagggcatcgacttcaaggaggacggcaacatcctggggcacaagctggagtacaactacaacagccacaacgtctatatcatggccgacaagcagaagaacggcatcaaggtgaacttcaagatccgccacaacatcgaggacggcagcgtgcagctcgccgaccactaccagcagaacacccccatcggcgacggccccgtgctgctgcccgacaaccactacctgagcacccagtccgccctgagcaaagaccccaacgagaagcgcgatcacatggtcctgctggagttcgtgaccgccgccgggatcactctcggcatggacgagctgtacaagtctggtggttctcccaagaagaagaggaaagtctaaccggtcatcatcaccatcaccattgagtttaaacccgctgatcagcctcgactgtgccttctagttgccagccatctgttgtttgcccctcccccgtgccttccttgaccctggaaggtgccactcccactgtcctttcctaataaaatgaggaaattgcatcgcattgtctgagtaggtgtcattctattctggggggtggggtggggcaggacagcaagggggaggattgggaagacaatagcaggcatgctggggatgcggtgggctctatggcttctgaggcggaaagaaccagctggggctcgataccgtcgacctctagctagagcttggcgtaatcatggtcatagctgtttcctgtgtgaaattgttatccgctcacaattccacacaacatacgagccggaagcataaagtgtaaagcctagggtgcctaatgagtgagctaactcacattaattgcgttgcgctcactgcccgctttccagtcgggaaacctgtcgtgccagctgcattaatgaatcggccaacgcgcggggagaggcggtttgcgtattgggcgctcttccgcttcctcgctcactgactcgctgcgctcggtcgttcggctgcggcgagcggtatcagctcactcaaaggcggtaatacggttatccacagaatcaggggataacgcaggaaagaacatgtgagcaaaaggccagcaaaaggccaggaaccgtaaaaaggccgcgttgctggcgtttttccataggctccgcccccctgacgagcatcacaaaaatcgacgctcaagtcagaggtggcgaaacccgacaggactataaagataccaggcgtttccccctggaagctccctcgtgcgctctcctgttccgaccctgccgcttaccggatacctgtccgcctttctcccttcgggaagcgtggcgctttctcatagctcacgctgtaggtatctcagttcggtgtaggtcgttcgctccaagctgggctgtgtgcacgaaccccccgttcagcccgaccgctgcgccttatccggtaactatcgtcttgagtccaacccggtaagacacgacttatcgccactggcagcagccactggtaacaggattagcagagcgaggtatgtaggcggtgctacagagttcttgaagtggtggcctaactacggctacactagaagaacagtatttggtatctgcgctctgctgaagccagttaccttcggaaaaagagttggtagctcttgatccggcaaacaaaccaccgctggtagcggtggtttttttgtttgcaagcagcagattacgcgcagaaaaaaaggatctcaagaagatcctttgatcttttctacggggtctgacactcagtggaacgaaaactcacgttaagggattttggtcatgagattatcaaaaaggatcttcacctagatccttttaaattaaaaatgaagttttaaatcaatctaaagtatatatgagtaaacttggtctgacagttaccaatgcttaatcagtgaggcacctatctcagcgatctgtctatttcgttcatccatagttgcctgactccccgtcgtgtagataactacgatacgggagggcttaccatctggccccagtgctgcaatgataccgcgagacccacgctcaccggctccagatttatcagcaataaaccagccagccggaagggccgagcgcagaagtggtcctgcaactttatccgcctccatccagtctattaattgttgccgggaagctagagtaagtagttcgccagttaatagtttgcgcaacgttgttgccattgctacaggcatcgtggtgtcacgctcgtcgtttggtatggcttcattcagctccggttcccaacgatcaaggcgagttacatgatcccccatgttgtgcaaaaaagcggttagctccttcggtcctccgatcgttgtcagaagtaagttggccgcagtgttatcactcatggttatggcagcactgcataattctcttactgtcatgccatccgtaagatgcttttctgtgactggtgagtactcaaccaagtcattctgagaatagtgtatgcggcgaccgagttgctcttgcccggcgtcaatacgggataataccgcgccacatagcagaactttaaaagtgctcatcattggaaaacgttcttcggggcgaaaactctcaaggatcttaccgctgttgagatccagttcgatgtaacccactcgtgcacccaactgatcttcagcatcttttactttcaccagcgtttctgggtgagcaaaaacaggaaggcaaaatgccgcaaaaaagggaataagggcgacacggaaatgttgaatactcatactcttcctttttcaatattattgaagcatttatcagggttattgtctcatgagcggatacatatttgaatgtatttagaaaaataaacaaataggggttccgcgcacatttccccgaaaagtgccacctgacgtcgacggatcgggagatcgatctcccgatcccctagggtcgactctcagtacaatctgctctgatgccgcatagttaagccagtatctgctccctgcttgtgtgttggaggtcgctgagtagtgcgcgagcaaaatttaagctacaacaaggcaaggcttgaccgacaattgcatgaagaatctgcttagggttaggcgttttgcgctgcttcgcgatgtacgggccagatatacgcgtt

SEQ ID NO: 419 - DNA, 8505 bp, synthetic construct
  source 1..8505: mol_type = other DNA
gacattgattattgactagttattaatagtaatcaattacggggtcattagttcatagcccatatatggagttccgcgttacataacttacggtaaatggcccgcctggctgaccgcccaacgacccccgcccattgacgtcaataatgacgtatgttcccatagtaacgccaatagggactttccattgacgtcaatgggtggagtatttacggtaaactgcccacttggcagtacatcaagtgtatcatatgccaagtacgccccctattgacgtcaatgacggtaaatggcccgcctggcattatgcccagtacatgaccttatgggactttcctacttggcagtacatctacgtattagtcatcgctattaccatggtgatgcggttttggcagtacatcaatgggcgtggatagcggtttgactcacggggatttccaagtctccaccccattgacgtcaatgggagtttgttttggcaccaaaatcaacgggactttccaaaatgtcgtaacaactccgccccattgacgcaaatgggcggtaggcgtgtacggtgggaggtctatataagcagagctggtttagtgaaccgtcagatccgctagagatccgcggccgctaatacgactcactatagggagagccgccaccatgaaacggacagccgacggaagcgagttcgagtcaccaaagaagaagcggaaagtccgcaccgagaaggagaacaaggagctggagaacctggagatcaacctccgcaaggaaatcgccaaagcgttcaagggcaatgaagggtacaagagcctcttcaagaaagacatcatcgaaactatcctcccagagtttctcgatgacaaggacgagatcgcgctggtgaactcctttaacgggttcacaaccgcgtttaccggcttctttgataacagggaaaatatgttctccgaggaggccaagtccaccagcatcgccttcaggtgtatcaacgagaacctcacccgctacatttccaatatggacattttcgagaaggtggatgcgatcttcgataagcacgaggtgcaggagatcaaagagaagattctcaattccgattatgacgtcgaggatttcttcgaaggggagttctttaattttgtgctcacacaagagggcattgacgtgtacaacgcgattatcgggggcttcgtcacagagtccggggagaagattaaggggctgaatgagtacatcaatctgtacaatcagaagaccaagcagaaactgccgaaattcaagccgctctacaagcaagtcctgtccgatagggaaagcctctccttctacggcagcggcgagaaccagaccacccagaagggacagaagaacagccgcgagagaatgaagcggatcgaagagggcatcaaagagctgggcagccagatcctgaaagaacaccccgtggaaaacacccagctgcagaacgagaagctgtacctgtactacctgcagaatgggcgggatatgtacgtggaccaggaactggacatcaaccggctgtccgactacgatgtggaccatatcgtgcctcagagctttctgaaggacgactccatcgacaacaaggtgctgaccagaagcgacaagaaccggggcaagagcgacaacgtgccctccgaagaggtcgtgaagaagatgaagaactactggcggcagctgctgaacgccaagctgattacccagagaaagttcgacaatctgaccaaggccgagagaggcggcctgagcgagggctataccagcgacgaggaggtgctggaagtcttccgcaacacactgaataagaatagcgagattttctcctccatcaagaagctcgagaagctctttaagaactttgacgagtacagctccgccgggattttcgtgaagaacgggccggcgatcagcaccatctccaaggacatctttggcgagtggaacgtcatcagggacaagtggaacgccgagtacgacgacatccacctgaagaagaaggcggtggtgaccgagaagtatgaggacgatcgcaggaagtccttcaaaaaaatcggctccttcagcctcgaacagctccaggagtatgccgatgcggatctgtccgtcgtcgagaagctgaaggaaatcatcattcagaaggtcgacgagatctataaagtgtacgggtccagcgagaagctgttcgacgccgactttgtgctcgagaagtccctcaaaaagaatgacgccgtggtggccattatgaaagacctgctcgactccgtgaagtccttcgaaaattacattaaagcgttctttggggaggggaaggaaactaacagggatgagtccttctatggcgactttgtcctcgcgtacgacatcctgctgaaggtcgaccacatttacgacgcgatccgcaactacgtgacacagaagccgtactccaaagacaagttcaagctgtacttccagaacccgcaatttatggggggctgggacaaggataaagagacagactaccgcgcgacaattctccgctatggctccaaatactatctggccatcatggacaagaagtacgcgaagtgcctgcagaagatcgacaaagacgacgtcaatggcaactatgaaaagatcaactacaagctgctgccgggcccgaacaagatgctcccgaaggtgttcttcagcaagaagtggatggcctactacaatccaagcgaggatattcagaaaatctataaaaacgggaccttcaagaagggggacatgtttaacctcaacgactgccacaagctcattgatttcttcaaggatagcatttcccgctacccgaaatggtccaatgcgtacgattttaacttctccgagacagaaaagtacaaagacatcgcgggcttttacagggaggtggaggagcaagggtataaagtttcttttgaatccgcgagcaagaaggaagtcgacaagctcgtcgaggagggcaagctctacatgttccaaatttataacaaggacttttccgacaagagccatgggaccccaaacctccacaccatgtacttcaaactgctctttgacgagaacaaccacgggcaaatcaggctgagcggcggcgccgaattattcatgcgcagggcctccctcaagaaggaagagctggtcgtccatccagccaattccccgatcgcgaacaagaacccggacaatccgaaaaagaccaccaccctgtcctacgacgtctacaaggacaaacgcttcagcgaagaccagtacgaattacacatcccaattgcgattaataagtgcccaaagaatatcttcaaaattaatacagaggtcagggtgctgctcaaacacgacgacaatccgtatgtcatcggcattgacaggggcgagcgcaatctgctctatatcgtggtcgtggatgggaagggcaatattgtggagcagtactccctgaacgagattatcaacaacttcaatgggattaggattaagaccgactatcacagcctgctcgacaagaaagaaaaagagaggtttgaggcccgccaaaactggacctccattgagaatatcaaagaattaaaggccggctatatttcccaagtcgtccacaagatctgcgagctggtggagaaatatgacgccgtgattgcgctcgaagacttaaattctgggttcaagaactcccgcgtgaaggtggaaaaacaggtgtatcagaaattcgagaaaatgctgatcgacaaactcaattatatggtggataagaagtccaacccgtgtgccacagggggcgcgctgaagggctatcagatcaccaacaagttcgagagcttcaagagcatgagcacccagaacgggtttattttctacatcccggcgtggctcacctccaagattgacccgagcaccggcttcgtgaacctcctgaagacaaagtatacctccattgccgacagcaagaagtttatctcctccttcgaccgcattatgtatgtgccggaggaggacctcttcgagttcgccctcgactacaaaaacttcagccgcacagatgcggattacatcaagaagtggaagctgtactcctacgggaacaggatccgcatcttcaggaatccaaaaaaaaataacgtctttgactgggaggaagtgtgcctgacatccgcctacaaggaactgttcaataaatacggcatcaattaccagcagggcgacattcgcgccctcctctgtgagcagtccgacaaagcgttttactccagcttcatggccctcatgtccctgatgctccaaatgaggaatagcatcacagggcgcaccgacgtcgacttcctcatcagcccggtgaagaactccgacgggatcttttacgactcccgcaactatgaggcgcaagagaatgcgatcctcccgaagaacgccgatgcgaacggggcctataatatcgccaggaaagtgctctgggccatcgggcagttcaaaaaggcggaggatgagaagctcgacaaggtgaaaattgccatttccaacaaggagtggctggagtacgcgcagacctccgtgaagcacggctcctctggcagctccggctctagcggctcctctggcagctccggctccaagctggagaagtttacaaactgttacagcctctccaaaaccctcaggtttaaagcgatcccggtgggcaagacccaggagaacatcgacaacaagaggctcctggtggaagacgagaagcgcgccgaagactacaagggcgtgaagaagctgctcgataggtactacctcagctttattaacgacgtgctgcacagcatcaaactcaagaatctcaacaactacatctccctcttccgcaaaaagacctctggcggctcaaaaagaaccgccgacggcagcgaattcgagcccaagaagaagaggaaagtcggaagcggagctactaacttcagcctgctgaagcaggctggagacgtggaggagaaccctggacctatggtgagcaagggcgaggagctgttcaccggggtggtgcccatcctggtcgagctggacggcgacgtaaacggccacaagttcagcgtgtccggcgagggcgagggcgatgccacctacggcaagctgaccctgaagttcatctgcaccaccggcaagctgcccgtgccctggcccaccctcgtgaccaccctgacctatggagtgcagtgcttcagccgctaccccgaccacatgaagcagcacgacttcttcaagtccgccatgcccgaaggctacgtccaggagcgcaccatcttcttcaaggacgacggcaactacaagacccgcgccgaggtgaagttcgagggcgacaccctggtgaaccgcatcgagctgaagggcatcgacttcaaggaggacggcaacatcctggggcacaagctggagtacaactacaacagccacaacgtctatatcatggccgacaagcagaagaacggcatcaaggtgaacttcaagatccgccacaacatcgaggacggcagcgtgcagctcgccgaccactaccagcagaacacccccatcggcgacggccccgtgctgctgcccgacaaccactacctgagcacccagtccgccctgagcaaagaccccaacgagaagcgcgatcacatggtcctgctggagttcgtgaccgccgccgggatcactctcggcatggacgagctgtacaagtctggtggttctcccaagaagaagaggaaagtctaaccggtcatcatcaccatcaccattgagtttaaacccgctgatcagcctcgactgtgccttctagttgccagccatctgttgtttgcccctcccccgtgccttccttgaccctggaaggtgccactcccactgtcctttcctaataaaatgaggaaattgcatcgcattgtctgagtaggtgtcattctattctggggggtggggtggggcaggacagcaagggggaggattgggaagacaatagcaggcatgctggggatgcggtgggctctatggcttctgaggcggaaagaaccagctggggctcgataccgtcgacctctagctagagcttggcgtaatcatggtcatagctgtttcctgtgtgaaattgttatccgctcacaattccacacaacatacgagccggaagcataaagtgtaaagcctagggtgcctaatgagtgagctaactcacattaattgcgttgcgctcactgcccgctttccagtcgggaaacctgtcgtgccagctgcattaatgaatcggccaacgcgcggggagaggcggtttgcgtattgggcgctcttccgcttcctcgctcactgactcgctgcgctcggtcgttcggctgcggcgagcggtatcagctcactcaaaggcggtaatacggttatccacagaatcaggggataacgcaggaaagaacatgtgagcaaaaggccagcaaaaggccaggaaccgtaaaaaggccgcgttgctggcgtttttccataggctccgcccccctgacgagcatcacaaaaatcgacgctcaagtcagaggtggcgaaacccgacaggactataaagataccaggcgtttccccctggaagctccctcgtgcgctctcctgttccgaccctgccgcttaccggatacctgtccgcctttctcccttcgggaagcgtggcgctttctcatagctcacgctgtaggtatctcagttcggtgtaggtcgttcgctccaagctgggctgtgtgcacgaaccccccgttcagcccgaccgctgcgccttatccggtaactatcgtcttgagtccaacccggtaagacacgacttatcgccactggcagcagccactggtaacaggattagcagagcgaggtatgtaggcggtgctacagagttcttgaagtggtggcctaactacggctacactagaagaacagtatttggtatctgcgctctgctgaagccagttaccttcggaaaaagagttggtagctcttgatccggcaaacaaaccaccgctggtagcggtggtttttttgtttgcaagcagcagattacgcgcagaaaaaaaggatctcaagaagatcctttgatcttttctacggggtctgacactcagtggaacgaaaactcacgttaagggattttggtcatgagattatcaaaaaggatcttcacctagatccttttaaattaaaaatgaagttttaaatcaatctaaagtatatatgagtaaacttggtctgacagttaccaatgcttaatcagtgaggcacctatctcagcgatctgtctatttcgttcatccatagttgcctgactccccgtcgtgtagataactacgatacgggagggcttaccatctggccccagtgctgcaatgataccgcgagacccacgctcaccggctccagatttatcagcaataaaccagccagccggaagggccgagcgcagaagtggtcctgcaactttatccgcctccatccagtctattaattgttgccgggaagctagagtaagtagttcgccagttaatagtttgcgcaacgttgttgccattgctacaggcatcgtggtgtcacgctcgtcgtttggtatggcttcattcagctccggttcccaacgatcaaggcgagttacatgatcccccatgttgtgcaaaaaagcggttagctccttcggtcctccgatcgttgtcagaagtaagttggccgcagtgttatcactcatggttatggcagcactgcataattctcttactgtcatgccatccgtaagatgcttttctgtgactggtgagtactcaaccaagtcattctgagaatagtgtatgcggcgaccgagttgctcttgcccggcgtcaatacgggataataccgcgccacatagcagaactttaaaagtgctcatcattggaaaacgttcttcggggcgaaaactctcaaggatcttaccgctgttgagatccagttcgatgtaacccactcgtgcacccaactgatcttcagcatcttttactttcaccagcgtttctgggtgagcaaaaacaggaaggcaaaatgccgcaaaaaagggaataagggcgacacggaaatgttgaatactcatactcttcctttttcaatattattgaagcatttatcagggttattgtctcatgagcggatacatatttgaatgtatttagaaaaataaacaaataggggttccgcgcacatttccccgaaaagtgccacctgacgtcgacggatcgggagatcgatctcccgatcccctagggtcgactctcagtacaatctgctctgatgccgcatagttaagccagtatctgctccctgcttgtgtgttggaggtcgctgagtagtgcgcgagcaaaatttaagctacaacaaggcaaggcttgaccgacaattgcatgaagaatctgcttagggttaggcgttttgcgctgcttcgcgatgtacgggccagatatacgcgtt

SEQ ID NO: 420 - DNA, 8505 bp, synthetic construct
  source 1..8505: mol_type = other DNA
gacattgattattgactagttattaatagtaatcaattacggggtcattagttcatagcccatatatggagttccgcgttacataacttacggtaaatggcccgcctggctgaccgcccaacgacccccgcccattgacgtcaataatgacgtatgttcccatagtaacgccaatagggactttccattgacgtcaatgggtggagtatttacggtaaactgcccacttggcagtacatcaagtgtatcatatgccaagtacgccccctattgacgtcaatgacggtaaatggcccgcctggcattatgcccagtacatgaccttatgggactttcctacttggcagtacatctacgtattagtcatcgctattaccatggtgatgcggttttggcagtacatcaatgggcgtggatagcggtttgactcacggggatttccaagtctccaccccattgacgtcaatgggagtttgttttggcaccaaaatcaacgggactttccaaaatgtcgtaacaactccgccccattgacgcaaatgggcggtaggcgtgtacggtgggaggtctatataagcagagctggtttagtgaaccgtcagatccgctagagatccgcggccgctaatacgactcactatagggagagccgccaccatgaaacggacagccgacggaagcgagttcgagtcaccaaagaagaagcggaaagtctccgacgggatcttttacgactcccgcaactatgaggcgcaagagaatgcgatcctcccgaagaacgccgatgcgaacggggcctataatatcgccaggaaagtgctctgggccatcgggcagttcaaaaaggcggaggatgagaagctcgacaaggtgaaaattgccatttccaacaaggagtggctggagtacgcgcagacctccgtgaagcacggctcctctggcagctccggctctagcggctcctctggcagctccggctccaagctggagaagtttacaaactgttacagcctctccaaaaccctcaggtttaaagcgatcccggtgggcaagacccaggagaacatcgacaacaagaggctcctggtggaagacgagaagcgcgccgaagactacaagggcgtgaagaagctgctcgataggtactacctcagctttattaacgacgtgctgcacagcatcaaactcaagaatctcaacaactacatctccctcttccgcaaaaagacccgcaccgagaaggagaacaaggagctggagaacctggagatcaacctccgcaaggaaatcgccaaagcgttcaagggcaatgaagggtacaagagcctcttcaagaaagacatcatcgaaactatcctcccagagtttctcgatgacaaggacgagatcgcgctggtgaactcctttaacgggttcacaaccgcgtttaccggcttctttgataacagggaaaatatgttctccgaggaggccaagtccaccagcatcgccttcaggtgtatcaacgagaacctcacccgctacatttccaatatggacattttcgagaaggtggatgcgatcttcgataagcacgaggtgcaggagatcaaagagaagattctcaattccgattatgacgtcgaggatttcttcgaaggggagttctttaattttgtgctcacacaagagggcattgacgtgtacaacgcgattatcgggggcttcgtcacagagtccggggagaagattaaggggctgaatgagtacatcaatctgtacaatcagaagaccaagcagaaactgccgaaattcaagccgctctacaagcaagtcctgtccgatagggaaagcctctccttctacggcagcggcgagaaccagaccacccagaagggacagaagaacagccgcgagagaatgaagcggatcgaagagggcatcaaagagctgggcagccagatcctgaaagaacaccccgtggaaaacacccagctgcagaacgagaagctgtacctgtactacctgcagaatgggcgggatatgtacgtggaccaggaactggacatcaaccggctgtccgactacgatgtggaccatatcgtgcctcagagctttctgaaggacgactccatcgacaacaaggtgctgaccagaagcgacaagaaccggggcaagagcgacaacgtgccctccgaagaggtcgtgaagaagatgaagaactactggcggcagctgctgaacgccaagctgattacccagagaaagttcgacaatctgaccaaggccgagagaggcggcctgagcgagggctataccagcgacgaggaggtgctggaagtcttccgcaacacactgaataagaatagcgagattttctcctccatcaagaagctcgagaagctctttaagaactttgacgagtacagctccgccgggattttcgtgaagaacgggccggcgatcagcaccatctccaaggacatctttggcgagtggaacgtcatcagggacaagtggaacgccgagtacgacgacatccacctgaagaagaaggcggtggtgaccgagaagtatgaggacgatcgcaggaagtccttcaaaaaaatcggctccttcagcctcgaacagctccaggagtatgccgatgcggatctgtccgtcgtcgagaagctgaaggaaatcatcattcagaaggtcgacgagatctataaagtgtacgggtccagcgagaagctgttcgacgccgactttgtgctcgagaagtccctcaaaaagaatgacgccgtggtggccattatgaaagacctgctcgactccgtgaagtccttcgaaaattacattaaagcgttctttggggaggggaaggaaactaacagggatgagtccttctatggcgactttgtcctcgcgtacgacatcctgctgaaggtcgaccacatttacgacgcgatccgcaactacgtgacacagaagccgtactccaaagacaagttcaagctgtacttccagaacccgcaatttatggggggctgggacaaggataaagagacagactaccgcgcgacaattctccgctatggctccaaatactatctggccatcatggacaagaagtacgcgaagtgcctgcagaagatcgacaaagacgacgtcaatggcaactatgaaaagatcaactacaagctgctgccgggcccgaacaagatgctcccgaaggtgttcttcagcaagaagtggatggcctactacaatccaagcgaggatattcagaaaatctataaaaacgggaccttcaagaagggggacatgtttaacctcaacgactgccacaagctcattgatttcttcaaggatagcatttcccgctacccgaaatggtccaatgcgtacgattttaacttctccgagacagaaaagtacaaagacatcgcgggcttttacagggaggtggaggagcaagggtataaagtttcttttgaatccgcgagcaagaaggaagtcgacaagctcgtcgaggagggcaagctctacatgttccaaatttataacaaggacttttccgacaagagccatgggaccccaaacctccacaccatgtacttcaaactgctctttgacgagaacaaccacgggcaaatcaggctgagcggcggcgccgaattattcatgcgcagggcctccctcaagaaggaagagctggtcgtccatccagccaattccccgatcgcgaacaagaacccggacaatccgaaaaagaccaccaccctgtcctacgacgtctacaaggacaaacgcttcagcgaagaccagtacgaattacacatcccaattgcgattaataagtgcccaaagaatatcttcaaaattaatacagaggtcagggtgctgctcaaacacgacgacaatccgtatgtcatcggcattgacaggggcgagcgcaatctgctctatatcgtggtcgtggatgggaagggcaatattgtggagcagtactccctgaacgagattatcaacaacttcaatgggattaggattaagaccgactatcacagcctgctcgacaagaaagaaaaagagaggtttgaggcccgccaaaactggacctccattgagaatatcaaagaattaaaggccggctatatttcccaagtcgtccacaagatctgcgagctggtggagaaatatgacgccgtgattgcgctcgaagacttaaattctgggttcaagaactcccgcgtgaaggtggaaaaacaggtgtatcagaaattcgagaaaatgctgatcgacaaactcaattatatggtggataagaagtccaacccgtgtgccacagggggcgcgctgaagggctatcagatcaccaacaagttcgagagcttcaagagcatgagcacccagaacgggtttattttctacatcccggcgtggctcacctccaagattgacccgagcaccggcttcgtgaacctcctgaagacaaagtatacctccattgccgacagcaagaagtttatctcctccttcgaccgcattatgtatgtgccggaggaggacctcttcgagttcgccctcgactacaaaaacttcagccgcacagatgcggattacatcaagaagtggaagctgtactcctacgggaacaggatccgcatcttcaggaatccaaaaaaaaataacgtctttgactgggaggaagtgtgcctgacatccgcctacaaggaactgttcaataaatacggcatcaattaccagcagggcgacattcgcgccctcctctgtgagcagtccgacaaagcgttttactccagcttcatggccctcatgtccctgatgctccaaatgaggaatagcatcacagggcgcaccgacgtcgacttcctcatcagcccggtgaagaactctggcggctcaaaaagaaccgccgacggcagcgaattcgagcccaagaagaagaggaaagtcggaagcggagctactaacttcagcctgctgaagcaggctggagacgtggaggagaaccctggacctatggtgagcaagggcgaggagctgttcaccggggtggtgcccatcctggtcgagctggacggcgacgtaaacggccacaagttcagcgtgtccggcgagggcgagggcgatgccacctacggcaagctgaccctgaagttcatctgcaccaccggcaagctgcccgtgccctggcccaccctcgtgaccaccctgacctatggagtgcagtgcttcagccgctaccccgaccacatgaagcagcacgacttcttcaagtccgccatgcccgaaggctacgtccaggagcgcaccatcttcttcaaggacgacggcaactacaagacccgcgccgaggtgaagttcgagggcgacaccctggtgaaccgcatcgagctgaagggcatcgacttcaaggaggacggcaacatcctggggcacaagctggagtacaactacaacagccacaacgtctatatcatggccgacaagcagaagaacggcatcaaggtgaacttcaagatccgccacaacatcgaggacggcagcgtgcagctcgccgaccactaccagcagaacacccccatcggcgacggccccgtgctgctgcccgacaaccactacctgagcacccagtccgccctgagcaaagaccccaacgagaagcgcgatcacatggtcctgctggagttcgtgaccgccgccgggatcactctcggcatggacgagctgtacaagtctggtggttctcccaagaagaagaggaaagtctaaccggtcatcatcaccatcaccattgagtttaaacccgctgatcagcctcgactgtgccttctagttgccagccatctgttgtttgcccctcccccgtgccttccttgaccctggaaggtgccactcccactgtcctttcctaataaaatgaggaaattgcatcgcattgtctgagtaggtgtcattctattctggggggtggggtggggcaggacagcaagggggaggattgggaagacaatagcaggcatgctggggatgcggtgggctctatggcttctgaggcggaaagaaccagctggggctcgataccgtcgacctctagctagagcttggcgtaatcatggtcatagctgtttcctgtgtgaaattgttatccgctcacaattccacacaacatacgagccggaagcataaagtgtaaagcctagggtgcctaatgagtgagctaactcacattaattgcgttgcgctcactgcccgctttccagtcgggaaacctgtcgtgccagctgcattaatgaatcggccaacgcgcggggagaggcggtttgcgtattgggcgctcttccgcttcctcgctcactgactcgctgcgctcggtcgttcggctgcggcgagcggtatcagctcactcaaaggcggtaatacggttatccacagaatcaggggataacgcaggaaagaacatgtgagcaaaaggccagcaaaaggccaggaaccgtaaaaaggccgcgttgctggcgtttttccataggctccgcccccctgacgagcatcacaaaaatcgacgctcaagtcagaggtggcgaaacccgacaggactataaagataccaggcgtttccccctggaagctccctcgtgcgctctcctgttccgaccctgccgcttaccggatacctgtccgcctttctcccttcgggaagcgtggcgctttctcatagctcacgctgtaggtatctcagttcggtgtaggtcgttcgctccaagctgggctgtgtgcacgaaccccccgttcagcccgaccgctgcgccttatccggtaactatcgtcttgagtccaacccggtaagacacgacttatcgccactggcagcagccactggtaacaggattagcagagcgaggtatgtaggcggtgctacagagttcttgaagtggtggcctaactacggctacactagaagaacagtatttggtatctgcgctctgctgaagccagttaccttcggaaaaagagttggtagctcttgatccggcaaacaaaccaccgctggtagcggtggtttttttgtttgcaagcagcagattacgcgcagaaaaaaaggatctcaagaagatcctttgatcttttctacggggtctgacactcagtggaacgaaaactcacgttaagggattttggtcatgagattatcaaaaaggatcttcacctagatccttttaaattaaaaatgaagttttaaatcaatctaaagtatatatgagtaaacttggtctgacagttaccaatgcttaatcagtgaggcacctatctcagcgatctgtctatttcgttcatccatagttgcctgactccccgtcgtgtagataactacgatacgggagggcttaccatctggccccagtgctgcaatgataccgcgagacccacgctcaccggctccagatttatcagcaataaaccagccagccggaagggccgagcgcagaagtggtcctgcaactttatccgcctccatccagtctattaattgttgccgggaagctagagtaagtagttcgccagttaatagtttgcgcaacgttgttgccattgctacaggcatcgtggtgtcacgctcgtcgtttggtatggcttcattcagctccggttcccaacgatcaaggcgagttacatgatcccccatgttgtgcaaaaaagcggttagctccttcggtcctccgatcgttgtcagaagtaagttggccgcagtgttatcactcatggttatggcagcactgcataattctcttactgtcatgccatccgtaagatgcttttctgtgactggtgagtactcaaccaagtcattctgagaatagtgtatgcggcgaccgagttgctcttgcccggcgtcaatacgggataataccgcgccacatagcagaactttaaaagtgctcatcattggaaaacgttcttcggggcgaaaactctcaaggatcttaccgctgttgagatccagttcgatgtaacccactcgtgcacccaactgatcttcagcatcttttactttcaccagcgtttctgggtgagcaaaaacaggaaggcaaaatgccgcaaaaaagggaataagggcgacacggaaatgttgaatactcatactcttcctttttcaatattattgaagcatttatcagggttattgtctcatgagcggatacatatttgaatgtatttagaaaaataaacaaataggggttccgcgcacatttccccgaaaagtgccacctgacgtcgacggatcgggagatcgatctcccgatcccctagggtcgactctcagtacaatctgctctgatgccgcatagttaagccagtatctgctccctgcttgtgtgttggaggtcgctgagtagtgcgcgagcaaaatttaagctacaacaaggcaaggcttgaccgacaattgcatgaagaatctgcttagggttaggcgttttgcgctgcttcgcgatgtacgggccagatatacgcgtt

SEQ ID NO: 421 - DNA, 8505 bp, synthetic construct
  source 1..8505: mol_type = other DNA
gacattgattattgactagttattaatagtaatcaattacggggtcattagttcatagcccatatatggagttccgcgttacataacttacggtaaatggcccgcctggctgaccgcccaacgacccccgcccattgacgtcaataatgacgtatgttcccatagtaacgccaatagggactttccattgacgtcaatgggtggagtatttacggtaaactgcccacttggcagtacatcaagtgtatcatatgccaagtacgccccctattgacgtcaatgacggtaaatggcccgcctggcattatgcccagtacatgaccttatgggactttcctacttggcagtacatctacgtattagtcatcgctattaccatggtgatgcggttttggcagtacatcaatgggcgtggatagcggtttgactcacggggatttccaagtctccaccccattgacgtcaatgggagtttgttttggcaccaaaatcaacgggactttccaaaatgtcgtaacaactccgccccattgacgcaaatgggcggtaggcgtgtacggtgggaggtctatataagcagagctggtttagtgaaccgtcagatccgctagagatccgcggccgctaatacgactcactatagggagagccgccaccatgaaacggacagccgacggaagcgagttcgagtcaccaaagaagaagcggaaagtcaaagacaagttcaagctgtacttccagaacccgcaatttatggggggctgggacaaggataaagagacagactaccgcgcgacaattctccgctatggctccaaatactatctggccatcatggacaagaagtacgcgaagtgcctgcagaagatcgacaaagacgacgtcaatggcaactatgaaaagatcaactacaagctgctgccgggcccgaacaagatgctcccgaaggtgttcttcagcaagaagtggatggcctactacaatccaagcgaggatattcagaaaatctataaaaacgggaccttcaagaagggggacatgtttaacctcaacgactgccacaagctcattgatttcttcaaggatagcatttcccgctacccgaaatggtccaatgcgtacgattttaacttctccgagacagaaaagtacaaagacatcgcgggcttttacagggaggtggaggagcaagggtataaagtttcttttgaatccgcgagcaagaaggaagtcgacaagctcgtcgaggagggcaagctctacatgttccaaatttataacaaggacttttccgacaagagccatgggaccccaaacctccacaccatgtacttcaaactgctctttgacgagaacaaccacgggcaaatcaggctgagcggcggcgccgaattattcatgcgcagggcctccctcaagaaggaagagctggtcgtccatccagccaattccccgatcgcgaacaagaacccggacaatccgaaaaagaccaccaccctgtcctacgacgtctacaaggacaaacgcttcagcgaagaccagtacgaattacacatcccaattgcgattaataagtgcccaaagaatatcttcaaaattaatacagaggtcagggtgctgctcaaacacgacgacaatccgtatgtcatcggcattgacaggggcgagcgcaatctgctctatatcgtggtcgtggatgggaagggcaatattgtggagcagtactccctgaacgagattatcaacaacttcaatgggattaggattaagaccgactatcacagcctgctcgacaagaaagaaaaagagaggtttgaggcccgccaaaactggacctccattgagaatatcaaagaattaaaggccggctatatttcccaagtcgtccacaagatctgcgagctggtggagaaatatgacgccgtgattgcgctcgaagacttaaattctgggttcaagaactcccgcgtgaaggtggaaaaacaggtgtatcagaaattcgagaaaatgctgatcgacaaactcaattatatggtggataagaagtccaacccgtgtgccacagggggcgcgctgaagggctatcagatcaccaacaagttcgagagcttcaagagcatgagcacccagaacgggtttattttctacatcccggcgtggctcacctccaagattgacccgagcaccggcttcgtgaacctcctgaagacaaagtatacctccattgccgacagcaagaagtttatctcctccttcgaccgcattatgtatgtgccggaggaggacctcttcgagttcgccctcgactacaaaaacttcagccgcacagatgcggattacatcaagaagtggaagctgtactcctacgggaacaggatccgcatcttcaggaatccaaaaaaaaataacgtctttgactgggaggaagtgtgcctgacatccgcctacaaggaactgttcaataaatacggcatcaattaccagcagggcgacattcgcgccctcctctgtgagcagtccgacaaagcgttttactccagcttcatggccctcatgtccctgatgctccaaatgaggaatagcatcacagggcgcaccgacgtcgacttcctcatcagcccggtgaagaactccgacgggatcttttacgactcccgcaactatgaggcgcaagagaatgcgatcctcccgaagaacgccgatgcgaacggggcctataatatcgccaggaaagtgctctgggccatcgggcagttcaaaaaggcggaggatgagaagctcgacaaggtgaaaattgccatttccaacaaggagtggctggagtacgcgcagacctccgtgaagcacggctcctctggcagctccggctctagcggctcctctggcagctccggctccaagctggagaagtttacaaactgttacagcctctccaaaaccctcaggtttaaagcgatcccggtgggcaagacccaggagaacatcgacaacaagaggctcctggtggaagacgagaagcgcgccgaagactacaagggcgtgaagaagctgctcgataggtactacctcagctttattaacgacgtgctgcacagcatcaaactcaagaatctcaacaactacatctccctcttccgcaaaaagacccgcaccgagaaggagaacaaggagctggagaacctggagatcaacctccgcaaggaaatcgccaaagcgttcaagggcaatgaagggtacaagagcctcttcaagaaagacatcatcgaaactatcctcccagagtttctcgatgacaaggacgagatcgcgctggtgaactcctttaacgggttcacaaccgcgtttaccggcttctttgataacagggaaaatatgttctccgaggaggccaagtccaccagcatcgccttcaggtgtatcaacgagaacctcacccgctacatttccaatatggacattttcgagaaggtggatgcgatcttcgataagcacgaggtgcaggagatcaaagagaagattctcaattccgattatgacgtcgaggatttcttcgaaggggagttctttaattttgtgctcacacaagagggcattgacgtgtacaacgcgattatcgggggcttcgtcacagagtccggggagaagattaaggggctgaatgagtacatcaatctgtacaatcagaagaccaagcagaaactgccgaaattcaagccgctctacaagcaagtcctgtccgatagggaaagcctctccttctacggcagcggcgagaaccagaccacccagaagggacagaagaacagccgcgagagaatgaagcggatcgaagagggcatcaaagagctgggcagccagatcctgaaagaacaccccgtggaaaacacccagctgcagaacgagaagctgtacctgtactacctgcagaatgggcgggatatgtacgtggaccaggaactggacatcaaccggctgtccgactacgatgtggaccatatcgtgcctcagagctttctgaaggacgactccatcgacaacaaggtgctgaccagaagcgacaagaaccggggcaagagcgacaacgtgccctccgaagaggtcgtgaagaagatgaagaactactggcggcagctgctgaacgccaagctgattacccagagaaagttcgacaatctgaccaaggccgagagaggcggcctgagcgagggctataccagcgacgaggaggtgctggaagtcttccgcaacacactgaataagaatagcgagattttctcctccatcaagaagctcgagaagctctttaagaactttgacgagtacagctccgccgggattttcgtgaagaacgggccggcgatcagcaccatctccaaggacatctttggcgagtggaacgtcatcagggacaagtggaacgccgagtacgacgacatccacctgaagaagaaggcggtggtgaccgagaagtatgaggacgatcgcaggaagtccttcaaaaaaatcggctccttcagcctcgaacagctccaggagtatgccgatgcggatctgtccgtcgtcgagaagctgaaggaaatcatcattcagaaggtcgacgagatctataaagtgtacgggtccagcgagaagctgttcgacgccgactttgtgctcgagaagtccctcaaaaagaatgacgccgtggtggccattatgaaagacctgctcgactccgtgaagtccttcgaaaattacattaaagcgttctttggggaggggaaggaaactaacagggatgagtccttctatggcgactttgtcctcgcgtacgacatcctgctgaaggtcgaccacatttacgacgcgatccgcaactacgtgacacagaagccgtactcctctggcggctcaaaaagaaccgccgacggcagcgaattcgagcccaagaagaagaggaaagtcggaagcggagctactaacttcagcctgctgaagcaggctggagacgtggaggagaaccctggacctatggtgagcaagggcgaggagctgttcaccggggtggtgcccatcctggtcgagctggacggcgacgtaaacggccacaagttcagcgtgtccggcgagggcgagggcgatgccacctacggcaagctgaccctgaagttcatctgcaccaccggcaagctgcccgtgccctggcccaccctcgtgaccaccctgacctatggagtgcagtgcttcagccgctaccccgaccacatgaagcagcacgacttcttcaagtccgccatgcccgaaggctacgtccaggagcgcaccatcttcttcaaggacgacggcaactacaagacccgcgccgaggtgaagttcgagggcgacaccctggtgaaccgcatcgagctgaagggcatcgacttcaaggaggacggcaacatcctggggcacaagctggagtacaactacaacagccacaacgtctatatcatggccgacaagcagaagaacggcatcaaggtgaacttcaagatccgccacaacatcgaggacggcagcgtgcagctcgccgaccactaccagcagaacacccccatcggcgacggccccgtgctgctgcccgacaaccactacctgagcacccagtccgccctgagcaaagaccccaacgagaagcgcgatcacatggtcctgctggagttcgtgaccgccgccgggatcactctcggcatggacgagctgtacaagtctggtggttctcccaagaagaagaggaaagtctaaccggtcatcatcaccatcaccattgagtttaaacccgctgatcagcctcgactgtgccttctagttgccagccatctgttgtttgcccctcccccgtgccttccttgaccctggaaggtgccactcccactgtcctttcctaataaaatgaggaaattgcatcgcattgtctgagtaggtgtcattctattctggggggtggggtggggcaggacagcaagggggaggattgggaagacaatagcaggcatgctggggatgcggtgggctctatggcttctgaggcggaaagaaccagctggggctcgataccgtcgacctctagctagagcttggcgtaatcatggtcatagctgtttcctgtgtgaaattgttatccgctcacaattccacacaacatacgagccggaagcataaagtgtaaagcctagggtgcctaatgagtgagctaactcacattaattgcgttgcgctcactgcccgctttccagtcgggaaacctgtcgtgccagctgcattaatgaatcggccaacgcgcggggagaggcggtttgcgtattgggcgctcttccgcttcctcgctcactgactcgctgcgctcggtcgttcggctgcggcgagcggtatcagctcactcaaaggcggtaatacggttatccacagaatcaggggataacgcaggaaagaacatgtgagcaaaaggccagcaaaaggccaggaaccgtaaaaaggccgcgttgctggcgtttttccataggctccgcccccctgacgagcatcacaaaaatcgacgctcaagtcagaggtggcgaaacccgacaggactataaagataccaggcgtttccccctggaagctccctcgtgcgctctcctgttccgaccctgccgcttaccggatacctgtccgcctttctcccttcgggaagcgtggcgctttctcatagctcacgctgtaggtatctcagttcggtgtaggtcgttcgctccaagctgggctgtgtgcacgaaccccccgttcagcccgaccgctgcgccttatccggtaactatcgtcttgagtccaacccggtaagacacgacttatcgccactggcagcagccactggtaacaggattagcagagcgaggtatgtaggcggtgctacagagttcttgaagtggtggcctaactacggctacactagaagaacagtatttggtatctgcgctctgctgaagccagttaccttcggaaaaagagttggtagctcttgatccggcaaacaaaccaccgctggtagcggtggtttttttgtttgcaagcagcagattacgcgcagaaaaaaaggatctcaagaagatcctttgatcttttctacggggtctgacactcagtggaacgaaaactcacgttaagggattttggtcatgagattatcaaaaaggatcttcacctagatccttttaaattaaaaatgaagttttaaatcaatctaaagtatatatgagtaaacttggtctgacagttaccaatgcttaatcagtgaggcacctatctcagcgatctgtctatttcgttcatccatagttgcctgactccccgtcgtgtagataactacgatacgggagggcttaccatctggccccagtgctgcaatgataccgcgagacccacgctcaccggctccagatttatcagcaataaaccagccagccggaagggccgagcgcagaagtggtcctgcaactttatccgcctccatccagtctattaattgttgccgggaagctagagtaagtagttcgccagttaatagtttgcgcaacgttgttgccattgctacaggcatcgtggtgtcacgctcgtcgtttggtatggcttcattcagctccggttcccaacgatcaaggcgagttacatgatcccccatgttgtgcaaaaaagcggttagctccttcggtcctccgatcgttgtcagaagtaagttggccgcagtgttatcactcatggttatggcagcactgcataattctcttactgtcatgccatccgtaagatgcttttctgtgactggtgagtactcaaccaagtcattctgagaatagtgtatgcggcgaccgagttgctcttgcccggcgtcaatacgggataataccgcgccacatagcagaactttaaaagtgctcatcattggaaaacgttcttcggggcgaaaactctcaaggatcttaccgctgttgagatccagttcgatgtaacccactcgtgcacccaactgatcttcagcatcttttactttcaccagcgtttctgggtgagcaaaaacaggaaggcaaaatgccgcaaaaaagggaataagggcgacacggaaatgttgaatactcatactcttcctttttcaatattattgaagcatttatcagggttattgtctcatgagcggatacatatttgaatgtatttagaaaaataaacaaataggggttccgcgcacatttccccgaaaagtgccacctgacgtcgacggatcgggagatcgatctcccgatcccctagggtcgactctcagtacaatctgctctgatgccgcatagttaagccagtatctgctccctgcttgtgtgttggaggtcgctgagtagtgcgcgagcaaaatttaagctacaacaaggcaaggcttgaccgacaattgcatgaagaatctgcttagggttaggcgttttgcgctgcttcgcgatgtacgggccagatatacgcgtt

SEQ ID NO: 422 - DNA, 8505 bp, synthetic construct
  source 1..8505: mol_type = other DNA
gacattgattattgactagttattaatagtaatcaattacggggtcattagttcatagcccatatatggagttccgcgttacataacttacggtaaatggcccgcctggctgaccgcccaacgacccccgcccattgacgtcaataatgacgtatgttcccatagtaacgccaatagggactttccattgacgtcaatgggtggagtatttacggtaaactgcccacttggcagtacatcaagtgtatcatatgccaagtacgccccctattgacgtcaatgacggtaaatggcccgcctggcattatgcccagtacatgaccttatgggactttcctacttggcagtacatctacgtattagtcatcgctattaccatggtgatgcggttttggcagtacatcaatgggcgtggatagcggtttgactcacggggatttccaagtctccaccccattgacgtcaatgggagtttgttttggcaccaaaatcaacgggactttccaaaatgtcgtaacaactccgccccattgacgcaaatgggcggtaggcgtgtacggtgggaggtctatataagcagagctggtttagtgaaccgtcagatccgctagagatccgcggccgctaatacgactcactatagggagagccgccaccatgaaacggacagccgacggaagcgagttcgagtcaccaaagaagaagcggaaagtcaagtccctcaaaaagaatgacgccgtggtggccattatgaaagacctgctcgactccgtgaagtccttcgaaaattacattaaagcgttctttggggaggggaaggaaactaacagggatgagtccttctatggcgactttgtcctcgcgtacgacatcctgctgaaggtcgaccacatttacgacgcgatccgcaactacgtgacacagaagccgtactccaaagacaagttcaagctgtacttccagaacccgcaatttatggggggctgggacaaggataaagagacagactaccgcgcgacaattctccgctatggctccaaatactatctggccatcatggacaagaagtacgcgaagtgcctgcagaagatcgacaaagacgacgtcaatggcaactatgaaaagatcaactacaagctgctgccgggcccgaacaagatgctcccgaaggtgttcttcagcaagaagtggatggcctactacaatccaagcgaggatattcagaaaatctataaaaacgggaccttcaagaagggggacatgtttaacctcaacgactgccacaagctcattgatttcttcaaggatagcatttcccgctacccgaaatggtccaatgcgtacgattttaacttctccgagacagaaaagtacaaagacatcgcgggcttttacagggaggtggaggagcaagggtataaagtttcttttgaatccgcgagcaagaaggaagtcgacaagctcgtcgaggagggcaagctctacatgttccaaatttataacaaggacttttccgacaagagccatgggaccccaaacctccacaccatgtacttcaaactgctctttgacgagaacaaccacgggcaaatcaggctgagcggcggcgccgaattattcatgcgcagggcctccctcaagaaggaagagctggtcgtccatccagccaattccccgatcgcgaacaagaacccggacaatccgaaaaagaccaccaccctgtcctacgacgtctacaaggacaaacgcttcagcgaagaccagtacgaattacacatcccaattgcgattaataagtgcccaaagaatatcttcaaaattaatacagaggtcagggtgctgctcaaacacgacgacaatccgtatgtcatcggcattgacaggggcgagcgcaatctgctctatatcgtggtcgtggatgggaagggcaatattgtggagcagtactccctgaacgagattatcaacaacttcaatgggattaggattaagaccgactatcacagcctgctcgacaagaaagaaaaagagaggtttgaggcccgccaaaactggacctccattgagaatatcaaagaattaaaggccggctatatttcccaagtcgtccacaagatctgcgagctggtggagaaatatgacgccgtgattgcgctcgaagacttaaattctgggttcaagaactcccgcgtgaaggtggaaaaacaggtgtatcagaaattcgagaaaatgctgatcgacaaactcaattatatggtggataagaagtccaacccgtgtgccacagggggcgcgctgaagggctatcagatcaccaacaagttcgagagcttcaagagcatgagcacccagaacgggtttattttctacatcccggcgtggctcacctccaagattgacccgagcaccggcttcgtgaacctcctgaagacaaagtatacctccattgccgacagcaagaagtttatctcctccttcgaccgcattatgtatgtgccggaggaggacctcttcgagttcgccctcgactacaaaaacttcagccgcacagatgcggattacatcaagaagtggaagctgtactcctacgggaacaggatccgcatcttcaggaatccaaaaaaaaataacgtctttgactgggaggaagtgtgcctgacatccgcctacaaggaactgttcaataaatacggcatcaattaccagcagggcgacattcgcgccctcctctgtgagcagtccgacaaagcgttttactccagcttcatggccctcatgtccctgatgctccaaatgaggaatagcatcacagggcgcaccgacgtcgacttcctcatcagcccggtgaagaactccgacgggatcttttacgactcccgcaactatgaggcgcaagagaatgcgatcctcccgaagaacgccgatgcgaacggggcctataatatcgccaggaaagtgctctgggccatcgggcagttcaaaaaggcggaggatgagaagctcgacaaggtgaaaattgccatttccaacaaggagtggctggagtacgcgcagacctccgtgaagcacggctcctctggcagctccggctctagcggctcctctggcagctccggctccaagctggagaagtttacaaactgttacagcctctccaaaaccctcaggtttaaagcgatcccggtgggcaagacccaggagaacatcgacaacaagaggctcctggtggaagacgagaagcgcgccgaagactacaagggcgtgaagaagctgctcgataggtactacctcagctttattaacgacgtgctgcacagcatcaaactcaagaatctcaacaactacatctccctcttccgcaaaaagacccgcaccgagaaggagaacaaggagctggagaacctggagatcaacctccgcaaggaaatcgccaaagcgttcaagggcaatgaagggtacaagagcctcttcaagaaagacatcatcgaaactatcctcccagagtttctcgatgacaaggacgagatcgcgctggtgaactcctttaacgggttcacaaccgcgtttaccggcttctttgataacagggaaaatatgttctccgaggaggccaagtccaccagcatcgccttcaggtgtatcaacgagaacctcacccgctacatttccaatatggacattttcgagaaggtggatgcgatcttcgataagcacgaggtgcaggagatcaaagagaagattctcaattccgattatgacgtcgaggatttcttcgaaggggagttctttaattttgtgctcacacaagagggcattgacgtgtacaacgcgattatcgggggcttcgtcacagagtccggggagaagattaaggggctgaatgagtacatcaatctgtacaatcagaagaccaagcagaaactgccgaaattcaagccgctctacaagcaagtcctgtccgatagggaaagcctctccttctacggcagcggcgagaaccagaccacccagaagggacagaagaacagccgcgagagaatgaagcggatcgaagagggcatcaaagagctgggcagccagatcctgaaagaacaccccgtggaaaacacccagctgcagaacgagaagctgtacctgtactacctgcagaatgggcgggatatgtacgtggaccaggaactggacatcaaccggctgtccgactacgatgtggaccatatcgtgcctcagagctttctgaaggacgactccatcgacaacaaggtgctgaccagaagcgacaagaaccggggcaagagcgacaacgtgccctccgaagaggtcgtgaagaagatgaagaactactggcggcagctgctgaacgccaagctgattacccagagaaagttcgacaatctgaccaaggccgagagaggcggcctgagcgagggctataccagcgacgaggaggtgctggaagtcttccgcaacacactgaataagaatagcgagattttctcctccatcaagaagctcgagaagctctttaagaactttgacgagtacagctccgccgggattttcgtgaagaacgggccggcgatcagcaccatctccaaggacatctttggcgagtggaacgtcatcagggacaagtggaacgccgagtacgacgacatccacctgaagaagaaggcggtggtgaccgagaagtatgaggacgatcgcaggaagtccttcaaaaaaatcggctccttcagcctcgaacagctccaggagtatgccgatgcggatctgtccgtcgtcgagaagctgaaggaaatcatcattcagaaggtcgacgagatctataaagtgtacgggtccagcgagaagctgttcgacgccgactttgtgctcgagtctggcggctcaaaaagaaccgccgacggcagcgaattcgagcccaagaagaagaggaaagtcggaagcggagctactaacttcagcctgctgaagcaggctggagacgtggaggagaaccctggacctatggtgagcaagggcgaggagctgttcaccggggtggtgcccatcctggtcgagctggacggcgacgtaaacggccacaagttcagcgtgtccggcgagggcgagggcgatgccacctacggcaagctgaccctgaagttcatctgcaccaccggcaagctgcccgtgccctggcccaccctcgtgaccaccctgacctatggagtgcagtgcttcagccgctaccccgaccacatgaagcagcacgacttcttcaagtccgccatgcccgaaggctacgtccaggagcgcaccatcttcttcaaggacgacggcaactacaagacccgcgccgaggtgaagttcgagggcgacaccctggtgaaccgcatcgagctgaagggcatcgacttcaaggaggacggcaacatcctggggcacaagctggagtacaactacaacagccacaacgtctatatcatggccgacaagcagaagaacggcatcaaggtgaacttcaagatccgccacaacatcgaggacggcagcgtgcagctcgccgaccactaccagcagaacacccccatcggcgacggccccgtgctgctgcccgacaaccactacctgagcacccagtccgccctgagcaaagaccccaacgagaagcgcgatcacatggtcctgctggagttcgtgaccgccgccgggatcactctcggcatggacgagctgtacaagtctggtggttctcccaagaagaagaggaaagtctaaccggtcatcatcaccatcaccattgagtttaaacccgctgatcagcctcgactgtgccttctagttgccagccatctgttgtttgcccctcccccgtgccttccttgaccctggaaggtgccactcccactgtcctttcctaataaaatgaggaaattgcatcgcattgtctgagtaggtgtcattctattctggggggtggggtggggcaggacagcaagggggaggattgggaagacaatagcaggcatgctggggatgcggtgggctctatggcttctgaggcggaaagaaccagctggggctcgataccgtcgacctctagctagagcttggcgtaatcatggtcatagctgtttcctgtgtgaaattgttatccgctcacaattccacacaacatacgagccggaagcataaagtgtaaagcctagggtgcctaatgagtgagctaactcacattaattgcgttgcgctcactgcccgctttccagtcgggaaacctgtcgtgccagctgcattaatgaatcggccaacgcgcggggagaggcggtttgcgtattgggcgctcttccgcttcctcgctcactgactcgctgcgctcggtcgttcggctgcggcgagcggtatcagctcactcaaaggcggtaatacggttatccacagaatcaggggataacgcaggaaagaacatgtgagcaaaaggccagcaaaaggccaggaaccgtaaaaaggccgcgttgctggcgtttttccataggctccgcccccctgacgagcatcacaaaaatcgacgctcaagtcagaggtggcgaaacccgacaggactataaagataccaggcgtttccccctggaagctccctcgtgcgctctcctgttccgaccctgccgcttaccggatacctgtccgcctttctcccttcgggaagcgtggcgctttctcatagctcacgctgtaggtatctcagttcggtgtaggtcgttcgctccaagctgggctgtgtgcacgaaccccccgttcagcccgaccgctgcgccttatccggtaactatcgtcttgagtccaacccggtaagacacgacttatcgccactggcagcagccactggtaacaggattagcagagcgaggtatgtaggcggtgctacagagttcttgaagtggtggcctaactacggctacactagaagaacagtatttggtatctgcgctctgctgaagccagttaccttcggaaaaagagttggtagctcttgatccggcaaacaaaccaccgctggtagcggtggtttttttgtttgcaagcagcagattacgcgcagaaaaaaaggatctcaagaagatcctttgatcttttctacggggtctgacactcagtggaacgaaaactcacgttaagggattttggtcatgagattatcaaaaaggatcttcacctagatccttttaaattaaaaatgaagttttaaatcaatctaaagtatatatgagtaaacttggtctgacagttaccaatgcttaatcagtgaggcacctatctcagcgatctgtctatttcgttcatccatagttgcctgactccccgtcgtgtagataactacgatacgggagggcttaccatctggccccagtgctgcaatgataccgcgagacccacgctcaccggctccagatttatcagcaataaaccagccagccggaagggccgagcgcagaagtggtcctgcaactttatccgcctccatccagtctattaattgttgccgggaagctagagtaagtagttcgccagttaatagtttgcgcaacgttgttgccattgctacaggcatcgtggtgtcacgctcgtcgtttggtatggcttcattcagctccggttcccaacgatcaaggcgagttacatgatcccccatgttgtgcaaaaaagcggttagctccttcggtcctccgatcgttgtcagaagtaagttggccgcagtgttatcactcatggttatggcagcactgcataattctcttactgtcatgccatccgtaagatgcttttctgtgactggtgagtactcaaccaagtcattctgagaatagtgtatgcggcgaccgagttgctcttgcccggcgtcaatacgggataataccgcgccacatagcagaactttaaaagtgctcatcattggaaaacgttcttcggggcgaaaactctcaaggatcttaccgctgttgagatccagttcgatgtaacccactcgtgcacccaactgatcttcagcatcttttactttcaccagcgtttctgggtgagcaaaaacaggaaggcaaaatgccgcaaaaaagggaataagggcgacacggaaatgttgaatactcatactcttcctttttcaatattattgaagcatttatcagggttattgtctcatgagcggatacatatttgaatgtatttagaaaaataaacaaataggggttccgcgcacatttccccgaaaagtgccacctgacgtcgacggatcgggagatcgatctcccgatcccctagggtcgactctcagtacaatctgctctgatgccgcatagttaagccagtatctgctccctgcttgtgtgttggaggtcgctgagtagtgcgcgagcaaaatttaagctacaacaaggcaaggcttgaccgacaattgcatgaagaatctgcttagggttaggcgttttgcgctgcttcgcgatgtacgggccagatatacgcgtt

SEQ ID NO: 423 - DNA, 8505 bp, synthetic construct
  source 1..8505: mol_type = other DNA
gacattgattattgactagttattaatagtaatcaattacggggtcattagttcatagcccatatatggagttccgcgttacataacttacggtaaatggcccgcctggctgaccgcccaacgacccccgcccattgacgtcaataatgacgtatgttcccatagtaacgccaatagggactttccattgacgtcaatgggtggagtatttacggtaaactgcccacttggcagtacatcaagtgtatcatatgccaagtacgccccctattgacgtcaatgacggtaaatggcccgcctggcattatgcccagtacatgaccttatgggactttcctacttggcagtacatctacgtattagtcatcgctattaccatggtgatgcggttttggcagtacatcaatgggcgtggatagcggtttgactcacggggatttccaagtctccaccccattgacgtcaatgggagtttgttttggcaccaaaatcaacgggactttccaaaatgtcgtaacaactccgccccattgacgcaaatgggcggtaggcgtgtacggtgggaggtctatataagcagagctggtttagtgaaccgtcagatccgctagagatccgcggccgctaatacgactcactatagggagagccgccaccatgaaacggacagccgacggaagcgagttcgagtcaccaaagaagaagcggaaagtctccgacaaagcgttttactccagcttcatggccctcatgtccctgatgctccaaatgaggaatagcatcacagggcgcaccgacgtcgacttcctcatcagcccggtgaagaactccgacgggatcttttacgactcccgcaactatgaggcgcaagagaatgcgatcctcccgaagaacgccgatgcgaacggggcctataatatcgccaggaaagtgctctgggccatcgggcagttcaaaaaggcggaggatgagaagctcgacaaggtgaaaattgccatttccaacaaggagtggctggagtacgcgcagacctccgtgaagcacggctcctctggcagctccggctctagcggctcctctggcagctccggctccaagctggagaagtttacaaactgttacagcctctccaaaaccctcaggtttaaagcgatcccggtgggcaagacccaggagaacatcgacaacaagaggctcctggtggaagacgagaagcgcgccgaagactacaagggcgtgaagaagctgctcgataggtactacctcagctttattaacgacgtgctgcacagcatcaaactcaagaatctcaacaactacatctccctcttccgcaaaaagacccgcaccgagaaggagaacaaggagctggagaacctggagatcaacctccgcaaggaaatcgccaaagcgttcaagggcaatgaagggtacaagagcctcttcaagaaagacatcatcgaaactatcctcccagagtttctcgatgacaaggacgagatcgcgctggtgaactcctttaacgggttcacaaccgcgtttaccggcttctttgataacagggaaaatatgttctccgaggaggccaagtccaccagcatcgccttcaggtgtatcaacgagaacctcacccgctacatttccaatatggacattttcgagaaggtggatgcgatcttcgataagcacgaggtgcaggagatcaaagagaagattctcaattccgattatgacgtcgaggatttcttcgaaggggagttctttaattttgtgctcacacaagagggcattgacgtgtacaacgcgattatcgggggcttcgtcacagagtccggggagaagattaaggggctgaatgagtacatcaatctgtacaatcagaagaccaagcagaaactgccgaaattcaagccgctctacaagcaagtcctgtccgatagggaaagcctctccttctacggcagcggcgagaaccagaccacccagaagggacagaagaacagccgcgagagaatgaagcggatcgaagagggcatcaaagagctgggcagccagatcctgaaagaacaccccgtggaaaacacccagctgcagaacgagaagctgtacctgtactacctgcagaatgggcgggatatgtacgtggaccaggaactggacatcaaccggctgtccgactacgatgtggaccatatcgtgcctcagagctttctgaaggacgactccatcgacaacaaggtgctgaccagaagcgacaagaaccggggcaagagcgacaacgtgccctccgaagaggtcgtgaagaagatgaagaactactggcggcagctgctgaacgccaagctgattacccagagaaagttcgacaatctgaccaaggccgagagaggcggcctgagcgagggctataccagcgacgaggaggtgctggaagtcttccgcaacacactgaataagaatagcgagattttctcctccatcaagaagctcgagaagctctttaagaactttgacgagtacagctccgccgggattttcgtgaagaacgggccggcgatcagcaccatctccaaggacatctttggcgagtggaacgtcatcagggacaagtggaacgccgagtacgacgacatccacctgaagaagaaggcggtggtgaccgagaagtatgaggacgatcgcaggaagtccttcaaaaaaatcggctccttcagcctcgaacagctccaggagtatgccgatgcggatctgtccgtcgtcgagaagctgaaggaaatcatcattcagaaggtcgacgagatctataaagtgtacgggtccagcgagaagctgttcgacgccgactttgtgctcgagaagtccctcaaaaagaatgacgccgtggtggccattatgaaagacctgctcgactccgtgaagtccttcgaaaattacattaaagcgttctttggggaggggaaggaaactaacagggatgagtccttctatggcgactttgtcctcgcgtacgacatcctgctgaaggtcgaccacatttacgacgcgatccgcaactacgtgacacagaagccgtactccaaagacaagttcaagctgtacttccagaacccgcaatttatggggggctgggacaaggataaagagacagactaccgcgcgacaattctccgctatggctccaaatactatctggccatcatggacaagaagtacgcgaagtgcctgcagaagatcgacaaagacgacgtcaatggcaactatgaaaagatcaactacaagctgctgccgggcccgaacaagatgctcccgaaggtgttcttcagcaagaagtggatggcctactacaatccaagcgaggatattcagaaaatctataaaaacgggaccttcaagaagggggacatgtttaacctcaacgactgccacaagctcattgatttcttcaaggatagcatttcccgctacccgaaatggtccaatgcgtacgattttaacttctccgagacagaaaagtacaaagacatcgcgggcttttacagggaggtggaggagcaagggtataaagtttcttttgaatccgcgagcaagaaggaagtcgacaagctcgtcgaggagggcaagctctacatgttccaaatttataacaaggacttttccgacaagagccatgggaccccaaacctccacaccatgtacttcaaactgctctttgacgagaacaaccacgggcaaatcaggctgagcggcggcgccgaattattcatgcgcagggcctccctcaagaaggaagagctggtcgtccatccagccaattccccgatcgcgaacaagaacccggacaatccgaaaaagaccaccaccctgtcctacgacgtctacaaggacaaacgcttcagcgaagaccagtacgaattacacatcccaattgcgattaataagtgcccaaagaatatcttcaaaattaatacagaggtcagggtgctgctcaaacacgacgacaatccgtatgtcatcggcattgacaggggcgagcgcaatctgctctatatcgtggtcgtggatgggaagggcaatattgtggagcagtactccctgaacgagattatcaacaacttcaatgggattaggattaagaccgactatcacagcctgctcgacaagaaagaaaaagagaggtttgaggcccgccaaaactggacctccattgagaatatcaaagaattaaaggccggctatatttcccaagtcgtccacaagatctgcgagctggtggagaaatatgacgccgtgattgcgctcgaagacttaaattctgggttcaagaactcccgcgtgaaggtggaaaaacaggtgtatcagaaattcgagaaaatgctgatcgacaaactcaattatatggtggataagaagtccaacccgtgtgccacagggggcgcgctgaagggctatcagatcaccaacaagttcgagagcttcaagagcatgagcacccagaacgggtttattttctacatcccggcgtggctcacctccaagattgacccgagcaccggcttcgtgaacctcctgaagacaaagtatacctccattgccgacagcaagaagtttatctcctccttcgaccgcattatgtatgtgccggaggaggacctcttcgagttcgccctcgactacaaaaacttcagccgcacagatgcggattacatcaagaagtggaagctgtactcctacgggaacaggatccgcatcttcaggaatccaaaaaaaaataacgtctttgactgggaggaagtgtgcctgacatccgcctacaaggaactgttcaataaatacggcatcaattaccagcagggcgacattcgcgccctcctctgtgagcagtctggcggctcaaaaagaaccgccgacggcagcgaattcgagcccaagaagaagaggaaagtcggaagcggagctactaacttcagcctgctgaagcaggctggagacgtggaggagaaccctggacctatggtgagcaagggcgaggagctgttcaccggggtggtgcccatcctggtcgagctggacggcgacgtaaacggccacaagttcagcgtgtccggcgagggcgagggcgatgccacctacggcaagctgaccctgaagttcatctgcaccaccggcaagctgcccgtgccctggcccaccctcgtgaccaccctgacctatggagtgcagtgcttcagccgctaccccgaccacatgaagcagcacgacttcttcaagtccgccatgcccgaaggctacgtccaggagcgcaccatcttcttcaaggacgacggcaactacaagacccgcgccgaggtgaagttcgagggcgacaccctggtgaaccgcatcgagctgaagggcatcgacttcaaggaggacggcaacatcctggggcacaagctggagtacaactacaacagccacaacgtctatatcatggccgacaagcagaagaacggcatcaaggtgaacttcaagatccgccacaacatcgaggacggcagcgtgcagctcgccgaccactaccagcagaacacccccatcggcgacggccccgtgctgctgcccgacaaccactacctgagcacccagtccgccctgagcaaagaccccaacgagaagcgcgatcacatggtcctgctggagttcgtgaccgccgccgggatcactctcggcatggacgagctgtacaagtctggtggttctcccaagaagaagaggaaagtctaaccggtcatcatcaccatcaccattgagtttaaacccgctgatcagcctcgactgtgccttctagttgccagccatctgttgtttgcccctcccccgtgccttccttgaccctggaaggtgccactcccactgtcctttcctaataaaatgaggaaattgcatcgcattgtctgagtaggtgtcattctattctggggggtggggtggggcaggacagcaagggggaggattgggaagacaatagcaggcatgctggggatgcggtgggctctatggcttctgaggcggaaagaaccagctggggctcgataccgtcgacctctagctagagcttggcgtaatcatggtcatagctgtttcctgtgtgaaattgttatccgctcacaattccacacaacatacgagccggaagcataaagtgtaaagcctagggtgcctaatgagtgagctaactcacattaattgcgttgcgctcactgcccgctttccagtcgggaaacctgtcgtgccagctgcattaatgaatcggccaacgcgcggggagaggcggtttgcgtattgggcgctcttccgcttcctcgctcactgactcgctgcgctcggtcgttcggctgcggcgagcggtatcagctcactcaaaggcggtaatacggttatccacagaatcaggggataacgcaggaaagaacatgtgagcaaaaggccagcaaaaggccaggaaccgtaaaaaggccgcgttgctggcgtttttccataggctccgcccccctgacgagcatcacaaaaatcgacgctcaagtcagaggtggcgaaacccgacaggactataaagataccaggcgtttccccctggaagctccctcgtgcgctctcctgttccgaccctgccgcttaccggatacctgtccgcctttctcccttcgggaagcgtggcgctttctcatagctcacgctgtaggtatctcagttcggtgtaggtcgttcgctccaagctgggctgtgtgcacgaaccccccgttcagcccgaccgctgcgccttatccggtaactatcgtcttgagtccaacccggtaagacacgacttatcgccactggcagcagccactggtaacaggattagcagagcgaggtatgtaggcggtgctacagagttcttgaagtggtggcctaactacggctacactagaagaacagtatttggtatctgcgctctgctgaagccagttaccttcggaaaaagagttggtagctcttgatccggcaaacaaaccaccgctggtagcggtggtttttttgtttgcaagcagcagattacgcgcagaaaaaaaggatctcaagaagatcctttgatcttttctacggggtctgacactcagtggaacgaaaactcacgttaagggattttggtcatgagattatcaaaaaggatcttcacctagatccttttaaattaaaaatgaagttttaaatcaatctaaagtatatatgagtaaacttggtctgacagttaccaatgcttaatcagtgaggcacctatctcagcgatctgtctatttcgttcatccatagttgcctgactccccgtcgtgtagataactacgatacgggagggcttaccatctggccccagtgctgcaatgataccgcgagacccacgctcaccggctccagatttatcagcaataaaccagccagccggaagggccgagcgcagaagtggtcctgcaactttatccgcctccatccagtctattaattgttgccgggaagctagagtaagtagttcgccagttaatagtttgcgcaacgttgttgccattgctacaggcatcgtggtgtcacgctcgtcgtttggtatggcttcattcagctccggttcccaacgatcaaggcgagttacatgatcccccatgttgtgcaaaaaagcggttagctccttcggtcctccgatcgttgtcagaagtaagttggccgcagtgttatcactcatggttatggcagcactgcataattctcttactgtcatgccatccgtaagatgcttttctgtgactggtgagtactcaaccaagtcattctgagaatagtgtatgcggcgaccgagttgctcttgcccggcgtcaatacgggataataccgcgccacatagcagaactttaaaagtgctcatcattggaaaacgttcttcggggcgaaaactctcaaggatcttaccgctgttgagatccagttcgatgtaacccactcgtgcacccaactgatcttcagcatcttttactttcaccagcgtttctgggtgagcaaaaacaggaaggcaaaatgccgcaaaaaagggaataagggcgacacggaaatgttgaatactcatactcttcctttttcaatattattgaagcatttatcagggttattgtctcatgagcggatacatatttgaatgtatttagaaaaataaacaaataggggttccgcgcacatttccccgaaaagtgccacctgacgtcgacggatcgggagatcgatctcccgatcccctagggtcgactctcagtacaatctgctctgatgccgcatagttaagccagtatctgctccctgcttgtgtgttggaggtcgctgagtagtgcgcgagcaaaatttaagctacaacaaggcaaggcttgaccgacaattgcatgaagaatctgcttagggttaggcgttttgcgctgcttcgcgatgtacgggccagatatacgcgtt

SEQ ID NO: 424 - DNA, 8451 bp, synthetic construct
  source 1..8451: mol_type = other DNA
gacattgattattgactagttattaatagtaatcaattacggggtcattagttcatagcccatatatggagttccgcgttacataacttacggtaaatggcccgcctggctgaccgcccaacgacccccgcccattgacgtcaataatgacgtatgttcccatagtaacgccaatagggactttccattgacgtcaatgggtggagtatttacggtaaactgcccacttggcagtacatcaagtgtatcatatgccaagtacgccccctattgacgtcaatgacggtaaatggcccgcctggcattatgcccagtacatgaccttatgggactttcctacttggcagtacatctacgtattagtcatcgctattaccatggtgatgcggttttggcagtacatcaatgggcgtggatagcggtttgactcacggggatttccaagtctccaccccattgacgtcaatgggagtttgttttggcaccaaaatcaacgggactttccaaaatgtcgtaacaactccgccccattgacgcaaatgggcggtaggcgtgtacggtgggaggtctatataagcagagctggtttagtgaaccgtcagatccgctagagatccgcggccgctaatacgactcactatagggagagccgccaccatgaaacggacagccgacggaagcgagttcgagtcaccaaagaagaagcggaaagtctccaagctggagaagtttacaaactgttacagcctctccaaaaccctcaggtttaaagcgatcccggtgggcaagacccaggagaacatcgacaacaagaggctcctggtggaagacgagaagcgcgccgaagactacaagggcgtgaagaagctgctcgataggtactacctcagctttattaacgacgtgctgcacagcatcaaactcaagaatctcaacaactacatctccctcttccgcaaaaagacccgcaccgagaaggagaacaaggagctggagaacctggagatcaacctccgcaaggaaatcgccaaagcgttcaagggcaatgaagggtacaagagcctcttcaagaaagacatcatcgaaactatcctcccagagtttctcgatgacaaggacgagatcgcgctggtgaactcctttaacgggttcacaaccgcgtttaccggcttctttgataacagggaaaatatgttctccgaggaggccaagtccaccagcatcgccttcaggtgtatcaacgagaacctcacccgctacatttccaatatggacattttcgagaaggtggatgcgatcttcgataagcacgaggtgcaggagatcaaagagaagattctcaattccgattatgacgtcgaggatttcttcgaaggggagttctttaattttgtgctcacacaagagggcattgacgtgtacaacgcgattatcgggggcttcgtcacagagtccggggagaagattaaggggctgaatgagtacatcaatctgtacaatcagaagaccaagcagaaactgccgaaattcaagccgctctacaagcaagtcctgtccgatagggaaagcctctccttctacggcgagaaccagaccacccagaagggacagaagaacagccgcgagagaatgaagcggatcgaagagggcatcaaagagctgggcagccagatcctgaaagaacaccccgtggaaaacacccagctgcagaacgagaagctgtacctgtactacctgcagaatgggcgggatatgtacgtggaccaggaactggacatcaaccggctgtccgactacgatgtggaccatatcgtgcctcagagctttctgaaggacgactccatcgacaacaaggtgctgaccagaagcgacaagaaccggggcaagagcgacaacgtgccctccgaagaggtcgtgaagaagatgaagaactactggcggcagctgctgaacgccaagctgattacccagagaaagttcgacaatctgaccaaggccgagagaggcggcctgagcgagggctataccagcgacgaggaggtgctggaagtcttccgcaacacactgaataagaatagcgagattttctcctccatcaagaagctcgagaagctctttaagaactttgacgagtacagctccgccgggattttcgtgaagaacgggccggcgatcagcaccatctccaaggacatctttggcgagtggaacgtcatcagggacaagtggaacgccgagtacgacgacatccacctgaagaagaaggcggtggtgaccgagaagtatgaggacgatcgcaggaagtccttcaaaaaaatcggctccttcagcctcgaacagctccaggagtatgccgatgcggatctgtccgtcgtcgagaagctgaaggaaatcatcattcagaaggtcgacgagatctataaagtgtacgggtccagcgagaagctgttcgacgccgactttgtgctcgagaagtccctcaaaaagaatgacgccgtggtggccattatgaaagacctgctcgactccgtgaagtccttcgaaaattacattaaagcgttctttggggaggggaaggaaactaacagggatgagtccttctatggcgactttgtcctcgcgtacgacatcctgctgaaggtcgaccacatttacgacgcgatccgcaactacgtgacacagaagccgtactccaaagacaagttcaagctgtacttccagaacccgcaatttatggggggctgggacaaggataaagagacagactaccgcgcgacaattctccgctatggctccaaatactatctggccatcatggacaagaagtacgcgaagtgcctgcagaagatcgacaaagacgacgtcaatggcaactatgaaaagatcaactacaagctgctgccgggcccgaacaagatgctcccgaaggtgttcttcagcaagaagtggatggcctactacaatccaagcgaggatattcagaaaatctataaaaacgggaccttcaagaagggggacatgtttaacctcaacgactgccacaagctcattgatttcttcaaggatagcatttcccgctacccgaaatggtccaatgcgtacgattttaacttctccgagacagaaaagtacaaagacatcgcgggcttttacagggaggtggaggagcaagggtataaagtttcttttgaatccgcgagcaagaaggaagtcgacaagctcgtcgaggagggcaagctctacatgttccaaatttataacaaggacttttccgacaagagccatgggaccccaaacctccacaccatgtacttcaaactgctctttgacgagaacaaccacgggcaaatcaggctgagcggcggcgccgaattattcatgcgcagggcctccctcaagaaggaagagctggtcgtccatccagccaattccccgatcgcgaacaagaacccggacaatccgaaaaagaccaccaccctgtcctacgacgtctacaaggacaaacgcttcagcgaagaccagtacgaattacacatcccaattgcgattaataagtgcccaaagaatatcttcaaaattaatacagaggtcagggtgctgctcaaacacgacgacaatccgtatgtcatcggcattgacaggggcgagcgcaatctgctctatatcgtggtcgtggatgggaagggcaatattgtggagcagtactccctgaacgagattatcaacaacttcaatgggattaggattaagaccgactatcacagcctgctcgacaagaaagaaaaagagaggtttgaggcccgccaaaactggacctccattgagaatatcaaagaattaaaggccggctatatttcccaagtcgtccacaagatctgcgagctggtggagaaatatgacgccgtgattgcgctcgaagacttaaattctgggttcaagaactcccgcgtgaaggtggaaaaacaggtgtatcagaaattcgagaaaatgctgatcgacaaactcaattatatggtggataagaagtccaacccgtgtgccacagggggcgcgctgaagggctatcagatcaccaacaagttcgagagcttcaagagcatgagcacccagaacgggtttattttctacatcccggcgtggctcacctccaagattgacccgagcaccggcttcgtgaacctcctgaagacaaagtatacctccattgccgacagcaagaagtttatctcctccttcgaccgcattatgtatgtgccggaggaggacctcttcgagttcgccctcgactacaaaaacttcagccgcacagatgcggattacatcaagaagtggaagctgtactcctacgggaacaggatccgcatcttcaggaatccaaaaaaaaataacgtctttgactgggaggaagtgtgcctgacatccgcctacaaggaactgttcaataaatacggcatcaattaccagcagggcgacattcgcgccctcctctgtgagcagtccgacaaagcgttttactccagcttcatggccctcatgtccctgatgctccaaatgaggaatagcatcacagggcgcaccgacgtcgacttcctcatcagcccggtgaagaactccgacgggatcttttacgactcccgcaactatgaggcgcaagagaatgcgatcctcccgaagaacgccgatgcgaacggggcctataatatcgccaggaaagtgctctgggccatcgggcagttcaaaaaggcggaggatgagaagctcgacaaggtgaaaattgccatttccaacaaggagtggctggagtacgcgcagacctccgtgaagcactctggcggctcaaaaagaaccgccgacggcagcgaattcgagcccaagaagaagaggaaagtcggaagcggagctactaacttcagcctgctgaagcaggctggagacgtggaggagaaccctggacctatggtgagcaagggcgaggagctgttcaccggggtggtgcccatcctggtcgagctggacggcgacgtaaacggccacaagttcagcgtgtccggcgagggcgagggcgatgccacctacggcaagctgaccctgaagttcatctgcaccaccggcaagctgcccgtgccctggcccaccctcgtgaccaccctgacctatggagtgcagtgcttcagccgctaccccgaccacatgaagcagcacgacttcttcaagtccgccatgcccgaaggctacgtccaggagcgcaccatcttcttcaaggacgacggcaactacaagacccgcgccgaggtgaagttcgagggcgacaccctggtgaaccgcatcgagctgaagggcatcgacttcaaggaggacggcaacatcctggggcacaagctggagtacaactacaacagccacaacgtctatatcatggccgacaagcagaagaacggcatcaaggtgaacttcaagatccgccacaacatcgaggacggcagcgtgcagctcgccgaccactaccagcagaacacccccatcggcgacggccccgtgctgctgcccgacaaccactacctgagcacccagtccgccctgagcaaagaccccaacgagaagcgcgatcacatggtcctgctggagttcgtgaccgccgccgggatcactctcggcatggacgagctgtacaagtctggtggttctcccaagaagaagaggaaagtctaaccggtcatcatcaccatcaccattgagtttaaacccgctgatcagcctcgactgtgccttctagttgccagccatctgttgtttgcccctcccccgtgccttccttgaccctggaaggtgccactcccactgtcctttcctaataaaatgaggaaattgcatcgcattgtctgagtaggtgtcattctattctggggggtggggtggggcaggacagcaagggggaggattgggaagacaatagcaggcatgctggggatgcggtgggctctatggcttctgaggcggaaagaaccagctggggctcgataccgtcgacctctagctagagcttggcgtaatcatggtcatagctgtttcctgtgtgaaattgttatccgctcacaattccacacaacatacgagccggaagcataaagtgtaaagcctagggtgcctaatgagtgagctaactcacattaattgcgttgcgctcactgcccgctttccagtcgggaaacctgtcgtgccagctgcattaatgaatcggccaacgcgcggggagaggcggtttgcgtattgggcgctcttccgcttcctcgctcactgactcgctgcgctcggtcgttcggctgcggcgagcggtatcagctcactcaaaggcggtaatacggttatccacagaatcaggggataacgcaggaaagaacatgtgagcaaaaggccagcaaaaggccaggaaccgtaaaaaggccgcgttgctggcgtttttccataggctccgcccccctgacgagcatcacaaaaatcgacgctcaagtcagaggtggcgaaacccgacaggactataaagataccaggcgtttccccctggaagctccctcgtgcgctctcctgttccgaccctgccgcttaccggatacctgtccgcctttctcccttcgggaagcgtggcgctttctcatagctcacgctgtaggtatctcagttcggtgtaggtcgttcgctccaagctgggctgtgtgcacgaaccccccgttcagcccgaccgctgcgccttatccggtaactatcgtcttgagtccaacccggtaagacacgacttatcgccactggcagcagccactggtaacaggattagcagagcgaggtatgtaggcggtgctacagagttcttgaagtggtggcctaactacggctacactagaagaacagtatttggtatctgcgctctgctgaagccagttaccttcggaaaaagagttggtagctcttgatccggcaaacaaaccaccgctggtagcggtggtttttttgtttgcaagcagcagattacgcgcagaaaaaaaggatctcaagaagatcctttgatcttttctacggggtctgacactcagtggaacgaaaactcacgttaagggattttggtcatgagattatcaaaaaggatcttcacctagatccttttaaattaaaaatgaagttttaaatcaatctaaagtatatatgagtaaacttggtctgacagttaccaatgcttaatcagtgaggcacctatctcagcgatctgtctatttcgttcatccatagttgcctgactccccgtcgtgtagataactacgatacgggagggcttaccatctggccccagtgctgcaatgataccgcgagacccacgctcaccggctccagatttatcagcaataaaccagccagccggaagggccgagcgcagaagtggtcctgcaactttatccgcctccatccagtctattaattgttgccgggaagctagagtaagtagttcgccagttaatagtttgcgcaacgttgttgccattgctacaggcatcgtggtgtcacgctcgtcgtttggtatggcttcattcagctccggttcccaacgatcaaggcgagttacatgatcccccatgttgtgcaaaaaagcggttagctccttcggtcctccgatcgttgtcagaagtaagttggccgcagtgttatcactcatggttatggcagcactgcataattctcttactgtcatgccatccgtaagatgcttttctgtgactggtgagtactcaaccaagtcattctgagaatagtgtatgcggcgaccgagttgctcttgcccggcgtcaatacgggataataccgcgccacatagcagaactttaaaagtgctcatcattggaaaacgttcttcggggcgaaaactctcaaggatcttaccgctgttgagatccagttcgatgtaacccactcgtgcacccaactgatcttcagcatcttttactttcaccagcgtttctgggtgagcaaaaacaggaaggcaaaatgccgcaaaaaagggaataagggcgacacggaaatgttgaatactcatactcttcctttttcaatattattgaagcatttatcagggttattgtctcatgagcggatacatatttgaatgtatttagaaaaataaacaaataggggttccgcgcacatttccccgaaaagtgccacctgacgtcgacggatcgggagatcgatctcccgatcccctagggtcgactctcagtacaatctgctctgatgccgcatagttaagccagtatctgctccctgcttgtgtgttggaggtcgctgagtagtgcgcgagcaaaatttaagctacaacaaggcaaggcttgaccgacaattgcatgaagaatctgcttagggttaggcgttttgcgctgcttcgcgatgtacgggccagatatacgcgtt

SEQ ID NO: 425 - DNA, 8457 bp, synthetic construct
  source 1..8457: mol_type = other DNA
gacattgattattgactagttattaatagtaatcaattacggggtcattagttcatagcccatatatggagttccgcgttacataacttacggtaaatggcccgcctggctgaccgcccaacgacccccgcccattgacgtcaataatgacgtatgttcccatagtaacgccaatagggactttccattgacgtcaatgggtggagtatttacggtaaactgcccacttggcagtacatcaagtgtatcatatgccaagtacgccccctattgacgtcaatgacggtaaatggcccgcctggcattatgcccagtacatgaccttatgggactttcctacttggcagtacatctacgtattagtcatcgctattaccatggtgatgcggttttggcagtacatcaatgggcgtggatagcggtttgactcacggggatttccaagtctccaccccattgacgtcaatgggagtttgttttggcaccaaaatcaacgggactttccaaaatgtcgtaacaactccgccccattgacgcaaatgggcggtaggcgtgtacggtgggaggtctatataagcagagctggtttagtgaaccgtcagatccgctagagatccgcggccgctaatacgactcactatagggagagccgccaccatgaaacggacagccgacggaagcgagttcgagtcaccaaagaagaagcggaaagtctccaagctggagaagtttacaaactgttacagcctctccaaaaccctcaggtttaaagcgatcccggtgggcaagacccaggagaacatcgacaacaagaggctcctggtggaagacgagaagcgcgccgaagactacaagggcgtgaagaagctgctcgataggtactacctcagctttattaacgacgtgctgcacagcatcaaactcaagaatctcaacaactacatctccctcttccgcaaaaagacccgcaccgagaaggagaacaaggagctggagaacctggagatcaacctccgcaaggaaatcgccaaagcgttcaagggcaatgaagggtacaagagcctcttcaagaaagacatcatcgaaactatcctcccagagtttctcgatgacaaggacgagatcgcgctggtgaactcctttaacgggttcacaaccgcgtttaccggcttctttgataacagggaaaatatgttctccgaggaggccaagtccaccagcatcgccttcaggtgtatcaacgagaacctcacccgctacatttccaatatggacattttcgagaaggtggatgcgatcttcgataagcacgaggtgcaggagatcaaagagaagattctcaattccgattatgacgtcgaggatttcttcgaaggggagttctttaattttgtgctcacacaagagggcattgacgtgtacaacgcgattatcgggggcttcgtcacagagtccggggagaagattaaggggctgaatgagtacatcaatctgtacaatcagaagaccaagcagaaactgccgaaattcaagccgctctacaagcaagtcctgtccgatagggaaagcctctccttctacggcagcggcgagaaccagaccacccagaagggacagaagaacagccgcgagagaatgaagcggatcgaagagggcatcaaagagctgggcagccagatcctgaaagaacaccccgtggaaaacacccagctgcagaacgagaagctgtacctgtactacctgcagaatgggcgggatatgtacgtggaccaggaactggacatcaaccggctgtccgactacgatgtggaccatatcgtgcctcagagctttctgaaggacgactccatcgacaacaaggtgctgaccagaagcgacaagaaccggggcaagagcgacaacgtgccctccgaagaggtcgtgaagaagatgaagaactactggcggcagctgctgaacgccaagctgattacccagagaaagttcgacaatctgaccaaggccgagagaggcggcctgagcgagggctataccagcgacgaggaggtgctggaagtcttccgcaacacactgaataagaatagcgagattttctcctccatcaagaagctcgagaagctctttaagaactttgacgagtacagctccgccgggattttcgtgaagaacgggccggcgatcagcaccatctccaaggacatctttggcgagtggaacgtcatcagggacaagtggaacgccgagtacgacgacatccacctgaagaagaaggcggtggtgaccgagaagtatgaggacgatcgcaggaagtccttcaaaaaaatcggctccttcagcctcgaacagctccaggagtatgccgatgcggatctgtccgtcgtcgagaagctgaaggaaatcatcattcagaaggtcgacgagatctataaagtgtacgggtccagcgagaagctgttcgacgccgactttgtgctcgagaagtccctcaaaaagaatgacgccgtggtggccattatgaaagacctgctcgactccgtgaagtccttcgaaaattacattaaagcgttctttggggaggggaaggaaactaacagggatgagtccttctatggcgactttgtcctcgcgtacgacatcctgctgaaggtcgaccacatttacgacgcgatccgcaactacgtgacacagaagccgtactccaaagacaagttcaagctgtacttccagaacccgcaatttatggggggctgggacaaggataaagagacagactaccgcgcgacaattctccgctatggctccaaatactatctggccatcatggacaagaagtacgcgaagtgcctgcagaagatcgacaaagacgacgtcaatggcaactatgaaaagatcaactacaagctgctgccgggcccgaacaagatgctcccgaaggtgttcttcagcaagaagtggatggcctactacaatccaagcgaggatattcagaaaatctataaaaacgggaccttcaagaagggggacatgtttaacctcaacgactgccacaagctcattgatttcttcaaggatagcatttcccgctacccgaaatggtccaatgcgtacgattttaacttctccgagacagaaaagtacaaagacatcgcgggcttttacagggaggtggaggagcaagggtataaagtttcttttgaatccgcgagcaagaaggaagtcgacaagctcgtcgaggagggcaagctctacatgttccaaatttataacaaggacttttccgacaagagccatgggaccccaaacctccacaccatgtacttcaaactgctctttgacgagaacaaccacgggcaaatcaggctgagcggcggcgccgaattattcatgcgcagggcctccctcaagaaggaagagctggtcgtccatccagccaattccccgatcgcgaacaagaacccggacaatccgaaaaagaccaccaccctgtcctacgacgtctacaaggacaaacgcttcagcgaagaccagtacgaattacacatcccaattgcgattaataagtgcccaaagaatatcttcaaaattaatacagaggtcagggtgctgctcaaacacgacgacaatccgtatgtcatcggcattgacaggggcgagcgcaatctgctctatatcgtggtcgtggatgggaagggcaatattgtggagcagtactccctgaacgagattatcaacaacttcaatgggattaggattaagaccgactatcacagcctgctcgacaagaaagaaaaagagaggtttgaggcccgccaaaactggacctccattgagaatatcaaagaattaaaggccggctatatttcccaagtcgtccacaagatctgcgagctggtggagaaatatgacgccgtgattgcgctcgaagacttaaattctgggttcaagaactcccgcgtgaaggtggaaaaacaggtgtatcagaaattcgagaaaatgctgatcgacaaactcaattatatggtggataagaagtccaacccgtgtgccacagggggcgcgctgaagggctatcagatcaccaacaagttcgagagcttcaagagcatgagcacccagaacgggtttattttctacatcccggcgtggctcacctccaagattgacccgagcaccggcttcgtgaacctcctgaagacaaagtatacctccattgccgacagcaagaagtttatctcctccttcgaccgcattatgtatgtgccggaggaggacctcttcgagttcgccctcgactacaaaaacttcagccgcacagatgcggattacatcaagaagtggaagctgtactcctacgggaacaggatccgcatcttcaggaatccaaaaaaaaataacgtctttgactgggaggaagtgtgcctgacatccgcctacaaggaactgttcaataaatacggcatcaattaccagcagggcgacattcgcgccctcctctgtgagcagtccgacaaagcgttttactccagcttcatggccctcatgtccctgatgctccaaatgaggaatagcatcacagggcgcaccgacgtcgacttcctcatcagcccggtgaagaactccgacgggatcttttacgactcccgcaactatgaggcgcaagagaatgcgatcctcccgaagaacgccgatgcgaacggggcctataatatcgccaggaaagtgctctgggccatcgggcagttcaaaaaggcggaggatgagaagctcgacaaggtgaaaattgccatttccaacaaggagtggctggagtacgcgcagacctccgtgaagcactctggcggctcaaaaagaaccgccgacggcagcgaattcgagcccaagaagaagaggaaagtcggaagcggagctactaacttcagcctgctgaagcaggctggagacgtggaggagaaccctggacctatggtgagcaagggcgaggagctgttcaccggggtggtgcccatcctggtcgagctggacggcgacgtaaacggccacaagttcagcgtgtccggcgagggcgagggcgatgccacctacggcaagctgaccctgaagttcatctgcaccaccggcaagctgcccgtgccctggcccaccctcgtgaccaccctgacctatggagtgcagtgcttcagccgctaccccgaccacatgaagcagcacgacttcttcaagtccgccatgcccgaaggctacgtccaggagcgcaccatcttcttcaaggacgacggcaactacaagacccgcgccgaggtgaagttcgagggcgacaccctggtgaaccgcatcgagctgaagggcatcgacttcaaggaggacggcaacatcctggggcacaagctggagtacaactacaacagccacaacgtctatatcatggccgacaagcagaagaacggcatcaaggtgaacttcaagatccgccacaacatcgaggacggcagcgtgcagctcgccgaccactaccagcagaacacccccatcggcgacggccccgtgctgctgcccgacaaccactacctgagcacccagtccgccctgagcaaagaccccaacgagaagcgcgatcacatggtcctgctggagttcgtgaccgccgccgggatcactctcggcatggacgagctgtacaagtctggtggttctcccaagaagaagaggaaagtctaaccggtcatcatcaccatcaccattgagtttaaacccgctgatcagcctcgactgtgccttctagttgccagccatctgttgtttgcccctcccccgtgccttccttgaccctggaaggtgccactcccactgtcctttcctaataaaatgaggaaattgcatcgcattgtctgagtaggtgtcattctattctggggggtggggtggggcaggacagcaagggggaggattgggaagacaatagcaggcatgctggggatgcggtgggctctatggcttctgaggcggaaagaaccagctggggctcgataccgtcgacctctagctagagcttggcgtaatcatggtcatagctgtttcctgtgtgaaattgttatccgctcacaattccacacaacatacgagccggaagcataaagtgtaaagcctagggtgcctaatgagtgagctaactcacattaattgcgttgcgctcactgcccgctttccagtcgggaaacctgtcgtgccagctgcattaatgaatcggccaacgcgcggggagaggcggtttgcgtattgggcgctcttccgcttcctcgctcactgactcgctgcgctcggtcgttcggctgcggcgagcggtatcagctcactcaaaggcggtaatacggttatccacagaatcaggggataacgcaggaaagaacatgtgagcaaaaggccagcaaaaggccaggaaccgtaaaaaggccgcgttgctggcgtttttccataggctccgcccccctgacgagcatcacaaaaatcgacgctcaagtcagaggtggcgaaacccgacaggactataaagataccaggcgtttccccctggaagctccctcgtgcgctctcctgttccgaccctgccgcttaccggatacctgtccgcctttctcccttcgggaagcgtggcgctttctcatagctcacgctgtaggtatctcagttcggtgtaggtcgttcgctccaagctgggctgtgtgcacgaaccccccgttcagcccgaccgctgcgccttatccggtaactatcgtcttgagtccaacccggtaagacacgacttatcgccactggcagcagccactggtaacaggattagcagagcgaggtatgtaggcggtgctacagagttcttgaagtggtggcctaactacggctacactagaagaacagtatttggtatctgcgctctgctgaagccagttaccttcggaaaaagagttggtagctcttgatccggcaaacaaaccaccgctggtagcggtggtttttttgtttgcaagcagcagattacgcgcagaaaaaaaggatctcaagaagatcctttgatcttttctacggggtctgacactcagtggaacgaaaactcacgttaagggattttggtcatgagattatcaaaaaggatcttcacctagatccttttaaattaaaaatgaagttttaaatcaatctaaagtatatatgagtaaacttggtctgacagttaccaatgcttaatcagtgaggcacctatctcagcgatctgtctatttcgttcatccatagttgcctgactccccgtcgtgtagataactacgatacgggagggcttaccatctggccccagtgctgcaatgataccgcgagacccacgctcaccggctccagatttatcagcaataaaccagccagccggaagggccgagcgcagaagtggtcctgcaactttatccgcctccatccagtctattaattgttgccgggaagctagagtaagtagttcgccagttaatagtttgcgcaacgttgttgccattgctacaggcatcgtggtgtcacgctcgtcgtttggtatggcttcattcagctccggttcccaacgatcaaggcgagttacatgatcccccatgttgtgcaaaaaagcggttagctccttcggtcctccgatcgttgtcagaagtaagttggccgcagtgttatcactcatggttatggcagcactgcataattctcttactgtcatgccatccgtaagatgcttttctgtgactggtgagtactcaaccaagtcattctgagaatagtgtatgcggcgaccgagttgctcttgcccggcgtcaatacgggataataccgcgccacatagcagaactttaaaagtgctcatcattggaaaacgttcttcggggcgaaaactctcaaggatcttaccgctgttgagatccagttcgatgtaacccactcgtgcacccaactgatcttcagcatcttttactttcaccagcgtttctgggtgagcaaaaacaggaaggcaaaatgccgcaaaaaagggaataagggcgacacggaaatgttgaatactcatactcttcctttttcaatattattgaagcatttatcagggttattgtctcatgagcggatacatatttgaatgtatttagaaaaataaacaaataggggttccgcgcacatttccccgaaaagtgccacctgacgtcgacggatcgggagatcgatctcccgatcccctagggtcgactctcagtacaatctgctctgatgccgcatagttaagccagtatctgctccctgcttgtgtgttggaggtcgctgagtagtgcgcgagcaaaatttaagctacaacaaggcaaggcttgaccgacaattgcatgaagaatctgcttagggttaggcgttttgcgctgcttcgcgatgtacgggccagatatacgcgtt

SEQ ID NO: 426 - protein, 1550 aa, synthetic construct
EASPASGPRHLMDPHIFTSNFNNGIGRHKTYLCYEVERLDNGTSVKMDQHRGFLHNQAKNLLCGFYGRHAELRFLDLVPSLQLDPAQIYRVTWFISWSPCFSWGCAGEVRAFLQENTHVRLRIFAARIYDYDPLYKEALQMLRDAGAQVSIMTYDEFKHCWDTFVDHQGCPFQPWDGLDEHSQALSGRLRAILQNQGNSGGSSGGSSGSETPGTSESATPESSGGSSGGSSKLEKFTNCYSLSKTLRFKAIPVGKTQENIDNKRLLVEDEKRAEDYKGVKKLLDRYYLSFINDVLHSIKLKNLNNYISLFRKKTRTEKENKELENLEINLRKEIAKAFKGNEGYKSLFKKDIIETILPEFLDDKDEIALVNSFNGFTTAFTGFFDNRENMFSEEAKSTSIAFRCINENLTRYISNMDIFEKVDAIFDKHEVQEIKEKILNSDYDVEDFFEGEFFNFVLTQEGIDVYNAIIGGFVTESGEKIKGLNEYINLYNQKTKQKLPKFKPLYKQVLSDRESLSFYGEGYTSDEEVLEVFRNTLNKNSEIFSSIKKLEKLFKNFDEYSSAGIFVKNGPAISTISKDIFGEWNVIRDKWNAEYDDIHLKKKAVVTEKYEDDRRKSFKKIGSFSLEQLQEYADADLSVVEKLKEIIIQKVDEIYKVYGSSEKLFDADFVLEKSLKKNDAVVAIMKDLLDSVKSFENYIKAFFGEGKETNRDESFYGDFVLAYDILLKVDHIYDAIRNYVTQKPYSKDKFKLYFQNPQFMGGWDKDKETDYRATILRYGSKYYLAIMDKKYAKCLQKIDKDDVNGNYEKINYKLLPGPNKMLPKVFFSKKWMAYYNPSEDIQKIYKNGTFKKGDMFNLNDCHKLIDFFKDSISRYPKWSNAYDFNFSETEKYKDIAGFYREVEEQGYKVSFESASKKEVDKLVEEGKLYMFQIYNKDFSDKSHGTPNLHTMYFKLLFDENNHGQIRLSGGAELFMRRASLKKEELVVHPANSPIANKNPDNPKKTTTLSYDVYKDKRFSEDQYELHIPIAINKCPKNIFKINTEVRVLLKHDDNPYVIGIARGERNLLYIVVVDGKGNIVEQYSLNEIINNFNGIRIKTDYHSLLDKKEKERFEARQNWTSIENIKELKAGYISQVVHKICELVEKYDAVIALEDLNSGFKNSRVKVEKQVYQKFEKMLIDKLNYMVDKKSNPCATGGALKGYQITNKFESFKSMSTQNGFIFYIPAWLTSKIDPSTGFVNLLKTKYTSIADSKKFISSFDRIMYVPEEDLFEFALDYKNFSRTDADYIKKWKLYSYGNRIRIFRNPKKNNVFDWEEVCLTSAYKELFNKYGINYQQGDIRALLCEQSDKAFYSSFMALMSLMLQMRNSITGRTDVDFLISPVKNSDGIFYDSRNYEAQENAILPKNADANGAYNIARKVLWAIGQFKKAEDEKLDKVKIAISNKEWLEYAQTSVKHSGGSGGSGGSTNLSDIIEKETGKQLVIQESILMLPEEVEEVIGNKPESDILVHTAYDESTDENVMLLTSDAPEYKPWALVIQDSNGENKIKML

SEQ ID NO: 427 - protein, 1550 aa, synthetic construct
TNLSDIIEKETGKQLVIQESILMLPEEVEEVIGNKPESDILVHTAYDESTDENVMLLTSDAPEYKPWALVIQDSNGENKIKMLSGGSGGSGGSSKLEKFTNCYSLSKTLRFKAIPVGKTQENIDNKRLLVEDEKRAEDYKGVKKLLDRYYLSFINDVLHSIKLKNLNNYISLFRKKTRTEKENKELENLEINLRKEIAKAFKGNEGYKSLFKKDIIETILPEFLDDKDEIALVNSFNGFTTAFTGFFDNRENMFSEEAKSTSIAFRCINENLTRYISNMDIFEKVDAIFDKHEVQEIKEKILNSDYDVEDFFEGEFFNFVLTQEGIDVYNAIIGGFVTESGEKIKGLNEYINLYNQKTKQKLPKFKPLYKQVLSDRESLSFYGEGYTSDEEVLEVFRNTLNKNSEIFSSIKKLEKLFKNFDEYSSAGIFVKNGPAISTISKDIFGEWNVIRDKWNAEYDDIHLKKKAVVTEKYEDDRRKSFKKIGSFSLEQLQEYADADLSVVEKLKEIIIQKVDEIYKVYGSSEKLFDADFVLEKSLKKNDAVVAIMKDLLDSVKSFENYIKAFFGEGKETNRDESFYGDFVLAYDILLKVDHIYDAIRNYVTQKPYSKDKFKLYFQNPQFMGGWDKDKETDYRATILRYGSKYYLAIMDKKYAKCLQKIDKDDVNGNYEKINYKLLPGPNKMLPKVFFSKKWMAYYNPSEDIQKIYKNGTFKKGDMFNLNDCHKLIDFFKDSISRYPKWSNAYDFNFSETEKYKDIAGFYREVEEQGYKVSFESASKKEVDKLVEEGKLYMFQIYNKDFSDKSHGTPNLHTMYFKLLFDENNHGQIRLSGGAELFMRRASLKKEELVVHPANSPIANKNPDNPKKTTTLSYDVYKDKRFSEDQYELHIPIAINKCPKNIFKINTEVRVLLKHDDNPYVIGIARGERNLLYIVVVDGKGNIVEQYSLNEIINNFNGIRIKTDYHSLLDKKEKERFEARQNWTSIENIKELKAGYISQVVHKICELVEKYDAVIALEDLNSGFKNSRVKVEKQVYQKFEKMLIDKLNYMVDKKSNPCATGGALKGYQITNKFESFKSMSTQNGFIFYIPAWLTSKIDPSTGFVNLLKTKYTSIADSKKFISSFDRIMYVPEEDLFEFALDYKNFSRTDADYIKKWKLYSYGNRIRIFRNPKKNNVFDWEEVCLTSAYKELFNKYGINYQQGDIRALLCEQSDKAFYSSFMALMSLMLQMRNSITGRTDVDFLISPVKNSDGIFYDSRNYEAQENAILPKNADANGAYNIARKVLWAIGQFKKAEDEKLDKVKIAISNKEWLEYAQTSVKHSGGSSGGSSGSETPGTSESATPESSGGSSGGSEASPASGPRHLMDPHIFTSNFNNGIGRHKTYLCYEVERLDNGTSVKMDQHRGFLHNQAKNLLCGFYGRHAELRFLDLVPSLQLDPAQIYRVTWFISWSPCFSWGCAGEVRAFLQENTHVRLRIFAARIYDYDPLYKEALQMLRDAGAQVSIMTYDEFKHCWDTFVDHQGCPFQPWDGLDEHSQALSGRLRAILQNQGN

SEQ ID NO: 428 - protein, 1548 aa, synthetic construct
EASPASGPRHLMDPHIFTSNFNNGIGRHKTYLCYEVERLDNGTSVKMDQHRGFLHNQAKNLLCGFYGRHAELRFLDLVPSLQLDPAQIYRVTWFISWSPCFSWGCAGEVRAFLQENTHVRLRIFAARIYDYDPLYKEALQMLRDAGAQVSIMTYDEFKHCWDTFVDHQGCPFQPWDGLDEHSQALSGRLRAILQNQGNSTSQSDGSSVPADIDQSSDSDQSSSQGQPGSKLEKFTNCYSLSKTLRFKAIPVGKTQENIDNKRLLVEDEKRAEDYKGVKKLLDRYYLSFINDVLHSIKLKNLNNYISLFRKKTRTEKENKELENLEINLRKEIAKAFKGNEGYKSLFKKDIIETILPEFLDDKDEIALVNSFNGFTTAFTGFFDNRENMFSEEAKSTSIAFRCINENLTRYISNMDIFEKVDAIFDKHEVQEIKEKILNSDYDVEDFFEGEFFNFVLTQEGIDVYNAIIGGFVTESGEKIKGLNEYINLYNQKTKQKLPKFKPLYKQVLSDRESLSFYGEGYTSDEEVLEVFRNTLNKNSEIFSSIKKLEKLFKNFDEYSSAGIFVKNGPAISTISKDIFGEWNVIRDKWNAEYDDIHLKKKAVVTEKYEDDRRKSFKKIGSFSLEQLQEYADADLSVVEKLKEIIIQKVDEIYKVYGSSEKLFDADFVLEKSLKKNDAVVAIMKDLLDSVKSFENYIKAFFGEGKETNRDESFYGDFVLAYDILLKVDHIYDAIRNYVTQKPYSKDKFKLYFQNPQFMGGWDKDKETDYRATILRYGSKYYLAIMDKKYAKCLQKIDKDDVNGNYEKINYKLLPGPNKMLPKVFFSKKWMAYYNPSEDIQKIYKNGTFKKGDMFNLNDCHKLIDFFKDSISRYPKWSNAYDFNFSETEKYKDIAGFYREVEEQGYKVSFESASKKEVDKLVEEGKLYMFQIYNKDFSDKSHGTPNLHTMYFKLLFDENNHGQIRLSGGAELFMRRASLKKEELVVHPANSPIANKNPDNPKKTTTLSYDVYKDKRFSEDQYELHIPIAINKCPKNIFKINTEVRVLLKHDDNPYVIGIARGERNLLYIVVVDGKGNIVEQYSLNEIINNFNGIRIKTDYHSLLDKKEKERFEARQNWTSIENIKELKAGYISQVVHKICELVEKYDAVIALEDLNSGFKNSRVKVEKQVYQKFEKMLIDKLNYMVDKKSNPCATGGALKGYQITNKFESFKSMSTQNGFIFYIPAWLTSKIDPSTGFVNLLKTKYTSIADSKKFISSFDRIMYVPEEDLFEFALDYKNFSRTDADYIKKWKLYSYGNRIRIFRNPKKNNVFDWEEVCLTSAYKELFNKYGINYQQGDIRALLCEQSDKAFYSSFMALMSLMLQMRNSITGRTDVDFLISPVKNSDGIFYDSRNYEAQENAILPKNADANGAYNIARKVLWAIGQFKKAEDEKLDKVKIAISNKEWLEYAQTSVKHSGGSGGSGGSTNLSDIIEKETGKQLVIQESILMLPEEVEEVIGNKPESDILVHTAYDESTDENVMLLTSDAPEYKPWALVIQDSNGENKIKML

SEQ ID NO: 429 - protein, 1539 aa, synthetic construct
MEASPASGPRHLMDPHIFTSNFNNGIGRHKTYLCYEVERLDNGTSVKMDQHRGFLHNQAKNLLCGFYGRHAELRFLDLVPSLQLDPAQIYRVTWFISWSPCFSWGCAGEVRAFLQENTHVRLRIFAARIYDYDPLYKEALQMLRDAGAQVSIMTYDEFKHCWDTFVDHQGCPFQPWDGLDEHSQALSGRLRAILQNQGNSGSETPGTSESATPESMSKLEKFTNCYSLSKTLRFKAIPVGKTQENIDNKRLLVEDEKRAEDYKGVKKLLDRYYLSFINDVLHSIKLKNLNNYISLFRKKTRTEKENKELENLEINLRKEIAKAFKGNEGYKSLFKKDIIETILPEFLDDKDEIALVNSFNGFTTAFTGFFDNRENMFSEEAKSTSIAFRCINENLTRYISNMDIFEKVDAIFDKHEVQEIKEKILNSDYDVEDFFEGEFFNFVLTQEGIDVYNAIIGGFVTESGEKIKGLNEYINLYNQKTKQKLPKFKPLYKQVLSDRESLSFYGEGYTSDEEVLEVFRNTLNKNSEIFSSIKKLEKLFKNFDEYSSAGIFVKNGPAISTISKDIFGEWNVIRDKWNAEYDDIHLKKKAVVTEKYEDDRRKSFKKIGSFSLEQLQEYADADLSVVEKLKEIIIQKVDEIYKVYGSSEKLFDADFVLEKSLKKNDAVVAIMKDLLDSVKSFENYIKAFFGEGKETNRDESFYGDFVLAYDILLKVDHIYDAIRNYVTQKPYSKDKFKLYFQNPQFMGGWDKDKETDYRATILRYGSKYYLAIMDKKYAKCLQKIDKDDVNGNYEKINYKLLPGPNKMLPKVFFSKKWMAYYNPSEDIQKIYKNGTFKKGDMFNLNDCHKLIDFFKDSISRYPKWSNAYDFNFSETEKYKDIAGFYREVEEQGYKVSFESASKKEVDKLVEEGKLYMFQIYNKDFSDKSHGTPNLHTMYFKLLFDENNHGQIRLSGGAELFMRRASLKKEELVVHPANSPIANKNPDNPKKTTTLSYDVYKDKRFSEDQYELHIPIAINKCPKNIFKINTEVRVLLKHDDNPYVIGIARGERNLLYIVVVDGKGNIVEQYSLNEIINNFNGIRIKTDYHSLLDKKEKERFEARQNWTSIENIKELKAGYISQVVHKICELVEKYDAVIALEDLNSGFKNSRVKVEKQVYQKFEKMLIDKLNYMVDKKSNPCATGGALKGYQITNKFESFKSMSTQNGFIFYIPAWLTSKIDPSTGFVNLLKTKYTSIADSKKFISSFDRIMYVPEEDLFEFALDYKNFSRTDADYIKKWKLYSYGNRIRIFRNPKKNNVFDWEEVCLTSAYKELFNKYGINYQQGDIRALLCEQSDKAFYSSFMALMSLMLQMRNSITGRTDVDFLISPVKNSDGIFYDSRNYEAQENAILPKNADANGAYNIARKVLWAIGQFKKAEDEKLDKVKIAISNKEWLEYAQTSVKHGSPKKKRKVSGGSTNLSDIIEKETGKQLVIQESILMLPEEVEEVIGNKPESDILVHTAYDESTDENVMLLTSDAPEYKPWALVIQDSNGENKIKML

SEQ ID NO: 430 - protein, 1696 aa, synthetic construct
EASPASGPRHLMDPHIFTSNFNNGIGRHKTYLCYEVERLDNGTSVKMDQHRGFLHNQAKNLLCGFYGRHAELRFLDLVPSLQLDPAQIYRVTWFISWSPCFSWGCAGEVRAFLQENTHVRLRIFAARIYDYDPLYKEALQMLRDAGAQVSIMTYDEFKHCWDTFVDHQGCPFQPWDGLDEHSQALSGRLRAILQNQGNSTSQSDGSSVPADIDQSSDSDQSSSQGQPGSKLEKFTNCYSLSKTLRFKAIPVGKTQENIDNKRLLVEDEKRAEDYKGVKKLLDRYYLSFINDVLHSIKLKNLNNYISLFRKKTRTEKENKELENLEINLRKEIAKAFKGNEGYKSLFKKDIIETILPEFLDDKDEIALVNSFNGFTTAFTGFFDNRENMFSEEAKSTSIAFRCINENLTRYISNMDIFEKVDAIFDKHEVQEIKEKILNSDYDVEDFFEGEFFNFVLTQEGIDVYNAIIGGFVTESGEKIKGLNEYINLYNQKTKQKLPKFKPLYKQVLSDRESLSFYGEGSSGENQTTQKGQKNSRERMKRIEEGIKELGSQILKEHPVENTQLQNEKLYLYYLQNGRDMYVDQELDINRLSDYDVDHIVPQSFLKDDSIDNKVLTRSDKNRGKSDNVPSEEVVKKMKNYWRQLLNAKLITQRKFDNLTKAERGGLSGYTSDEEVLEVFRNTLNKNSEIFSSIKKLEKLFKNFDEYSSAGIFVKNGPAISTISKDIFGEWNVIRDKWNAEYDDIHLKKKAVVTEKYEDDRRKSFKKIGSFSLEQLQEYADADLSVVEKLKEIIIQKVDEIYKVYGSSEKLFDADFVLEKSLKKNDAVVAIMKDLLDSVKSFENYIKAFFGEGKETNRDESFYGDFVLAYDILLKVDHIYDAIRNYVTQKPYSKDKFKLYFQNPQFMGGWDKDKETDYRATILRYGSKYYLAIMDKKYAKCLQKIDKDDVNGNYEKINYKLLPGPNKMLPKVFFSKKWMAYYNPSEDIQKIYKNGTFKKGDMFNLNDCHKLIDFFKDSISRYPKWSNAYDFNFSETEKYKDIAGFYREVEEQGYKVSFESASKKEVDKLVEEGKLYMFQIYNKDFSDKSHGTPNLHTMYFKLLFDENNHGQIRLSGGAELFMRRASLKKEELVVHPANSPIANKNPDNPKKTTTLSYDVYKDKRFSEDQYELHIPIAINKCPKNIFKINTEVRVLLKHDDNPYVIGIARGERNLLYIVVVDGKGNIVEQYSLNEIINNFNGIRIKTDYHSLLDKKEKERFEARQNWTSIENIKELKAGYISQVVHKICELVEKYDAVIALEDLNSGFKNSRVKVEKQVYQKFEKMLIDKLNYMVDKKSNPCATGGALKGYQITNKFESFKSMSTQNGFIFYIPAWLTSKIDPSTGFVNLLKTKYTSIADSKKFISSFDRIMYVPEEDLFEFALDYKNFSRTDADYIKKWKLYSYGNRIRIFRNPKKNNVFDWEEVCLTSAYKELFNKYGINYQQGDIRALLCEQSDKAFYSSFMALMSLMLQMRNSITGRTDVDFLISPVKNSDGIFYDSRNYEAQENAILPKNADANGAYNIARKVLWAIGQFKKAEDEKLDKVKIAISNKEWLEYAQTSVKHSGGSGGSGGSTNLSDIIEKETGKQLVIQESILMLPEEVEEVIGNKPESDILVHTAYDESTDENVMLLTSDAPEYKPWALVIQDSNGENKIKML

SEQ ID NO: 431 - protein, 1687 aa, synthetic construct
MEASPASGPRHLMDPHIFTSNFNNGIGRHKTYLCYEVERLDNGTSVKMDQHRGFLHNQAKNLLCGFYGRHAELRFLDLVPSLQLDPAQIYRVTWFISWSPCFSWGCAGEVRAFLQENTHVRLRIFAARIYDYDPLYKEALQMLRDAGAQVSIMTYDEFKHCWDTFVDHQGCPFQPWDGLDEHSQALSGRLRAILQNQGNSGSETPGTSESATPESMSKLEKFTNCYSLSKTLRFKAIPVGKTQENIDNKRLLVEDEKRAEDYKGVKKLLDRYYLSFINDVLHSIKLKNLNNYISLFRKKTRTEKENKELENLEINLRKEIAKAFKGNEGYKSLFKKDIIETILPEFLDDKDEIALVNSFNGFTTAFTGFFDNRENMFSEEAKSTSIAFRCINENLTRYISNMDIFEKVDAIFDKHEVQEIKEKILNSDYDVEDFFEGEFFNFVLTQEGIDVYNAIIGGFVTESGEKIKGLNEYINLYNQKTKQKLPKFKPLYKQVLSDRESLSFYGEGSSGENQTTQKGQKNSRERMKRIEEGIKELGSQILKEHPVENTQLQNEKLYLYYLQNGRDMYVDQELDINRLSDYDVDHIVPQSFLKDDSIDNKVLTRSDKNRGKSDNVPSEEVVKKMKNYWRQLLNAKLITQRKFDNLTKAERGGLSGYTSDEEVLEVFRNTLNKNSEIFSSIKKLEKLFKNFDEYSSAGIFVKNGPAISTISKDIFGEWNVIRDKWNAEYDDIHLKKKAVVTEKYEDDRRKSFKKIGSFSLEQLQEYADADLSVVEKLKEIIIQKVDEIYKVYGSSEKLFDADFVLEKSLKKNDAVVAIMKDLLDSVKSFENYIKAFFGEGKETNRDESFYGDFVLAYDILLKVDHIYDAIRNYVTQKPYSKDKFKLYFQNPQFMGGWDKDKETDYRATILRYGSKYYLAIMDKKYAKCLQKIDKDDVNGNYEKINYKLLPGPNKMLPKVFFSKKWMAYYNPSEDIQKIYKNGTFKKGDMFNLNDCHKLIDFFKDSISRYPKWSNAYDFNFSETEKYKDIAGFYREVEEQGYKVSFESASKKEVDKLVEEGKLYMFQIYNKDFSDKSHGTPNLHTMYFKLLFDENNHGQIRLSGGAELFMRRASLKKEELVVHPANSPIANKNPDNPKKTTTLSYDVYKDKRFSEDQYELHIPIAINKCPKNIFKINTEVRVLLKHDDNPYVIGIARGERNLLYIVVVDGKGNIVEQYSLNEIINNFNGIRIKTDYHSLLDKKEKERFEARQNWTSIENIKELKAGYISQVVHKICELVEKYDAVIALEDLNSGFKNSRVKVEKQVYQKFEKMLIDKLNYMVDKKSNPCATGGALKGYQITNKFESFKSMSTQNGFIFYIPAWLTSKIDPSTGFVNLLKTKYTSIADSKKFISSFDRIMYVPEEDLFEFALDYKNFSRTDADYIKKWKLYSYGNRIRIFRNPKKNNVFDWEEVCLTSAYKELFNKYGINYQQGDIRALLCEQSDKAFYSSFMALMSLMLQMRNSITGRTDVDFLISPVKNSDGIFYDSRNYEAQENAILPKNADANGAYNIARKVLWAIGQFKKAEDEKLDKVKIAISNKEWLEYAQTSVKHGSPKKKRKVSGGSTNLSDIIEKETGKQLVIQESILMLPEEVEEVIGNKPESDILVHTAYDESTDENVMLLTSDAPEYKPWALVIQDSNGENKIKML

SEQ ID NO: 432 - protein, 1692 aa, synthetic construct
EASPASGPRHLMDPHIFTSNFNNGIGRHKTYLCYEVERLDNGTSVKMDQHRGFLHNQAKNLLCGFYGRHAELRFLDLVPSLQLDPAQIYRVTWFISWSPCFSWGCAGEVRAFLQENTHVRLRIFAARIYDYDPLYKEALQMLRDAGAQVSIMTYDEFKHCWDTFVDHQGCPFQPWDGLDEHSQALSGRLRAILQNQGNSTSQSDGSSVPADIDQSSDSDQSSSQGQPGSKLEKFTNCYSLSKTLRFKAIPVGKTQENIDNKRLLVEDEKRAEDYKGVKKLLDRYYLSFINDVLHSIKLKNLNNYISLFRKKTRTEKENKELENLEINLRKEIAKAFKGNEGYKSLFKKDIIETILPEFLDDKDEIALVNSFNGFTTAFTGFFDNRENMFSEEAKSTSIAFRCINENLTRYISNMDIFEKVDAIFDKHEVQEIKEKILNSDYDVEDFFEGEFFNFVLTQEGIDVYNAIIGGFVTESGEKIKGLNEYINLYNQKTKQKLPKFKPLYKQVLSDRESLSFYGENQTTQKGQKNSRERMKRIEEGIKELGSQILKEHPVENTQLQNEKLYLYYLQNGRDMYVDQELDINRLSDYDVDHIVPQSFLKDDSIDNKVLTRSDKNRGKSDNVPSEEVVKKMKNYWRQLLNAKLITQRKFDNLTKAERGGLSEGYTSDEEVLEVFRNTLNKNSEIFSSIKKLEKLFKNFDEYSSAGIFVKNGPAISTISKDIFGEWNVIRDKWNAEYDDIHLKKKAVVTEKYEDDRRKSFKKIGSFSLEQLQEYADADLSVVEKLKEIIIQKVDEIYKVYGSSEKLFDADFVLEKSLKKNDAVVAIMKDLLDSVKSFENYIKAFFGEGKETNRDESFYGDFVLAYDILLKVDHIYDAIRNYVTQKPYSKDKFKLYFQNPQFMGGWDKDKETDYRATILRYGSKYYLAIMDKKYAKCLQKIDKDDVNGNYEKINYKLLPGPNKMLPKVFFSKKWMAYYNPSEDIQKIYKNGTFKKGDMFNLNDCHKLIDFFKDSISRYPKWSNAYDFNFSETEKYKDIAGFYREVEEQGYKVSFESASKKEVDKLVEEGKLYMFQIYNKDFSDKSHGTPNLHTMYFKLLFDENNHGQIRLSGGAELFMRRASLKKEELVVHPANSPIANKNPDNPKKTTTLSYDVYKDKRFSEDQYELHIPIAINKCPKNIFKINTEVRVLLKHDDNPYVIGIARGERNLLYIVVVDGKGNIVEQYSLNEIINNFNGIRIKTDYHSLLDKKEKERFEARQNWTSIENIKELKAGYISQVVHKICELVEKYDAVIALEDLNSGFKNSRVKVEKQVYQKFEKMLIDKLNYMVDKKSNPCATGGALKGYQITNKFESFKSMSTQNGFIFYIPAWLTSKIDPSTGFVNLLKTKYTSIADSKKFISSFDRIMYVPEEDLFEFALDYKNFSRTDADYIKKWKLYSYGNRIRIFRNPKKNNVFDWEEVCLTSAYKELFNKYGINYQQGDIRALLCEQSDKAFYSSFMALMSLMLQMRNSITGRTDVDFLISPVKNSDGIFYDSRNYEAQENAILPKNADANGAYNIARKVLWAIGQFKKAEDEKLDKVKIAISNKEWLEYAQTSVKHSGGSGGSGGSTNLSDIIEKETGKQLVIQESILMLPEEVEEVIGNKPESDILVHTAYDESTDENVMLLTSDAPEYKPWALVIQDSNGENKIKML

SEQ ID NO: 433 - protein, 1683 aa, synthetic construct
MEASPASGPRHLMDPHIFTSNFNNGIGRHKTYLCYEVERLDNGTSVKMDQHRGFLHNQAKNLLCGFYGRHAELRFLDLVPSLQLDPAQIYRVTWFISWSPCFSWGCAGEVRAFLQENTHVRLRIFAARIYDYDPLYKEALQMLRDAGAQVSIMTYDEFKHCWDTFVDHQGCPFQPWDGLDEHSQALSGRLRAILQNQGNSGSETPGTSESATPESMSKLEKFTNCYSLSKTLRFKAIPVGKTQENIDNKRLLVEDEKRAEDYKGVKKLLDRYYLSFINDVLHSIKLKNLNNYISLFRKKTRTEKENKELENLEINLRKEIAKAFKGNEGYKSLFKKDIIETILPEFLDDKDEIALVNSFNGFTTAFTGFFDNRENMFSEEAKSTSIAFRCINENLTRYISNMDIFEKVDAIFDKHEVQEIKEKILNSDYDVEDFFEGEFFNFVLTQEGIDVYNAIIGGFVTESGEKIKGLNEYINLYNQKTKQKLPKFKPLYKQVLSDRESLSFYGENQTTQKGQKNSRERMKRIEEGIKELGSQILKEHPVENTQLQNEKLYLYYLQNGRDMYVDQELDINRLSDYDVDHIVPQSFLKDDSIDNKVLTRSDKNRGKSDNVPSEEVVKKMKNYWRQLLNAKLITQRKFDNLTKAERGGLSEGYTSDEEVLEVFRNTLNKNSEIFSSIKKLEKLFKNFDEYSSAGIFVKNGPAISTISKDIFGEWNVIRDKWNAEYDDIHLKKKAVVTEKYEDDRRKSFKKIGSFSLEQLQEYADADLSVVEKLKEIIIQKVDEIYKVYGSSEKLFDADFVLEKSLKKNDAVVAIMKDLLDSVKSFENYIKAFFGEGKETNRDESFYGDFVLAYDILLKVDHIYDAIRNYVTQKPYSKDKFKLYFQNPQFMGGWDKDKETDYRATILRYGSKYYLAIMDKKYAKCLQKIDKDDVNGNYEKINYKLLPGPNKMLPKVFFSKKWMAYYNPSEDIQKIYKNGTFKKGDMFNLNDCHKLIDFFKDSISRYPKWSNAYDFNFSETEKYKDIAGFYREVEEQGYKVSFESASKKEVDKLVEEGKLYMFQIYNKDFSDKSHGTPNLHTMYFKLLFDENNHGQIRLSGGAELFMRRASLKKEELVVHPANSPIANKNPDNPKKTTTLSYDVYKDKRFSEDQYELHIPIAINKCPKNIFKINTEVRVLLKHDDNPYVIGIARGERNLLYIVVVDGKGNIVEQYSLNEIINNFNGIRIKTDYHSLLDKKEKERFEARQNWTSIENIKELKAGYISQVVHKICELVEKYDAVIALEDLNSGFKNSRVKVEKQVYQKFEKMLIDKLNYMVDKKSNPCATGGALKGYQITNKFESFKSMSTQNGFIFYIPAWLTSKIDPSTGFVNLLKTKYTSIADSKKFISSFDRIMYVPEEDLFEFALDYKNFSRTDADYIKKWKLYSYGNRIRIFRNPKKNNVFDWEEVCLTSAYKELFNKYGINYQQGDIRALLCEQSDKAFYSSFMALMSLMLQMRNSITGRTDVDFLISPVKNSDGIFYDSRNYEAQENAILPKNADANGAYNIARKVLWAIGQFKKAEDEKLDKVKIAISNKEWLEYAQTSVKHGSPKKKRKVSGGSTNLSDIIEKETGKQLVIQESILMLPEEVEEVIGNKPESDILVHTAYDESTDENVMLLTSDAPEYKPWALVIQDSNGENKIKML

SEQ ID NO: 434 - DNA, 4783 bp, synthetic construct
  source 1..4783: mol_type = other DNA
gaggcctcccccgcatcaggacctagacacctgatggatccccatattttcacatctaacttcaacaacggaatcggcagacacaagacctacctgtgctatgaggtggaaaggctggataacggaacctctgtgaagatggaccagcacaggtaagtatcaaggttacaagacaggtttaaggagaccaatagaaactgggcttgtcgagacagagaagactcttgcgtttctgataggcacctattggtcttactgacatccactttgcctttctctccacaggggcttcctgcataaccaggccaagaatctgctgtgcggtttctacgggagacatgcagaactgaggtttctggatctggtgccatccctgcagctggaccccgctcagatctacagagtgacttggttcatctcttggagcccttgcttttcatggggatgtgctggcgaggtgagggccttccttcaggaaaacacacacgtgagactgaggatttttgctgccagaatctacgattatgacccactgtacaaggaagctctgcagatgctgagggatgcaggcgctcaggtgagcattatgacctatgacgaattcaagcactgctgggatacttttgtggaccatcagggttgtccttttcagccatgggatgggctggacgagcattctcaggcactgagcggtagactgagggctatcctgcagaaccaggggaattctggtggttcttctggtggttctagcggcagcgagactcccgggacctcagagtccgccacacccgaaagttctggtggttcttctggtggttcttccaagctggagaagtttacaaactgttacagcctctccaaaaccctcaggtttaaagcgatcccggtgggcaagacccaggagaacatcgacaacaagaggctcctggtggaagacgagaagcgcgccgaagactacaagggcgtgaagaagctgctcgataggtactacctcagctttattaacgacgtgctgcacagcatcaaactcaagaatctcaacaactacatctccctcttccgcaaaaagacccgcaccgagaaggagaacaaggagctggagaacctggagatcaacctccgcaaggaaatcgccaaagcgttcaagggcaatgaagggtacaagagcctcttcaagaaagacatcatcgaaactatcctcccagagtttctcgatgacaaggacgagatcgcgctggtgaactcctttaacgggttcacaaccgcgtttaccggcttctttgataacagggaaaatatgttctccgaggaggccaagtccaccagcatcgccttcaggtgtatcaacgagaacctcacccgctacatttccaatatggacattttcgagaaggtggatgcgatcttcgataagcacgaggtgcaggagatcaaagagaagattctcaattccgattatgacgtcgaggatttcttcgaaggggagttctttaattttgtgctcacacaagagggcattgacgtgtacaacgcgattatcgggggcttcgtcacagagtccggggagaagattaaggggctgaatgagtacatcaatctgtacaatcagaagaccaagcagaaactgccgaaattcaagccgctctacaagcaagtcctgtccgatagggaaagcctctccttctacggcgagggctataccagcgacgaggaggtgctggaagtcttccgcaacacactgaataagaatagcgagattttctcctccatcaagaagctcgagaagctctttaagaactttgacgagtacagctccgccgggattttcgtgaagaacgggccggcgatcagcaccatctccaaggacatctttggcgagtggaacgtcatcagggacaagtggaacgccgagtacgacgacatccacctgaagaagaaggcggtggtgaccgagaagtatgaggacgatcgcaggaagtccttcaaaaaaatcggctccttcagcctcgaacagctccaggagtatgccgatgcggatctgtccgtcgtcgagaagctgaaggaaatcatcattcagaaggtcgacgagatctataaagtgtacgggtccagcgagaagctgttcgacgccgactttgtgctcgagaagtccctcaaaaagaatgacgccgtggtggccattatgaaagacctgctcgactccgtgaagtccttcgaaaattacattaaagcgttctttggggaggggaaggaaactaacagggatgagtccttctatggcgactttgtcctcgcgtacgacatcctgctgaaggtcgaccacatttacgacgcgatccgcaactacgtgacacagaagccgtactccaaagacaagttcaagctgtacttccagaacccgcaatttatggggggctgggacaaggataaagagacagactaccgcgcgacaattctccgctatggctccaaatactatctggccatcatggacaagaagtacgcgaagtgcctgcagaagatcgacaaagacgacgtcaatggcaactatgaaaagatcaactacaagctgctgccgggcccgaacaagatgctcccgaaggtgttcttcagcaagaagtggatggcctactacaatccaagcgaggatattcagaaaatctataaaaacgggaccttcaagaagggggacatgtttaacctcaacgactgccacaagctcattgatttcttcaaggatagcatttcccgctacccgaaatggtccaatgcgtacgattttaacttctccgagacagaaaagtacaaagacatcgcgggcttttacagggaggtggaggagcaagggtataaagtttcttttgaatccgcgagcaagaaggaagtcgacaagctcgtcgaggagggcaagctctacatgttccaaatttataacaaggacttttccgacaagagccatgggaccccaaacctccacaccatgtacttcaaactgctctttgacgagaacaaccacgggcaaatcaggctgagcggcggcgccgaattattcatgcgcagggcctccctcaagaaggaggagctggtcgtccatccagccaattccccgatcgcgaacaagaacccggacaatccgaaaaagaccaccaccctgtcctacgacgtctacaaggacaaacgcttcagcgaagaccagtacgaattacacatcccaattgcgattaataagtgcccaaagaatatcttcaaaattaatacagaggtcagggtgctgctcaaacacgacgacaatccgtatgtcatcggcattgccaggggcgagcgcaatctgctctatatcgtggtcgtggatgggaagggcaatattgtggagcagtactccctgaacgagattatcaacaacttcaatgggattaggattaagaccgactatcacagcctgctcgacaagaaagaaaaagagaggtttgaggcccgccaaaactggacctccattgagaatatcaaagaattaaaggccggctatatttcccaagtcgtccacaagatctgcgagctggtggagaaatatgacgccgtgattgcgctcgaagacttaaattctgggttcaagaactcccgcgtgaaggtggaaaaacaggtgtatcagaaattcgagaaaatgctgatcgacaaactcaattatatggtggataagaagtccaacccgtgtgccacagggggcgcgctgaagggctatcagatcaccaacaagttcgagagcttcaagagcatgagcacccagaacgggtttattttctacatcccggcgtggctcacctccaagattgacccgagcaccggcttcgtgaacctcctgaagacaaagtatacctccattgccgacagcaagaagtttatctcctccttcgaccgcattatgtatgtgccggaggaggacctcttcgagttcgccctcgactacaaaaacttcagccgcacagatgcggattacatcaagaagtggaagctgtactcctacgggaacaggatccgcatcttcaggaatccaaaaaaaaataacgtctttgactgggaggaagtgtgcctgacatccgcctacaaggaactgttcaataaatacggcatcaattaccagcagggcgacattcgcgccctcctctgtgagcagtccgacaaagcgttttactccagcttcatggccctcatgtccctgatgctccaaatgaggaatagcatcacagggcgcaccgacgtcgacttcctcatcagcccggtgaagaactccgacgggatcttttacgactcccgcaactatgaggcgcaagagaatgcgatcctcccgaagaacgccgatgcgaacggggcctataatatcgccaggaaagtgctctgggccatcgggcagttcaaaaaggcggaggatgagaagctcgacaaggtgaaaattgccatttccaacaaggagtggctggagtacgcgcagacctccgtgaagcactcaggcggaagtggtggaagtggcggtagtaccaacctcagcgacattatcgagaaggaaaccggcaagcaactcgtgatccaggagagcatactgatgctccccgaggaggtcgaggaggtgattggcaataagcccgagtccgatatactggttcatactgcgtatgacgaaagcacagacgagaacgtcatgctacttaccagcgacgccccggagtacaagccctgggccctagtcatccaagacagcaacggtgagaacaagatcaagatgctt

SEQ ID NO: 435 - DNA, 4783 bp, synthetic construct
  source 1..4783: mol_type = other DNA
accaacctcagcgacattatcgagaaggaaaccggcaagcaactcgtgatccaggagagcatactgatgctccccgaggaggtcgaggaggtgattggcaataagcccgagtccgatatactggttcatactgcgtatgacgaaagcacagacgagaacgtcatgctacttaccagcgacgccccggagtacaagccctgggccctagtcatccaagacagcaacggtgagaacaagatcaagatgctttcaggcggaagtggtggaagtggcggtagttccaagctggagaagtttacaaactgttacagcctctccaaaaccctcaggtttaaagcgatcccggtgggcaagacccaggagaacatcgacaacaagaggctcctggtggaagacgagaagcgcgccgaagactacaagggcgtgaagaagctgctcgataggtactacctcagctttattaacgacgtgctgcacagcatcaaactcaagaatctcaacaactacatctccctcttccgcaaaaagacccgcaccgagaaggagaacaaggagctggagaacctggagatcaacctccgcaaggaaatcgccaaagcgttcaagggcaatgaagggtacaagagcctcttcaagaaagacatcatcgaaactatcctcccagagtttctcgatgacaaggacgagatcgcgctggtgaactcctttaacgggttcacaaccgcgtttaccggcttctttgataacagggaaaatatgttctccgaggaggccaagtccaccagcatcgccttcaggtgtatcaacgagaacctcacccgctacatttccaatatggacattttcgagaaggtggatgcgatcttcgataagcacgaggtgcaggagatcaaagagaagattctcaattccgattatgacgtcgaggatttcttcgaaggggagttctttaattttgtgctcacacaagagggcattgacgtgtacaacgcgattatcgggggcttcgtcacagagtccggggagaagattaaggggctgaatgagtacatcaatctgtacaatcagaagaccaagcagaaactgccgaaattcaagccgctctacaagcaagtcctgtccgatagggaaagcctctccttctacggcgagggctataccagcgacgaggaggtgctggaagtcttccgcaacacactgaataagaatagcgagattttctcctccatcaagaagctcgagaagctctttaagaactttgacgagtacagctccgccgggattttcgtgaagaacgggccggcgatcagcaccatctccaaggacatctttggcgagtggaacgtcatcagggacaagtggaacgccgagtacgacgacatccacctgaagaagaaggcggtggtgaccgagaagtatgaggacgatcgcaggaagtccttcaaaaaaatcggctccttcagcctcgaacagctccaggagtatgccgatgcggatctgtccgtcgtcgagaagctgaaggaaatcatcattcagaaggtcgacgagatctataaagtgtacgggtccagcgagaagctgttcgacgccgactttgtgctcgagaagtccctcaaaaagaatgacgccgtggtggccattatgaaagacctgctcgactccgtgaagtccttcgaaaattacattaaagcgttctttggggaggggaaggaaactaacagggatgagtccttctatggcgactttgtcctcgcgtacgacatcctgctgaaggtcgaccacatttacgacgcgatccgcaactacgtgacacagaagccgtactccaaagacaagttcaagctgtacttccagaacccgcaatttatggggggctgggacaaggataaagagacagactaccgcgcgacaattctccgctatggctccaaatactatctggccatcatggacaagaagtacgcgaagtgcctgcagaagatcgacaaagacgacgtcaatggcaactatgaaaagatcaactacaagctgctgccgggcccgaacaagatgctcccgaaggtgttcttcagcaagaagtggatggcctactacaatccaagcgaggatattcagaaaatctataaaaacgggaccttcaagaagggggacatgtttaacctcaacgactgccacaagctcattgatttcttcaaggatagcatttcccgctacccgaaatggtccaatgcgtacgattttaacttctccgagacagaaaagtacaaagacatcgcgggcttttacagggaggtggaggagcaagggtataaagtttcttttgaatccgcgagcaagaaggaagtcgacaagctcgtcgaggagggcaagctctacatgttccaaatttataacaaggacttttccgacaagagccatgggaccccaaacctccacaccatgtacttcaaactgctctttgacgagaacaaccacgggcaaatcaggctgagcggcggcgccgaattattcatgcgcagggcctccctcaagaaggaggagctggtcgtccatccagccaattccccgatcgcgaacaagaacccggacaatccgaaaaagaccaccaccctgtcctacgacgtctacaaggacaaacgcttcagcgaagaccagtacgaattacacatcccaattgcgattaataagtgcccaaagaatatcttcaaaattaatacagaggtcagggtgctgctcaaacacgacgacaatccgtatgtcatcggcattgccaggggcgagcgcaatctgctctatatcgtggtcgtggatgggaagggcaatattgtggagcagtactccctgaacgagattatcaacaacttcaatgggattaggattaagaccgactatcacagcctgctcgacaagaaagaaaaagagaggtttgaggcccgccaaaactggacctccattgagaatatcaaagaattaaaggccggctatatttcccaagtcgtccacaagatctgcgagctggtggagaaatatgacgccgtgattgcgctcgaagacttaaattctgggttcaagaactcccgcgtgaaggtggaaaaacaggtgtatcagaaattcgagaaaatgctgatcgacaaactcaattatatggtggataagaagtccaacccgtgtgccacagggggcgcgctgaagggctatcagatcaccaacaagttcgagagcttcaagagcatgagcacccagaacgggtttattttctacatcccggcgtggctcacctccaagattgacccgagcaccggcttcgtgaacctcctgaagacaaagtatacctccattgccgacagcaagaagtttatctcctccttcgaccgcattatgtatgtgccggaggaggacctcttcgagttcgccctcgactacaaaaacttcagccgcacagatgcggattacatcaagaagtggaagctgtactcctacgggaacaggatccgcatcttcaggaatccaaaaaaaaataacgtctttgactgggaggaagtgtgcctgacatccgcctacaaggaactgttcaataaatacggcatcaattaccagcagggcgacattcgcgccctcctctgtgagcagtccgacaaagcgttttactccagcttcatggccctcatgtccctgatgctccaaatgaggaatagcatcacagggcgcaccgacgtcgacttcctcatcagcccggtgaagaactccgacgggatcttttacgactcccgcaactatgaggcgcaagagaatgcgatcctcccgaagaacgccgatgcgaacggggcctataatatcgccaggaaagtgctctgggccatcgggcagttcaaaaaggcggaggatgagaagctcgacaaggtgaaaattgccatttccaacaaggagtggctggagtacgcgcagacctccgtgaagcactctggtggttcttctggtggttctagcggcagcgagactcccgggacctcagagtccgccacacccgaaagttctggtggttcttctggtggttctgaggcctcccccgcatcaggacctagacacctgatggatccccatattttcacatctaacttcaacaacggaatcggcagacacaagacctacctgtgctatgaggtggaaaggctggataacggaacctctgtgaagatggaccagcacaggtaagtatcaaggttacaagacaggtttaaggagaccaatagaaactgggcttgtcgagacagagaagactcttgcgtttctgataggcacctattggtcttactgacatccactttgcctttctctccacaggggcttcctgcataaccaggccaagaatctgctgtgcggtttctacgggagacatgcagaactgaggtttctggatctggtgccatccctgcagctggaccccgctcagatctacagagtgacttggttcatctcttggagcccttgcttttcatggggatgtgctggcgaggtgagggccttccttcaggaaaacacacacgtgagactgaggatttttgctgccagaatctacgattatgacccactgtacaaggaagctctgcagatgctgagggatgcaggcgctcaggtgagcattatgacctatgacgaattcaagcactgctgggatacttttgtggaccatcagggttgtccttttcagccatgggatgggctggacgagcattctcaggcactgagcggtagactgagggctatcctgcagaaccaggggaat

SEQ ID NO: 436 - DNA, 4777 bp, synthetic construct
  source 1..4777: mol_type = other DNA
gaggcctcccccgcatcaggacctagacacctgatggatccccatattttcacatctaacttcaacaacggaatcggcagacacaagacctacctgtgctatgaggtggaaaggctggataacggaacctctgtgaagatggaccagcacaggtaagtatcaaggttacaagacaggtttaaggagaccaatagaaactgggcttgtcgagacagagaagactcttgcgtttctgataggcacctattggtcttactgacatccactttgcctttctctccacaggggcttcctgcataaccaggccaagaatctgctgtgcggtttctacgggagacatgcagaactgaggtttctggatctggtgccatccctgcagctggaccccgctcagatctacagagtgacttggttcatctcttggagcccttgcttttcatggggatgtgctggcgaggtgagggccttccttcaggaaaacacacacgtgagactgaggatttttgctgccagaatctacgattatgacccactgtacaaggaagctctgcagatgctgagggatgcaggcgctcaggtgagcattatgacctatgacgaattcaagcactgctgggatacttttgtggaccatcagggttgtccttttcagccatgggatgggctggacgagcattctcaggcactgagcggtagactgagggctatcctgcagaaccaggggaattctacttctcaatctgatggatcttctgttccagctgatattgatcaatcttctgattctgatcaatcttcttctcaaggacaaccaggatccaagctggagaagtttacaaactgttacagcctctccaaaaccctcaggtttaaagcgatcccggtgggcaagacccaggagaacatcgacaacaagaggctcctggtggaagacgagaagcgcgccgaagactacaagggcgtgaagaagctgctcgataggtactacctcagctttattaacgacgtgctgcacagcatcaaactcaagaatctcaacaactacatctccctcttccgcaaaaagacccgcaccgagaaggagaacaaggagctggagaacctggagatcaacctccgcaaggaaatcgccaaagcgttcaagggcaatgaagggtacaagagcctcttcaagaaagacatcatcgaaactatcctcccagagtttctcgatgacaaggacgagatcgcgctggtgaactcctttaacgggttcacaaccgcgtttaccggcttctttgataacagggaaaatatgttctccgaggaggccaagtccaccagcatcgccttcaggtgtatcaacgagaacctcacccgctacatttccaatatggacattttcgagaaggtggatgcgatcttcgataagcacgaggtgcaggagatcaaagagaagattctcaattccgattatgacgtcgaggatttcttcgaaggggagttctttaattttgtgctcacacaagagggcattgacgtgtacaacgcgattatcgggggcttcgtcacagagtccggggagaagattaaggggctgaatgagtacatcaatctgtacaatcagaagaccaagcagaaactgccgaaattcaagccgctctacaagcaagtcctgtccgatagggaaagcctctccttctacggcgagggctataccagcgacgaggaggtgctggaagtcttccgcaacacactgaataagaatagcgagattttctcctccatcaagaagctcgagaagctctttaagaactttgacgagtacagctccgccgggattttcgtgaagaacgggccggcgatcagcaccatctccaaggacatctttggcgagtggaacgtcatcagggacaagtggaacgccgagtacgacgacatccacctgaagaagaaggcggtggtgaccgagaagtatgaggacgatcgcaggaagtccttcaaaaaaatcggctccttcagcctcgaacagctccaggagtatgccgatgcggatctgtccgtcgtcgagaagctgaaggaaatcatcattcagaaggtcgacgagatctataaagtgtacgggtccagcgagaagctgttcgacgccgactttgtgctcgagaagtccctcaaaaagaatgacgccgtggtggccattatgaaagacctgctcgactccgtgaagtccttcgaaaattacattaaagcgttctttggggaggggaaggaaactaacagggatgagtccttctatggcgactttgtcctcgcgtacgacatcctgctgaaggtcgaccacatttacgacgcgatccgcaactacgtgacacagaagccgtactccaaagacaagttcaagctgtacttccagaacccgcaatttatggggggctgggacaaggataaagagacagactaccgcgcgacaattctccgctatggctccaaatactatctggccatcatggacaagaagtacgcgaagtgcctgcagaagatcgacaaagacgacgtcaatggcaactatgaaaagatcaactacaagctgctgccgggcccgaacaagatgctcccgaaggtgttcttcagcaagaagtggatggcctactacaatccaagcgaggatattcagaaaatctataaaaacgggaccttcaagaagggggacatgtttaacctcaacgactgccacaagctcattgatttcttcaaggatagcatttcccgctacccgaaatggtccaatgcgtacgattttaacttctccgagacagaaaagtacaaagacatcgcgggcttttacagggaggtggaggagcaagggtataaagtttcttttgaatccgcgagcaagaaggaagtcgacaagctcgtcgaggagggcaagctctacatgttccaaatttataacaaggacttttccgacaagagccatgggaccccaaacctccacaccatgtacttcaaactgctctttgacgagaacaaccacgggcaaatcaggctgagcggcggcgccgaattattcatgcgcagggcctccctcaagaaggaggagctggtcgtccatccagccaattccccgatcgcgaacaagaacccggacaatccgaaaaagaccaccaccctgtcctacgacgtctacaaggacaaacgcttcagcgaagaccagtacgaattacacatcccaattgcgattaataagtgcccaaagaatatcttcaaaattaatacagaggtcagggtgctgctcaaacacgacgacaatccgtatgtcatcggcattgccaggggcgagcgcaatctgctctatatcgtggtcgtggatgggaagggcaatattgtggagcagtactccctgaacgagattatcaacaacttcaatgggattaggattaagaccgactatcacagcctgctcgacaagaaagaaaaagagaggtttgaggcccgccaaaactggacctccattgagaatatcaaagaattaaaggccggctatatttcccaagtcgtccacaagatctgcgagctggtggagaaatatgacgccgtgattgcgctcgaagacttaaattctgggttcaagaactcccgcgtgaaggtggaaaaacaggtgtatcagaaattcgagaaaatgctgatcgacaaactcaattatatggtggataagaagtccaacccgtgtgccacagggggcgcgctgaagggctatcagatcaccaacaagttcgagagcttcaagagcatgagcacccagaacgggtttattttctacatcccggcgtggctcacctccaagattgacccgagcaccggcttcgtgaacctcctgaagacaaagtatacctccattgccgacagcaagaagtttatctcctccttcgaccgcattatgtatgtgccggaggaggacctcttcgagttcgccctcgactacaaaaacttcagccgcacagatgcggattacatcaagaagtggaagctgtactcctacgggaacaggatccgcatcttcaggaatccaaaaaaaaataacgtctttgactgggaggaagtgtgcctgacatccgcctacaaggaactgttcaataaatacggcatcaattaccagcagggcgacattcgcgccctcctctgtgagcagtccgacaaagcgttttactccagcttcatggccctcatgtccctgatgctccaaatgaggaatagcatcacagggcgcaccgacgtcgacttcctcatcagcccggtgaagaactccgacgggatcttttacgactcccgcaactatgaggcgcaagagaatgcgatcctcccgaagaacgccgatgcgaacggggcctataatatcgccaggaaagtgctctgggccatcgggcagttcaaaaaggcggaggatgagaagctcgacaaggtgaaaattgccatttccaacaaggagtggctggagtacgcgcagacctccgtgaagcactcaggcggaagtggtggaagtggcggtagtaccaacctcagcgacattatcgagaaggaaaccggcaagcaactcgtgatccaggagagcatactgatgctccccgaggaggtcgaggaggtgattggcaataagcccgagtccgatatactggttcatactgcgtatgacgaaagcacagacgagaacgtcatgctacttaccagcgacgccccggagtacaagccctgggccctagtcatccaagacagcaacggtgagaacaagatcaagatgctt

SEQ ID NO: 437 - DNA, 4750 bp, synthetic construct
  source 1..4750: mol_type = other DNA
atggaggcctcccccgcatcaggacctagacacctgatggatccccatattttcacatctaacttcaacaacggaatcggcagacacaagacctacctgtgctatgaggtggaaaggctggataacggaacctctgtgaagatggaccagcacaggtaagtatcaaggttacaagacaggtttaaggagaccaatagaaactgggcttgtcgagacagagaagactcttgcgtttctgataggcacctattggtcttactgacatccactttgcctttctctccacaggggcttcctgcataaccaggccaagaatctgctgtgcggtttctacgggagacatgcagaactgaggtttctggatctggtgccatccctgcagctggaccccgctcagatctacagagtgacttggttcatctcttggagcccttgcttttcatggggatgtgctggcgaggtgagggccttccttcaggaaaacacacacgtgagactgaggatttttgctgccagaatctacgattatgacccactgtacaaggaagctctgcagatgctgagggatgcaggcgctcaggtgagcattatgacctatgacgaattcaagcactgctgggatacttttgtggaccatcagggttgtccttttcagccatgggatgggctggacgagcattctcaggcactgagcggtagactgagggctatcctgcagaaccaggggaattctggatctgaaactccaggaacttctgaatctgctactccagaatctatgtccaagctggagaagtttacaaactgttacagcctctccaaaaccctcaggtttaaagcgatcccggtgggcaagacccaggagaacatcgacaacaagaggctcctggtggaagacgagaagcgcgccgaagactacaagggcgtgaagaagctgctcgataggtactacctcagctttattaacgacgtgctgcacagcatcaaactcaagaatctcaacaactacatctccctcttccgcaaaaagacccgcaccgagaaggagaacaaggagctggagaacctggagatcaacctccgcaaggaaatcgccaaagcgttcaagggcaatgaagggtacaagagcctcttcaagaaagacatcatcgaaactatcctcccagagtttctcgatgacaaggacgagatcgcgctggtgaactcctttaacgggttcacaaccgcgtttaccggcttctttgataacagggaaaatatgttctccgaggaggccaagtccaccagcatcgccttcaggtgtatcaacgagaacctcacccgctacatttccaatatggacattttcgagaaggtggatgcgatcttcgataagcacgaggtgcaggagatcaaagagaagattctcaattccgattatgacgtcgaggatttcttcgaaggggagttctttaattttgtgctcacacaagagggcattgacgtgtacaacgcgattatcgggggcttcgtcacagagtccggggagaagattaaggggctgaatgagtacatcaatctgtacaatcagaagaccaagcagaaactgccgaaattcaagccgctctacaagcaagtcctgtccgatagggaaagcctctccttctacggcgagggctataccagcgacgaggaggtgctggaagtcttccgcaacacactgaataagaatagcgagattttctcctccatcaagaagctcgagaagctctttaagaactttgacgagtacagctccgccgggattttcgtgaagaacgggccggcgatcagcaccatctccaaggacatctttggcgagtggaacgtcatcagggacaagtggaacgccgagtacgacgacatccacctgaagaagaaggcggtggtgaccgagaagtatgaggacgatcgcaggaagtccttcaaaaaaatcggctccttcagcctcgaacagctccaggagtatgccgatgcggatctgtccgtcgtcgagaagctgaaggaaatcatcattcagaaggtcgacgagatctataaagtgtacgggtccagcgagaagctgttcgacgccgactttgtgctcgagaagtccctcaaaaagaatgacgccgtggtggccattatgaaagacctgctcgactccgtgaagtccttcgaaaattacattaaagcgttctttggggaggggaaggaaactaacagggatgagtccttctatggcgactttgtcctcgcgtacgacatcctgctgaaggtcgaccacatttacgacgcgatccgcaactacgtgacacagaagccgtactccaaagacaagttcaagctgtacttccagaacccgcaatttatggggggctgggacaaggataaagagacagactaccgcgcgacaattctccgctatggctccaaatactatctggccatcatggacaagaagtacgcgaagtgcctgcagaagatcgacaaagacgacgtcaatggcaactatgaaaagatcaactacaagctgctgccgggcccgaacaagatgctcccgaaggtgttcttcagcaagaagtggatggcctactacaatccaagcgaggatattcagaaaatctataaaaacgggaccttcaagaagggggacatgtttaacctcaacgactgccacaagctcattgatttcttcaaggatagcatttcccgctacccgaaatggtccaatgcgtacgattttaacttctccgagacagaaaagtacaaagacatcgcgggcttttacagggaggtggaggagcaagggtataaagtttcttttgaatccgcgagcaagaaggaagtcgacaagctcgtcgaggagggcaagctctacatgttccaaatttataacaaggacttttccgacaagagccatgggaccccaaacctccacaccatgtacttcaaactgctctttgacgagaacaaccacgggcaaatcaggctgagcggcggcgccgaattattcatgcgcagggcctccctcaagaaggaggagctggtcgtccatccagccaattccccgatcgcgaacaagaacccggacaatccgaaaaagaccaccaccctgtcctacgacgtctacaaggacaaacgcttcagcgaagaccagtacgaattacacatcccaattgcgattaataagtgcccaaagaatatcttcaaaattaatacagaggtcagggtgctgctcaaacacgacgacaatccgtatgtcatcggcattgccaggggcgagcgcaatctgctctatatcgtggtcgtggatgggaagggcaatattgtggagcagtactccctgaacgagattatcaacaacttcaatgggattaggattaagaccgactatcacagcctgctcgacaagaaagaaaaagagaggtttgaggcccgccaaaactggacctccattgagaatatcaaagaattaaaggccggctatatttcccaagtcgtccacaagatctgcgagctggtggagaaatatgacgccgtgattgcgctcgaagacttaaattctgggttcaagaactcccgcgtgaaggtggaaaaacaggtgtatcagaaattcgagaaaatgctgatcgacaaactcaattatatggtggataagaagtccaacccgtgtgccacagggggcgcgctgaagggctatcagatcaccaacaagttcgagagcttcaagagcatgagcacccagaacgggtttattttctacatcccggcgtggctcacctccaagattgacccgagcaccggcttcgtgaacctcctgaagacaaagtatacctccattgccgacagcaagaagtttatctcctccttcgaccgcattatgtatgtgccggaggaggacctcttcgagttcgccctcgactacaaaaacttcagccgcacagatgcggattacatcaagaagtggaagctgtactcctacgggaacaggatccgcatcttcaggaatccaaaaaaaaataacgtctttgactgggaggaagtgtgcctgacatccgcctacaaggaactgttcaataaatacggcatcaattaccagcagggcgacattcgcgccctcctctgtgagcagtccgacaaagcgttttactccagcttcatggccctcatgtccctgatgctccaaatgaggaatagcatcacagggcgcaccgacgtcgacttcctcatcagcccggtgaagaactccgacgggatcttttacgactcccgcaactatgaggcgcaagagaatgcgatcctcccgaagaacgccgatgcgaacggggcctataatatcgccaggaaagtgctctgggccatcgggcagttcaaaaaggcggaggatgagaagctcgacaaggtgaaaattgccatttccaacaaggagtggctggagtacgcgcagacctccgtgaagcacggatctcccaagaagaagaggaaagtctctggaggatctaccaacctcagcgacattatcgagaaggaaaccggcaagcaactcgtgatccaggagagcatactgatgctccccgaggaggtcgaggaggtgattggcaataagcccgagtccgatatactggttcatactgcgtatgacgaaagcacagacgagaacgtcatgctacttaccagcgacgccccggagtacaagccctgggccctagtcatccaagacagcaacggtgagaacaagatcaagatgctt

SEQ ID NO: 438 - DNA, 5221 bp, synthetic construct
  source 1..5221: mol_type = other DNA
gaggcctcccccgcatcaggacctagacacctgatggatccccatattttcacatctaacttcaacaacggaatcggcagacacaagacctacctgtgctatgaggtggaaaggctggataacggaacctctgtgaagatggaccagcacaggtaagtatcaaggttacaagacaggtttaaggagaccaatagaaactgggcttgtcgagacagagaagactcttgcgtttctgataggcacctattggtcttactgacatccactttgcctttctctccacaggggcttcctgcataaccaggccaagaatctgctgtgcggtttctacgggagacatgcagaactgaggtttctggatctggtgccatccctgcagctggaccccgctcagatctacagagtgacttggttcatctcttggagcccttgcttttcatggggatgtgctggcgaggtgagggccttccttcaggaaaacacacacgtgagactgaggatttttgctgccagaatctacgattatgacccactgtacaaggaagctctgcagatgctgagggatgcaggcgctcaggtgagcattatgacctatgacgaattcaagcactgctgggatacttttgtggaccatcagggttgtccttttcagccatgggatgggctggacgagcattctcaggcactgagcggtagactgagggctatcctgcagaaccaggggaattctacttctcaatctgatggatcttctgttccagctgatattgatcaatcttctgattctgatcaatcttcttctcaaggacaaccaggatccaagctggagaagtttacaaactgttacagcctctccaaaaccctcaggtttaaagcgatcccggtgggcaagacccaggagaacatcgacaacaagaggctcctggtggaagacgagaagcgcgccgaagactacaagggcgtgaagaagctgctcgataggtactacctcagctttattaacgacgtgctgcacagcatcaaactcaagaatctcaacaactacatctccctcttccgcaaaaagacccgcaccgagaaggagaacaaggagctggagaacctggagatcaacctccgcaaggaaatcgccaaagcgttcaagggcaatgaagggtacaagagcctcttcaagaaagacatcatcgaaactatcctcccagagtttctcgatgacaaggacgagatcgcgctggtgaactcctttaacgggttcacaaccgcgtttaccggcttctttgataacagggaaaatatgttctccgaggaggccaagtccaccagcatcgccttcaggtgtatcaacgagaacctcacccgctacatttccaatatggacattttcgagaaggtggatgcgatcttcgataagcacgaggtgcaggagatcaaagagaagattctcaattccgattatgacgtcgaggatttcttcgaaggggagttctttaattttgtgctcacacaagagggcattgacgtgtacaacgcgattatcgggggcttcgtcacagagtccggggagaagattaaggggctgaatgagtacatcaatctgtacaatcagaagaccaagcagaaactgccgaaattcaagccgctctacaagcaagtcctgtccgatagggaaagcctctccttctacggcgagggatccagcggcgagaaccagaccacccagaagggacagaagaacagccgcgagagaatgaagcggatcgaagagggcatcaaagagctgggcagccagatcctgaaagaacaccccgtggaaaacacccagctgcagaacgagaagctgtacctgtactacctgcagaatgggcgggatatgtacgtggaccaggaactggacatcaaccggctgtccgactacgatgtggaccatatcgtgcctcagagctttctgaaggacgactccatcgacaacaaggtgctgaccagaagcgacaagaaccggggcaagagcgacaacgtgccctccgaagaggtcgtgaagaagatgaagaactactggcggcagctgctgaacgccaagctgattacccagagaaagttcgacaatctgaccaaggccgagagaggcggcctgagcggctataccagcgacgaggaggtgctggaagtcttccgcaacacactgaataagaatagcgagattttctcctccatcaagaagctcgagaagctctttaagaactttgacgagtacagctccgccgggattttcgtgaagaacgggccggcgatcagcaccatctccaaggacatctttggcgagtggaacgtcatcagggacaagtggaacgccgagtacgacgacatccacctgaagaagaaggcggtggtgaccgagaagtatgaggacgatcgcaggaagtccttcaaaaaaatcggctccttcagcctcgaacagctccaggagtatgccgatgcggatctgtccgtcgtcgagaagctgaaggaaatcatcattcagaaggtcgacgagatctataaagtgtacgggtccagcgagaagctgttcgacgccgactttgtgctcgagaagtccctcaaaaagaatgacgccgtggtggccattatgaaagacctgctcgactccgtgaagtccttcgaaaattacattaaagcgttctttggggaggggaaggaaactaacagggatgagtccttctatggcgactttgtcctcgcgtacgacatcctgctgaaggtcgaccacatttacgacgcgatccgcaactacgtgacacagaagccgtactccaaagacaagttcaagctgtacttccagaacccgcaatttatggggggctgggacaaggataaagagacagactaccgcgcgacaattctccgctatggctccaaatactatctggccatcatggacaagaagtacgcgaagtgcctgcagaagatcgacaaagacgacgtcaatggcaactatgaaaagatcaactacaagctgctgccgggcccgaacaagatgctcccgaaggtgttcttcagcaagaagtggatggcctactacaatccaagcgaggatattcagaaaatctataaaaacgggaccttcaagaagggggacatgtttaacctcaacgactgccacaagctcattgatttcttcaaggatagcatttcccgctacccgaaatggtccaatgcgtacgattttaacttctccgagacagaaaagtacaaagacatcgcgggcttttacagggaggtggaggagcaagggtataaagtttcttttgaatccgcgagcaagaaggaagtcgacaagctcgtcgaggagggcaagctctacatgttccaaatttataacaaggacttttccgacaagagccatgggaccccaaacctccacaccatgtacttcaaactgctctttgacgagaacaaccacgggcaaatcaggctgagcggcggcgccgaattattcatgcgcagggcctccctcaagaaggaggagctggtcgtccatccagccaattccccgatcgcgaacaagaacccggacaatccgaaaaagaccaccaccctgtcctacgacgtctacaaggacaaacgcttcagcgaagaccagtacgaattacacatcccaattgcgattaataagtgcccaaagaatatcttcaaaattaatacagaggtcagggtgctgctcaaacacgacgacaatccgtatgtcatcggcattgccaggggcgagcgcaatctgctctatatcgtggtcgtggatgggaagggcaatattgtggagcagtactccctgaacgagattatcaacaacttcaatgggattaggattaagaccgactatcacagcctgctcgacaagaaagaaaaagagaggtttgaggcccgccaaaactggacctccattgagaatatcaaagaattaaaggccggctatatttcccaagtcgtccacaagatctgcgagctggtggagaaatatgacgccgtgattgcgctcgaagacttaaattctgggttcaagaactcccgcgtgaaggtggaaaaacaggtgtatcagaaattcgagaaaatgctgatcgacaaactcaattatatggtggataagaagtccaacccgtgtgccacagggggcgcgctgaagggctatcagatcaccaacaagttcgagagcttcaagagcatgagcacccagaacgggtttattttctacatcccggcgtggctcacctccaagattgacccgagcaccggcttcgtgaacctcctgaagacaaagtatacctccattgccgacagcaagaagtttatctcctccttcgaccgcattatgtatgtgccggaggaggacctcttcgagttcgccctcgactacaaaaacttcagccgcacagatgcggattacatcaagaagtggaagctgtactcctacgggaacaggatccgcatcttcaggaatccaaaaaaaaataacgtctttgactgggaggaagtgtgcctgacatccgcctacaaggaactgttcaataaatacggcatcaattaccagcagggcgacattcgcgccctcctctgtgagcagtccgacaaagcgttttactccagcttcatggccctcatgtccctgatgctccaaatgaggaatagcatcacagggcgcaccgacgtcgacttcctcatcagcccggtgaagaactccgacgggatcttttacgactcccgcaactatgaggcgcaagagaatgcgatcctcccgaagaacgccgatgcgaacggggcctataatatcgccaggaaagtgctctgggccatcgggcagttcaaaaaggcggaggatgagaagctcgacaaggtgaaaattgccatttccaacaaggagtggctggagtacgcgcagacctccgtgaagcactcaggcggaagtggtggaagtggcggtagtaccaacctcagcgacattatcgagaaggaaaccggcaagcaactcgtgatccaggagagcatactgatgctccccgaggaggtcgaggaggtgattggcaataagcccgagtccgatatactggttcatactgcgtatgacgaaagcacagacgagaacgtcatgctacttaccagcgacgccccggagtacaagccctgggccctagtcatccaagacagcaacggtgagaacaagatcaagatgctt

SEQ ID NO: 439 - DNA, 5194 bp, synthetic construct
  source 1..5194: mol_type = other DNA
atggaggcctcccccgcatcaggacctagacacctgatggatccccatattttcacatctaacttcaacaacggaatcggcagacacaagacctacctgtgctatgaggtggaaaggctggataacggaacctctgtgaagatggaccagcacaggtaagtatcaaggttacaagacaggtttaaggagaccaatagaaactgggcttgtcgagacagagaagactcttgcgtttctgataggcacctattggtcttactgacatccactttgcctttctctccacaggggcttcctgcataaccaggccaagaatctgctgtgcggtttctacgggagacatgcagaactgaggtttctggatctggtgccatccctgcagctggaccccgctcagatctacagagtgacttggttcatctcttggagcccttgcttttcatggggatgtgctggcgaggtgagggccttccttcaggaaaacacacacgtgagactgaggatttttgctgccagaatctacgattatgacccactgtacaaggaagctctgcagatgctgagggatgcaggcgctcaggtgagcattatgacctatgacgaattcaagcactgctgggatacttttgtggaccatcagggttgtccttttcagccatgggatgggctggacgagcattctcaggcactgagcggtagactgagggctatcctgcagaaccaggggaattctggatctgaaactccaggaacttctgaatctgctactccagaatctatgtccaagctggagaagtttacaaactgttacagcctctccaaaaccctcaggtttaaagcgatcccggtgggcaagacccaggagaacatcgacaacaagaggctcctggtggaagacgagaagcgcgccgaagactacaagggcgtgaagaagctgctcgataggtactacctcagctttattaacgacgtgctgcacagcatcaaactcaagaatctcaacaactacatctccctcttccgcaaaaagacccgcaccgagaaggagaacaaggagctggagaacctggagatcaacctccgcaaggaaatcgccaaagcgttcaagggcaatgaagggtacaagagcctcttcaagaaagacatcatcgaaactatcctcccagagtttctcgatgacaaggacgagatcgcgctggtgaactcctttaacgggttcacaaccgcgtttaccggcttctttgataacagggaaaatatgttctccgaggaggccaagtccaccagcatcgccttcaggtgtatcaacgagaacctcacccgctacatttccaatatggacattttcgagaaggtggatgcgatcttcgataagcacgaggtgcaggagatcaaagagaagattctcaattccgattatgacgtcgaggatttcttcgaaggggagttctttaattttgtgctcacacaagagggcattgacgtgtacaacgcgattatcgggggcttcgtcacagagtccggggagaagattaaggggctgaatgagtacatcaatctgtacaatcagaagaccaagcagaaactgccgaaattcaagccgctctacaagcaagtcctgtccgatagggaaagcctctccttctacggcgagggatccagcggcgagaaccagaccacccagaagggacagaagaacagccgcgagagaatgaagcggatcgaagagggcatcaaagagctgggcagccagatcctgaaagaacaccccgtggaaaacacccagctgcagaacgagaagctgtacctgtactacctgcagaatgggcgggatatgtacgtggaccaggaactggacatcaaccggctgtccgactacgatgtggaccatatcgtgcctcagagctttctgaaggacgactccatcgacaacaaggtgctgaccagaagcgacaagaaccggggcaagagcgacaacgtgccctccgaagaggtcgtgaagaagatgaagaactactggcggcagctgctgaacgccaagctgattacccagagaaagttcgacaatctgaccaaggccgagagaggcggcctgagcggctataccagcgacgaggaggtgctggaagtcttccgcaacacactgaataagaatagcgagattttctcctccatcaagaagctcgagaagctctttaagaactttgacgagtacagctccgccgggattttcgtgaagaacgggccggcgatcagcaccatctccaaggacatctttggcgagtggaacgtcatcagggacaagtggaacgccgagtacgacgacatccacctgaagaagaaggcggtggtgaccgagaagtatgaggacgatcgcaggaagtccttcaaaaaaatcggctccttcagcctcgaacagctccaggagtatgccgatgcggatctgtccgtcgtcgagaagctgaaggaaatcatcattcagaaggtcgacgagatctataaagtgtacgggtccagcgagaagctgttcgacgccgactttgtgctcgagaagtccctcaaaaagaatgacgccgtggtggccattatgaaagacctgctcgactccgtgaagtccttcgaaaattacattaaagcgttctttggggaggggaaggaaactaacagggatgagtccttctatggcgactttgtcctcgcgtacgacatcctgctgaaggtcgaccacatttacgacgcgatccgcaactacgtgacacagaagccgtactccaaagacaagttcaagctgtacttccagaacccgcaatttatggggggctgggacaaggataaagagacagactaccgcgcgacaattctccgctatggctccaaatactatctggccatcatggacaagaagtacgcgaagtgcctgcagaagatcgacaaagacgacgtcaatggcaactatgaaaagatcaactacaagctgctgccgggcccgaacaagatgctcccgaaggtgttcttcagcaagaagtggatggcctactacaatccaagcgaggatattcagaaaatctataaaaacgggaccttcaagaagggggacatgtttaacctcaacgactgccacaagctcattgatttcttcaaggatagcatttcccgctacccgaaatggtccaatgcgtacgattttaacttctccgagacagaaaagtacaaagacatcgcgggcttttacagggaggtggaggagcaagggtataaagtttcttttgaatccgcgagcaagaaggaagtcgacaagctcgtcgaggagggcaagctctacatgttccaaatttataacaaggacttttccgacaagagccatgggaccccaaacctccacaccatgtacttcaaactgctctttgacgagaacaaccacgggcaaatcaggctgagcggcggcgccgaattattcatgcgcagggcctccctcaagaaggaggagctggtcgtccatccagccaattccccgatcgcgaacaagaacccggacaatccgaaaaagaccaccaccctgtcctacgacgtctacaaggacaaacgcttcagcgaagaccagtacgaattacacatcccaattgcgattaataagtgcccaaagaatatcttcaaaattaatacagaggtcagggtgctgctcaaacacgacgacaatccgtatgtcatcggcattgccaggggcgagcgcaatctgctctatatcgtggtcgtggatgggaagggcaatattgtggagcagtactccctgaacgagattatcaacaacttcaatgggattaggattaagaccgactatcacagcctgctcgacaagaaagaaaaagagaggtttgaggcccgccaaaactggacctccattgagaatatcaaagaattaaaggccggctatatttcccaagtcgtccacaagatctgcgagctggtggagaaatatgacgccgtgattgcgctcgaagacttaaattctgggttcaagaactcccgcgtgaaggtggaaaaacaggtgtatcagaaattcgagaaaatgctgatcgacaaactcaattatatggtggataagaagtccaacccgtgtgccacagggggcgcgctgaagggctatcagatcaccaacaagttcgagagcttcaagagcatgagcacccagaacgggtttattttctacatcccggcgtggctcacctccaagattgacccgagcaccggcttcgtgaacctcctgaagacaaagtatacctccattgccgacagcaagaagtttatctcctccttcgaccgcattatgtatgtgccggaggaggacctcttcgagttcgccctcgactacaaaaacttcagccgcacagatgcggattacatcaagaagtggaagctgtactcctacgggaacaggatccgcatcttcaggaatccaaaaaaaaataacgtctttgactgggaggaagtgtgcctgacatccgcctacaaggaactgttcaataaatacggcatcaattaccagcagggcgacattcgcgccctcctctgtgagcagtccgacaaagcgttttactccagcttcatggccctcatgtccctgatgctccaaatgaggaatagcatcacagggcgcaccgacgtcgacttcctcatcagcccggtgaagaactccgacgggatcttttacgactcccgcaactatgaggcgcaagagaatgcgatcctcccgaagaacgccgatgcgaacggggcctataatatcgccaggaaagtgctctgggccatcgggcagttcaaaaaggcggaggatgagaagctcgacaaggtgaaaattgccatttccaacaaggagtggctggagtacgcgcagacctccgtgaagcacggatctcccaagaagaagaggaaagtctctggaggatctaccaacctcagcgacattatcgagaaggaaaccggcaagcaactcgtgatccaggagagcatactgatgctccccgaggaggtcgaggaggtgattggcaataagcccgagtccgatatactggttcatactgcgtatgacgaaagcacagacgagaacgtcatgctacttaccagcgacgccccggagtacaagccctgggccctagtcatccaagacagcaacggtgagaacaagatcaagatgctt

SEQ ID NO: 440 - DNA, 5209 bp, synthetic construct
  source 1..5209: mol_type = other DNA
gaggcctcccccgcatcaggacctagacacctgatggatccccatattttcacatctaacttcaacaacggaatcggcagacacaagacctacctgtgctatgaggtggaaaggctggataacggaacctctgtgaagatggaccagcacaggtaagtatcaaggttacaagacaggtttaaggagaccaatagaaactgggcttgtcgagacagagaagactcttgcgtttctgataggcacctattggtcttactgacatccactttgcctttctctccacaggggcttcctgcataaccaggccaagaatctgctgtgcggtttctacgggagacatgcagaactgaggtttctggatctggtgccatccctgcagctggaccccgctcagatctacagagtgacttggttcatctcttggagcccttgcttttcatggggatgtgctggcgaggtgagggccttccttcaggaaaacacacacgtgagactgaggatttttgctgccagaatctacgattatgacccactgtacaaggaagctctgcagatgctgagggatgcaggcgctcaggtgagcattatgacctatgacgaattcaagcactgctgggatacttttgtggaccatcagggttgtccttttcagccatgggatgggctggacgagcattctcaggcactgagcggtagactgagggctatcctgcagaaccaggggaattctacttctcaatctgatggatcttctgttccagctgatattgatcaatcttctgattctgatcaatcttcttctcaaggacaaccaggatccaagctggagaagtttacaaactgttacagcctctccaaaaccctcaggtttaaagcgatcccggtgggcaagacccaggagaacatcgacaacaagaggctcctggtggaagacgagaagcgcgccgaagactacaagggcgtgaagaagctgctcgataggtactacctcagctttattaacgacgtgctgcacagcatcaaactcaagaatctcaacaactacatctccctcttccgcaaaaagacccgcaccgagaaggagaacaaggagctggagaacctggagatcaacctccgcaaggaaatcgccaaagcgttcaagggcaatgaagggtacaagagcctcttcaagaaagacatcatcgaaactatcctcccagagtttctcgatgacaaggacgagatcgcgctggtgaactcctttaacgggttcacaaccgcgtttaccggcttctttgataacagggaaaatatgttctccgaggaggccaagtccaccagcatcgccttcaggtgtatcaacgagaacctcacccgctacatttccaatatggacattttcgagaaggtggatgcgatcttcgataagcacgaggtgcaggagatcaaagagaagattctcaattccgattatgacgtcgaggatttcttcgaaggggagttctttaattttgtgctcacacaagagggcattgacgtgtacaacgcgattatcgggggcttcgtcacagagtccggggagaagattaaggggctgaatgagtacatcaatctgtacaatcagaagaccaagcagaaactgccgaaattcaagccgctctacaagcaagtcctgtccgatagggaaagcctctccttctacggcgagaaccagaccacccagaagggacagaagaacagccgcgagagaatgaagcggatcgaagagggcatcaaagagctgggcagccagatcctgaaagaacaccccgtggaaaacacccagctgcagaacgagaagctgtacctgtactacctgcagaatgggcgggatatgtacgtggaccaggaactggacatcaaccggctgtccgactacgatgtggaccatatcgtgcctcagagctttctgaaggacgactccatcgacaacaaggtgctgaccagaagcgacaagaaccggggcaagagcgacaacgtgccctccgaagaggtcgtgaagaagatgaagaactactggcggcagctgctgaacgccaagctgattacccagagaaagttcgacaatctgaccaaggccgagagaggcggcctgagcgagggctataccagcgacgaggaggtgctggaagtcttccgcaacacactgaataagaatagcgagattttctcctccatcaagaagctcgagaagctctttaagaactttgacgagtacagctccgccgggattttcgtgaagaacgggccggcgatcagcaccatctccaaggacatctttggcgagtggaacgtcatcagggacaagtggaacgccgagtacgacgacatccacctgaagaagaaggcggtggtgaccgagaagtatgaggacgatcgcaggaagtccttcaaaaaaatcggctccttcagcctcgaacagctccaggagtatgccgatgcggatctgtccgtcgtcgagaagctgaaggaaatcatcattcagaaggtcgacgagatctataaagtgtacgggtccagcgagaagctgttcgacgccgactttgtgctcgagaagtccctcaaaaagaatgacgccgtggtggccattatgaaagacctgctcgactccgtgaagtccttcgaaaattacattaaagcgttctttggggaggggaaggaaactaacagggatgagtccttctatggcgactttgtcctcgcgtacgacatcctgctgaaggtcgaccacatttacgacgcgatccgcaactacgtgacacagaagccgtactccaaagacaagttcaagctgtacttccagaacccgcaatttatggggggctgggacaaggataaagagacagactaccgcgcgacaattctccgctatggctccaaatactatctggccatcatggacaagaagtacgcgaagtgcctgcagaagatcgacaaagacgacgtcaatggcaactatgaaaagatcaactacaagctgctgccgggcccgaacaagatgctcccgaaggtgttcttcagcaagaagtggatggcctactacaatccaagcgaggatattcagaaaatctataaaaacgggaccttcaagaagggggacatgtttaacctcaacgactgccacaagctcattgatttcttcaaggatagcatttcccgctacccgaaatggtccaatgcgtacgattttaacttctccgagacagaaaagtacaaagacatcgcgggcttttacagggaggtggaggagcaagggtataaagtttcttttgaatccgcgagcaagaaggaagtcgacaagctcgtcgaggagggcaagctctacatgttccaaatttataacaaggacttttccgacaagagccatgggaccccaaacctccacaccatgtacttcaaactgctctttgacgagaacaaccacgggcaaatcaggctgagcggcggcgccgaattattcatgcgcagggcctccctcaagaaggaggagctggtcgtccatccagccaattccccgatcgcgaacaagaacccggacaatccgaaaaagaccaccaccctgtcctacgacgtctacaaggacaaacgcttcagcgaagaccagtacgaattacacatcccaattgcgattaataagtgcccaaagaatatcttcaaaattaatacagaggtcagggtgctgctcaaacacgacgacaatccgtatgtcatcggcattgccaggggcgagcgcaatctgctctatatcgtggtcgtggatgggaagggcaatattgtggagcagtactccctgaacgagattatcaacaacttcaatgggattaggattaagaccgactatcacagcctgctcgacaagaaagaaaaagagaggtttgaggcccgccaaaactggacctccattgagaatatcaaagaattaaaggccggctatatttcccaagtcgtccacaagatctgcgagctggtggagaaatatgacgccgtgattgcgctcgaagacttaaattctgggttcaagaactcccgcgtgaaggtggaaaaacaggtgtatcagaaattcgagaaaatgctgatcgacaaactcaattatatggtggataagaagtccaacccgtgtgccacagggggcgcgctgaagggctatcagatcaccaacaagttcgagagcttcaagagcatgagcacccagaacgggtttattttctacatcccggcgtggctcacctccaagattgacccgagcaccggcttcgtgaacctcctgaagacaaagtatacctccattgccgacagcaagaagtttatctcctccttcgaccgcattatgtatgtgccggaggaggacctcttcgagttcgccctcgactacaaaaacttcagccgcacagatgcggattacatcaagaagtggaagctgtactcctacgggaacaggatccgcatcttcaggaatccaaaaaaaaataacgtctttgactgggaggaagtgtgcctgacatccgcctacaaggaactgttcaataaatacggcatcaattaccagcagggcgacattcgcgccctcctctgtgagcagtccgacaaagcgttttactccagcttcatggccctcatgtccctgatgctccaaatgaggaatagcatcacagggcgcaccgacgtcgacttcctcatcagcccggtgaagaactccgacgggatcttttacgactcccgcaactatgaggcgcaagagaatgcgatcctcccgaagaacgccgatgcgaacggggcctataatatcgccaggaaagtgctctgggccatcgggcagttcaaaaaggcggaggatgagaagctcgacaaggtgaaaattgccatttccaacaaggagtggctggagtacgcgcagacctccgtgaagcactcaggcggaagtggtggaagtggcggtagtaccaacctcagcgacattatcgagaaggaaaccggcaagcaactcgtgatccaggagagcatactgatgctccccgaggaggtcgaggaggtgattggcaataagcccgagtccgatatactggttcatactgcgtatgacgaaagcacagacgagaacgtcatgctacttaccagcgacgccccggagtacaagccctgggccctagtcatccaagacagcaacggtgagaacaagatcaagatgctt

SEQ ID NO: 441 - DNA, 5182 bp, synthetic construct
  source 1..5182: mol_type = other DNA
atggaggcctcccccgcatcaggacctagacacctgatggatccccatattttcacatctaacttcaacaacggaatcggcagacacaagacctacctgtgctatgaggtggaaaggctggataacggaacctctgtgaagatggaccagcacaggtaagtatcaaggttacaagacaggtttaaggagaccaatagaaactgggcttgtcgagacagagaagactcttgcgtttctgataggcacctattggtcttactgacatccactttgcctttctctccacaggggcttcctgcataaccaggccaagaatctgctgtgcggtttctacgggagacatgcagaactgaggtttctggatctggtgccatccctgcagctggaccccgctcagatctacagagtgacttggttcatctcttggagcccttgcttttcatggggatgtgctggcgaggtgagggccttccttcaggaaaacacacacgtgagactgaggatttttgctgccagaatctacgattatgacccactgtacaaggaagctctgcagatgctgagggatgcaggcgctcaggtgagcattatgacctatgacgaattcaagcactgctgggatacttttgtggaccatcagggttgtccttttcagccatgggatgggctggacgagcattctcaggcactgagcggtagactgagggctatcctgcagaaccaggggaattctggatctgaaactccaggaacttctgaatctgctactccagaatctatgtccaagctggagaagtttacaaactgttacagcctctccaaaaccctcaggtttaaagcgatcccggtgggcaagacccaggagaacatcgacaacaagaggctcctggtggaagacgagaagcgcgccgaagactacaagggcgtgaagaagctgctcgataggtactacctcagctttattaacgacgtgctgcacagcatcaaactcaagaatctcaacaactacatctccctcttccgcaaaaagacccgcaccgagaaggagaacaaggagctggagaacctggagatcaacctccgcaaggaaatcgccaaagcgttcaagggcaatgaagggtacaagagcctcttcaagaaagacatcatcgaaactatcctcccagagtttctcgatgacaaggacgagatcgcgctggtgaactcctttaacgggttcacaaccgcgtttaccggcttctttgataacagggaaaatatgttctccgaggaggccaagtccaccagcatcgccttcaggtgtatcaacgagaacctcacccgctacatttccaatatggacattttcgagaaggtggatgcgatcttcgataagcacgaggtgcaggagatcaaagagaagattctcaattccgattatgacgtcgaggatttcttcgaaggggagttctttaattttgtgctcacacaagagggcattgacgtgtacaacgcgattatcgggggcttcgtcacagagtccggggagaagattaaggggctgaatgagtacatcaatctgtacaatcagaagaccaagcagaaactgccgaaattcaagccgctctacaagcaagtcctgtccgatagggaaagcctctccttctacggcgagaaccagaccacccagaagggacagaagaacagccgcgagagaatgaagcggatcgaagagggcatcaaagagctgggcagccagatcctgaaagaacaccccgtggaaaacacccagctgcagaacgagaagctgtacctgtactacctgcagaatgggcgggatatgtacgtggaccaggaactggacatcaaccggctgtccgactacgatgtggaccatatcgtgcctcagagctttctgaaggacgactccatcgacaacaaggtgctgaccagaagcgacaagaaccggggcaagagcgacaacgtgccctccgaagaggtcgtgaagaagatgaagaactactggcggcagctgctgaacgccaagctgattacccagagaaagttcgacaatctgaccaaggccgagagaggcggcctgagcgagggctataccagcgacgaggaggtgctggaagtcttccgcaacacactgaataagaatagcgagattttctcctccatcaagaagctcgagaagctctttaagaactttgacgagtacagctccgccgggattttcgtgaagaacgggccggcgatcagcaccatctccaaggacatctttggcgagtggaacgtcatcagggacaagtggaacgccgagtacgacgacatccacctgaagaagaaggcggtggtgaccgagaagtatgaggacgatcgcaggaagtccttcaaaaaaatcggctccttcagcctcgaacagctccaggagtatgccgatgcggatctgtccgtcgtcgagaagctgaaggaaatcatcattcagaaggtcgacgagatctataaagtgtacgggtccagcgagaagctgttcgacgccgactttgtgctcgagaagtccctcaaaaagaatgacgccgtggtggccattatgaaagacctgctcgactccgtgaagtccttcgaaaattacattaaagcgttctttggggaggggaaggaaactaacagggatgagtccttctatggcgactttgtcctcgcgtacgacatcctgctgaaggtcgaccacatttacgacgcgatccgcaactacgtgacacagaagccgtactccaaagacaagttcaagctgtacttccagaacccgcaatttatggggggctgggacaaggataaagagacagactaccgcgcgacaattctccgctatggctccaaatactatctggccatcatggacaagaagtacgcgaagtgcctgcagaagatcgacaaagacgacgtcaatggcaactatgaaaagatcaactacaagctgctgccgggcccgaacaagatgctcccgaaggtgttcttcagcaagaagtggatggcctactacaatccaagcgaggatattcagaaaatctataaaaacgggaccttcaagaagggggacatgtttaacctcaacgactgccacaagctcattgatttcttcaaggatagcatttcccgctacccgaaatggtccaatgcgtacgattttaacttctccgagacagaaaagtacaaagacatcgcgggcttttacagggaggtggaggagcaagggtataaagtttcttttgaatccgcgagcaagaaggaagtcgacaagctcgtcgaggagggcaagctctacatgttccaaatttataacaaggacttttccgacaagagccatgggaccccaaacctccacaccatgtacttcaaactgctctttgacgagaacaaccacgggcaaatcaggctgagcggcggcgccgaattattcatgcgcagggcctccctcaagaaggaggagctggtcgtccatccagccaattccccgatcgcgaacaagaacccggacaatccgaaaaagaccaccaccctgtcctacgacgtctacaaggacaaacgcttcagcgaagaccagtacgaattacacatcccaattgcgattaataagtgcccaaagaatatcttcaaaattaatacagaggtcagggtgctgctcaaacacgacgacaatccgtatgtcatcggcattgccaggggcgagcgcaatctgctctatatcgtggtcgtggatgggaagggcaatattgtggagcagtactccctgaacgagattatcaacaacttcaatgggattaggattaagaccgactatcacagcctgctcgacaagaaagaaaaagagaggtttgaggcccgccaaaactggacctccattgagaatatcaaagaattaaaggccggctatatttcccaagtcgtccacaagatctgcgagctggtggagaaatatgacgccgtgattgcgctcgaagacttaaattctgggttcaagaactcccgcgtgaaggtggaaaaacaggtgtatcagaaattcgagaaaatgctgatcgacaaactcaattatatggtggataagaagtccaacccgtgtgccacagggggcgcgctgaagggctatcagatcaccaacaagttcgagagcttcaagagcatgagcacccagaacgggtttattttctacatcccggcgtggctcacctccaagattgacccgagcaccggcttcgtgaacctcctgaagacaaagtatacctccattgccgacagcaagaagtttatctcctccttcgaccgcattatgtatgtgccggaggaggacctcttcgagttcgccctcgactacaaaaacttcagccgcacagatgcggattacatcaagaagtggaagctgtactcctacgggaacaggatccgcatcttcaggaatccaaaaaaaaataacgtctttgactgggaggaagtgtgcctgacatccgcctacaaggaactgttcaataaatacggcatcaattaccagcagggcgacattcgcgccctcctctgtgagcagtccgacaaagcgttttactccagcttcatggccctcatgtccctgatgctccaaatgaggaatagcatcacagggcgcaccgacgtcgacttcctcatcagcccggtgaagaactccgacgggatcttttacgactcccgcaactatgaggcgcaagagaatgcgatcctcccgaagaacgccgatgcgaacggggcctataatatcgccaggaaagtgctctgggccatcgggcagttcaaaaaggcggaggatgagaagctcgacaaggtgaaaattgccatttccaacaaggagtggctggagtacgcgcagacctccgtgaagcacggatctcccaagaagaagaggaaagtctctggaggatctaccaacctcagcgacattatcgagaaggaaaccggcaagcaactcgtgatccaggagagcatactgatgctccccgaggaggtcgaggaggtgattggcaataagcccgagtccgatatactggttcatactgcgtatgacgaaagcacagacgagaacgtcatgctacttaccagcgacgccccggagtacaagccctgggccctagtcatccaagacagcaacggtgagaacaagatcaagatgctt

SEQ ID NO: 442 - DNA, 9121 bp, synthetic construct
  source 1..9121: mol_type = other DNA
agatatacgcgttgacattgattattgactagttattaatagtaatcaattacggggtcattagttcatagcccatatatggagttccgcgttacataacttacggtaaatggcccgcctggctgaccgcccaacgacccccgcccattgacgtcaataatgacgtatgttcccatagtaacgccaatagggactttccattgacgtcaatgggtggagtatttacggtaaactgcccacttggcagtacatcaagtgtatcatatgccaagtacgccccctattgacgtcaatgacggtaaatggcccgcctggcattatgcccagtacatgaccttatgggactttcctacttggcagtacatctacgtattagtcatcgctattaccatggtgatgcggttttggcagtacatcaatgggcgtggatagcggtttgactcacggggatttccaagtctccaccccattgacgtcaatgggagtttgttttggcaccaaaatcaacgggactttccaaaatgtcgtaacaactccgccccattgacgcaaatgggcggtaggcgtgtacggtgggaggtctatataagcagagctggtttagtgaaccgtcagatccgctagagatccgcggccgctaatacgactcactatagggagagccgccaccatgaaacggacagccgacggaagcgagttcgagtcaccaaagaagaagcggaaagtcgaggcctcccccgcatcaggacctagacacctgatggatccccatattttcacatctaacttcaacaacggaatcggcagacacaagacctacctgtgctatgaggtggaaaggctggataacggaacctctgtgaagatggaccagcacaggtaagtatcaaggttacaagacaggtttaaggagaccaatagaaactgggcttgtcgagacagagaagactcttgcgtttctgataggcacctattggtcttactgacatccactttgcctttctctccacaggggcttcctgcataaccaggccaagaatctgctgtgcggtttctacgggagacatgcagaactgaggtttctggatctggtgccatccctgcagctggaccccgctcagatctacagagtgacttggttcatctcttggagcccttgcttttcatggggatgtgctggcgaggtgagggccttccttcaggaaaacacacacgtgagactgaggatttttgctgccagaatctacgattatgacccactgtacaaggaagctctgcagatgctgagggatgcaggcgctcaggtgagcattatgacctatgacgaattcaagcactgctgggatacttttgtggaccatcagggttgtccttttcagccatgggatgggctggacgagcattctcaggcactgagcggtagactgagggctatcctgcagaaccaggggaattctggtggttcttctggtggttctagcggcagcgagactcccgggacctcagagtccgccacacccgaaagttctggtggttcttctggtggttcttccaagctggagaagtttacaaactgttacagcctctccaaaaccctcaggtttaaagcgatcccggtgggcaagacccaggagaacatcgacaacaagaggctcctggtggaagacgagaagcgcgccgaagactacaagggcgtgaagaagctgctcgataggtactacctcagctttattaacgacgtgctgcacagcatcaaactcaagaatctcaacaactacatctccctcttccgcaaaaagacccgcaccgagaaggagaacaaggagctggagaacctggagatcaacctccgcaaggaaatcgccaaagcgttcaagggcaatgaagggtacaagagcctcttcaagaaagacatcatcgaaactatcctcccagagtttctcgatgacaaggacgagatcgcgctggtgaactcctttaacgggttcacaaccgcgtttaccggcttctttgataacagggaaaatatgttctccgaggaggccaagtccaccagcatcgccttcaggtgtatcaacgagaacctcacccgctacatttccaatatggacattttcgagaaggtggatgcgatcttcgataagcacgaggtgcaggagatcaaagagaagattctcaattccgattatgacgtcgaggatttcttcgaaggggagttctttaattttgtgctcacacaagagggcattgacgtgtacaacgcgattatcgggggcttcgtcacagagtccggggagaagattaaggggctgaatgagtacatcaatctgtacaatcagaagaccaagcagaaactgccgaaattcaagccgctctacaagcaagtcctgtccgatagggaaagcctctccttctacggcgagggctataccagcgacgaggaggtgctggaagtcttccgcaacacactgaataagaatagcgagattttctcctccatcaagaagctcgagaagctctttaagaactttgacgagtacagctccgccgggattttcgtgaagaacgggccggcgatcagcaccatctccaaggacatctttggcgagtggaacgtcatcagggacaagtggaacgccgagtacgacgacatccacctgaagaagaaggcggtggtgaccgagaagtatgaggacgatcgcaggaagtccttcaaaaaaatcggctccttcagcctcgaacagctccaggagtatgccgatgcggatctgtccgtcgtcgagaagctgaaggaaatcatcattcagaaggtcgacgagatctataaagtgtacgggtccagcgagaagctgttcgacgccgactttgtgctcgagaagtccctcaaaaagaatgacgccgtggtggccattatgaaagacctgctcgactccgtgaagtccttcgaaaattacattaaagcgttctttggggaggggaaggaaactaacagggatgagtccttctatggcgactttgtcctcgcgtacgacatcctgctgaaggtcgaccacatttacgacgcgatccgcaactacgtgacacagaagccgtactccaaagacaagttcaagctgtacttccagaacccgcaatttatggggggctgggacaaggataaagagacagactaccgcgcgacaattctccgctatggctccaaatactatctggccatcatggacaagaagtacgcgaagtgcctgcagaagatcgacaaagacgacgtcaatggcaactatgaaaagatcaactacaagctgctgccgggcccgaacaagatgctcccgaaggtgttcttcagcaagaagtggatggcctactacaatccaagcgaggatattcagaaaatctataaaaacgggaccttcaagaagggggacatgtttaacctcaacgactgccacaagctcattgatttcttcaaggatagcatttcccgctacccgaaatggtccaatgcgtacgattttaacttctccgagacagaaaagtacaaagacatcgcgggcttttacagggaggtggaggagcaagggtataaagtttcttttgaatccgcgagcaagaaggaagtcgacaagctcgtcgaggagggcaagctctacatgttccaaatttataacaaggacttttccgacaagagccatgggaccccaaacctccacaccatgtacttcaaactgctctttgacgagaacaaccacgggcaaatcaggctgagcggcggcgccgaattattcatgcgcagggcctccctcaagaaggaggagctggtcgtccatccagccaattccccgatcgcgaacaagaacccggacaatccgaaaaagaccaccaccctgtcctacgacgtctacaaggacaaacgcttcagcgaagaccagtacgaattacacatcccaattgcgattaataagtgcccaaagaatatcttcaaaattaatacagaggtcagggtgctgctcaaacacgacgacaatccgtatgtcatcggcattgccaggggcgagcgcaatctgctctatatcgtggtcgtggatgggaagggcaatattgtggagcagtactccctgaacgagattatcaacaacttcaatgggattaggattaagaccgactatcacagcctgctcgacaagaaagaaaaagagaggtttgaggcccgccaaaactggacctccattgagaatatcaaagaattaaaggccggctatatttcccaagtcgtccacaagatctgcgagctggtggagaaatatgacgccgtgattgcgctcgaagacttaaattctgggttcaagaactcccgcgtgaaggtggaaaaacaggtgtatcagaaattcgagaaaatgctgatcgacaaactcaattatatggtggataagaagtccaacccgtgtgccacagggggcgcgctgaagggctatcagatcaccaacaagttcgagagcttcaagagcatgagcacccagaacgggtttattttctacatcccggcgtggctcacctccaagattgacccgagcaccggcttcgtgaacctcctgaagacaaagtatacctccattgccgacagcaagaagtttatctcctccttcgaccgcattatgtatgtgccggaggaggacctcttcgagttcgccctcgactacaaaaacttcagccgcacagatgcggattacatcaagaagtggaagctgtactcctacgggaacaggatccgcatcttcaggaatccaaaaaaaaataacgtctttgactgggaggaagtgtgcctgacatccgcctacaaggaactgttcaataaatacggcatcaattaccagcagggcgacattcgcgccctcctctgtgagcagtccgacaaagcgttttactccagcttcatggccctcatgtccctgatgctccaaatgaggaatagcatcacagggcgcaccgacgtcgacttcctcatcagcccggtgaagaactccgacgggatcttttacgactcccgcaactatgaggcgcaagagaatgcgatcctcccgaagaacgccgatgcgaacggggcctataatatcgccaggaaagtgctctgggccatcgggcagttcaaaaaggcggaggatgagaagctcgacaaggtgaaaattgccatttccaacaaggagtggctggagtacgcgcagacctccgtgaagcactcaggcggaagtggtggaagtggcggtagtaccaacctcagcgacattatcgagaaggaaaccggcaagcaactcgtgatccaggagagcatactgatgctccccgaggaggtcgaggaggtgattggcaataagcccgagtccgatatactggttcatactgcgtatgacgaaagcacagacgagaacgtcatgctacttaccagcgacgccccggagtacaagccctgggccctagtcatccaagacagcaacggtgagaacaagatcaagatgctttctggcggctcaaaaagaaccgccgacggcagcgaattcgagcccaagaagaagaggaaagtcggaagcggagctactaacttcagcctgctgaagcaggctggagacgtggaggagaaccctggacctatggtgagcaagggcgaggagctgttcaccggggtggtgcccatcctggtcgagctggacggcgacgtaaacggccacaagttcagcgtgtccggcgagggcgagggcgatgccacctacggcaagctgaccctgaagttcatctgcaccaccggcaagctgcccgtgccctggcccaccctcgtgaccaccctgacctatggagtgcagtgcttcagccgctaccccgaccacatgaagcagcacgacttcttcaagtccgccatgcccgaaggctacgtccaggagcgcaccatcttcttcaaggacgacggcaactacaagacccgcgccgaggtgaagttcgagggcgacaccctggtgaaccgcatcgagctgaagggcatcgacttcaaggaggacggcaacatcctggggcacaagctggagtacaactacaacagccacaacgtctatatcatggccgacaagcagaagaacggcatcaaggtgaacttcaagatccgccacaacatcgaggacggcagcgtgcagctcgccgaccactaccagcagaacacccccatcggcgacggccccgtgctgctgcccgacaaccactacctgagcacccagtccgccctgagcaaagaccccaacgagaagcgcgatcacatggtcctgctggagttcgtgaccgccgccgggatcactctcggcatggacgagctgtacaagtctggtggttctcccaagaagaagaggaaagtctaaccggtcatcatcaccatcaccattgagtttaaacccgctgatcagcctcgactgtgccttctagttgccagccatctgttgtttgcccctcccccgtgccttccttgaccctggaaggtgccactcccactgtcctttcctaataaaatgaggaaattgcatcgcattgtctgagtaggtgtcattctattctggggggtggggtggggcaggacagcaagggggaggattgggaagacaatagcaggcatgctggggatgcggtgggctctatggcttctgaggcgaaaagaaccagctggggctcgataccgtcgacctctagctagagcttggcgtaatcatggtcatagctgtttcctgtgtgaaattgttatccgctcacaattccacacaacatacgagccggaagcataaagtgtaaagcctagggtgcctaatgagtgagctaactcacattaattgcgttgcgctcactgcccgctttccagtcgggaaacctgtcgtgccagctgcattaatgaatcggccaacgcgcgggaagaggcggtttgcgtattgggcgctcttccgcttcctcgctcactgactcgctgcgctcggtcgttcggctgcggcgagcggtatcagctcactcaaaggcggtaatacggttatccacagaatcaggggataacgcaggaaagaacatgtgagcaaaaggccagcaaaaggccaggaaccgtaaaaaggccgcgttgctggcgtttttccataggctccgcccccctgacgagcatcacaaaaatcgacgctcaagtcagaggtggcgaaacccgacaggactataaagataccaggcgtttccccctggaagctccctcgtgcgctctcctgttccgaccctgccgcttaccggatacctgtccgcctttctcccttcgggaagcgtggcgctttctcatagctcacgctgtaggtatctcagttcggtgtaggtcgttcgctccaagctgggctgtgtgcacgaaccccccgttcagcccgaccgctgcgccttatccggtaactatcgtcttgagtccaacccggtaagacacgacttatcgccactggcagcagccactggtaacaggattagcagagcgaggtatgtaggcggtgctacagagttcttgaagtggtggcctaactacggctacactagaagaacagtatttggtatctgcgctctgctgaagccagttaccttcggaaaaagagttggtagctcttgatccggcaaacaaaccaccgctggtagcggtggtttttttgtttgcaagcagcagattacgcgcagaaaaaaaggatctcaagaagatcctttgatcttttctacggggtctgacactcagtggaacgaaaactcacgttaagggattttggtcatgagattatcaaaaaggatcttcacctagatccttttaaattaaaaatgaagttttaaatcaatctaaagtatatatgagtaaacttggtctgacagttaccaatgcttaatcagtgaggcacctatctcagcgatctgtctatttcgttcatccatagttgcctgactccccgtcgtgtagataactacgatacgggagggcttaccatctggccccagtgctgcaatgataccgcgagacccacgctcaccggctccagatttatcagcaataaaccagccagccggaagggccgagcgcagaagtggtcctgcaactttatccgcctccatccagtctattaattgttgccgggaagctagagtaagtagttcgccagttaatagtttgcgcaacgttgttgccattgctacaggcatcgtggtgtcacgctcgtcgtttggtatggcttcattcagctccggttcccaacgatcaaggcgagttacatgatcccccatgttgtgcaaaaaagcggttagctccttcggtcctccgatcgttgtcagaagtaagttggccgcagtgttatcactcatggttatggcagcactgcataattctcttactgtcatgccatccgtaagatgcttttctgtgactggtgagtactcaaccaagtcattctgagaatagtgtatgcggcgaccgagttgctcttgcccggcgtcaatacgggataataccgcgccacatagcagaactttaaaagtgctcatcattggaaaacgttcttcggggcgaaaactctcaaggatcttaccgctgttgagatccagttcgatgtaacccactcgtgcacccaactgatcttcagcatcttttactttcaccagcgtttctgggtgagcaaaaacaggaaggcaaaatgccgcaaaaaagggaataagggcgacacggaaatgttgaatactcatactcttcctttttcaatattattgaagcatttatcagggttattgtctcatgagcggatacatatttgaatgtatttagaaaaataaacaaataggggttccgcgcacatttccccgaaaagtgccacctgacgtcgacggatcgggagatcgatctcccgatcccctagggtcgactctcagtacaatctgctctgatgccgcatagttaagccagtatctgctccctgcttgtgtgttggaggtcgctgagtagtgcgcgagcaaaatttaagctacaacaaggcaaggcttgaccgacaattgcatgaagaatctgcttagggttaggcgttttgcgctgcttcgcgatgtacgggcc

SEQ ID NO: 443 - DNA, 9121 bp, synthetic construct
  source 1..9121: mol_type = other DNA
agatatacgcgttgacattgattattgactagttattaatagtaatcaattacggggtcattagttcatagcccatatatggagttccgcgttacataacttacggtaaatggcccgcctggctgaccgcccaacgacccccgcccattgacgtcaataatgacgtatgttcccatagtaacgccaatagggactttccattgacgtcaatgggtggagtatttacggtaaactgcccacttggcagtacatcaagtgtatcatatgccaagtacgccccctattgacgtcaatgacggtaaatggcccgcctggcattatgcccagtacatgaccttatgggactttcctacttggcagtacatctacgtattagtcatcgctattaccatggtgatgcggttttggcagtacatcaatgggcgtggatagcggtttgactcacggggatttccaagtctccaccccattgacgtcaatgggagtttgttttggcaccaaaatcaacgggactttccaaaatgtcgtaacaactccgccccattgacgcaaatgggcggtaggcgtgtacggtgggaggtctatataagcagagctggtttagtgaaccgtcagatccgctagagatccgcggccgctaatacgactcactatagggagagccgccaccatgaaacggacagccgacggaagcgagttcgagtcaccaaagaagaagcggaaagtcaccaacctcagcgacattatcgagaaggaaaccggcaagcaactcgtgatccaggagagcatactgatgctccccgaggaggtcgaggaggtgattggcaataagcccgagtccgatatactggttcatactgcgtatgacgaaagcacagacgagaacgtcatgctacttaccagcgacgccccggagtacaagccctgggccctagtcatccaagacagcaacggtgagaacaagatcaagatgctttcaggcggaagtggtggaagtggcggtagttccaagctggagaagtttacaaactgttacagcctctccaaaaccctcaggtttaaagcgatcccggtgggcaagacccaggagaacatcgacaacaagaggctcctggtggaagacgagaagcgcgccgaagactacaagggcgtgaagaagctgctcgataggtactacctcagctttattaacgacgtgctgcacagcatcaaactcaagaatctcaacaactacatctccctcttccgcaaaaagacccgcaccgagaaggagaacaaggagctggagaacctggagatcaacctccgcaaggaaatcgccaaagcgttcaagggcaatgaagggtacaagagcctcttcaagaaagacatcatcgaaactatcctcccagagtttctcgatgacaaggacgagatcgcgctggtgaactcctttaacgggttcacaaccgcgtttaccggcttctttgataacagggaaaatatgttctccgaggaggccaagtccaccagcatcgccttcaggtgtatcaacgagaacctcacccgctacatttccaatatggacattttcgagaaggtggatgcgatcttcgataagcacgaggtgcaggagatcaaagagaagattctcaattccgattatgacgtcgaggatttcttcgaaggggagttctttaattttgtgctcacacaagagggcattgacgtgtacaacgcgattatcgggggcttcgtcacagagtccggggagaagattaaggggctgaatgagtacatcaatctgtacaatcagaagaccaagcagaaactgccgaaattcaagccgctctacaagcaagtcctgtccgatagggaaagcctctccttctacggcgagggctataccagcgacgaggaggtgctggaagtcttccgcaacacactgaataagaatagcgagattttctcctccatcaagaagctcgagaagctctttaagaactttgacgagtacagctccgccgggattttcgtgaagaacgggccggcgatcagcaccatctccaaggacatctttggcgagtggaacgtcatcagggacaagtggaacgccgagtacgacgacatccacctgaagaagaaggcggtggtgaccgagaagtatgaggacgatcgcaggaagtccttcaaaaaaatcggctccttcagcctcgaacagctccaggagtatgccgatgcggatctgtccgtcgtcgagaagctgaaggaaatcatcattcagaaggtcgacgagatctataaagtgtacgggtccagcgagaagctgttcgacgccgactttgtgctcgagaagtccctcaaaaagaatgacgccgtggtggccattatgaaagacctgctcgactccgtgaagtccttcgaaaattacattaaagcgttctttggggaggggaaggaaactaacagggatgagtccttctatggcgactttgtcctcgcgtacgacatcctgctgaaggtcgaccacatttacgacgcgatccgcaactacgtgacacagaagccgtactccaaagacaagttcaagctgtacttccagaacccgcaatttatggggggctgggacaaggataaagagacagactaccgcgcgacaattctccgctatggctccaaatactatctggccatcatggacaagaagtacgcgaagtgcctgcagaagatcgacaaagacgacgtcaatggcaactatgaaaagatcaactacaagctgctgccgggcccgaacaagatgctcccgaaggtgttcttcagcaagaagtggatggcctactacaatccaagcgaggatattcagaaaatctataaaaacgggaccttcaagaagggggacatgtttaacctcaacgactgccacaagctcattgatttcttcaaggatagcatttcccgctacccgaaatggtccaatgcgtacgattttaacttctccgagacagaaaagtacaaagacatcgcgggcttttacagggaggtggaggagcaagggtataaagtttcttttgaatccgcgagcaagaaggaagtcgacaagctcgtcgaggagggcaagctctacatgttccaaatttataacaaggacttttccgacaagagccatgggaccccaaacctccacaccatgtacttcaaactgctctttgacgagaacaaccacgggcaaatcaggctgagcggcggcgccgaattattcatgcgcagggcctccctcaagaaggaggagctggtcgtccatccagccaattccccgatcgcgaacaagaacccggacaatccgaaaaagaccaccaccctgtcctacgacgtctacaaggacaaacgcttcagcgaagaccagtacgaattacacatcccaattgcgattaataagtgcccaaagaatatcttcaaaattaatacagaggtcagggtgctgctcaaacacgacgacaatccgtatgtcatcggcattgccaggggcgagcgcaatctgctctatatcgtggtcgtggatgggaagggcaatattgtggagcagtactccctgaacgagattatcaacaacttcaatgggattaggattaagaccgactatcacagcctgctcgacaagaaagaaaaagagaggtttgaggcccgccaaaactggacctccattgagaatatcaaagaattaaaggccggctatatttcccaagtcgtccacaagatctgcgagctggtggagaaatatgacgccgtgattgcgctcgaagacttaaattctgggttcaagaactcccgcgtgaaggtggaaaaacaggtgtatcagaaattcgagaaaatgctgatcgacaaactcaattatatggtggataagaagtccaacccgtgtgccacagggggcgcgctgaagggctatcagatcaccaacaagttcgagagcttcaagagcatgagcacccagaacgggtttattttctacatcccggcgtggctcacctccaagattgacccgagcaccggcttcgtgaacctcctgaagacaaagtatacctccattgccgacagcaagaagtttatctcctccttcgaccgcattatgtatgtgccggaggaggacctcttcgagttcgccctcgactacaaaaacttcagccgcacagatgcggattacatcaagaagtggaagctgtactcctacgggaacaggatccgcatcttcaggaatccaaaaaaaaataacgtctttgactgggaggaagtgtgcctgacatccgcctacaaggaactgttcaataaatacggcatcaattaccagcagggcgacattcgcgccctcctctgtgagcagtccgacaaagcgttttactccagcttcatggccctcatgtccctgatgctccaaatgaggaatagcatcacagggcgcaccgacgtcgacttcctcatcagcccggtgaagaactccgacgggatcttttacgactcccgcaactatgaggcgcaagagaatgcgatcctcccgaagaacgccgatgcgaacggggcctataatatcgccaggaaagtgctctgggccatcgggcagttcaaaaaggcggaggatgagaagctcgacaaggtgaaaattgccatttccaacaaggagtggctggagtacgcgcagacctccgtgaagcactctggtggttcttctggtggttctagcggcagcgagactcccgggacctcagagtccgccacacccgaaagttctggtggttcttctggtggttctgaggcctcccccgcatcaggacctagacacctgatggatccccatattttcacatctaacttcaacaacggaatcggcagacacaagacctacctgtgctatgaggtggaaaggctggataacggaacctctgtgaagatggaccagcacaggtaagtatcaaggttacaagacaggtttaaggagaccaatagaaactgggcttgtcgagacagagaagactcttgcgtttctgataggcacctattggtcttactgacatccactttgcctttctctccacaggggcttcctgcataaccaggccaagaatctgctgtgcggtttctacgggagacatgcagaactgaggtttctggatctggtgccatccctgcagctggaccccgctcagatctacagagtgacttggttcatctcttggagcccttgcttttcatggggatgtgctggcgaggtgagggccttccttcaggaaaacacacacgtgagactgaggatttttgctgccagaatctacgattatgacccactgtacaaggaagctctgcagatgctgagggatgcaggcgctcaggtgagcattatgacctatgacgaattcaagcactgctgggatacttttgtggaccatcagggttgtccttttcagccatgggatgggctggacgagcattctcaggcactgagcggtagactgagggctatcctgcagaaccaggggaattctggcggctcaaaaagaaccgccgacggcagcgaattcgagcccaagaagaagaggaaagtcggaagcggagctactaacttcagcctgctgaagcaggctggagacgtggaggagaaccctggacctatggtgagcaagggcgaggagctgttcaccggggtggtgcccatcctggtcgagctggacggcgacgtaaacggccacaagttcagcgtgtccggcgagggcgagggcgatgccacctacggcaagctgaccctgaagttcatctgcaccaccggcaagctgcccgtgccctggcccaccctcgtgaccaccctgacctatggagtgcagtgcttcagccgctaccccgaccacatgaagcagcacgacttcttcaagtccgccatgcccgaaggctacgtccaggagcgcaccatcttcttcaaggacgacggcaactacaagacccgcgccgaggtgaagttcgagggcgacaccctggtgaaccgcatcgagctgaagggcatcgacttcaaggaggacggcaacatcctggggcacaagctggagtacaactacaacagccacaacgtctatatcatggccgacaagcagaagaacggcatcaaggtgaacttcaagatccgccacaacatcgaggacggcagcgtgcagctcgccgaccactaccagcagaacacccccatcggcgacggccccgtgctgctgcccgacaaccactacctgagcacccagtccgccctgagcaaagaccccaacgagaagcgcgatcacatggtcctgctggagttcgtgaccgccgccgggatcactctcggcatggacgagctgtacaagtctggtggttctcccaagaagaagaggaaagtctaaccggtcatcatcaccatcaccattgagtttaaacccgctgatcagcctcgactgtgccttctagttgccagccatctgttgtttgcccctcccccgtgccttccttgaccctggaaggtgccactcccactgtcctttcctaataaaatgaggaaattgcatcgcattgtctgagtaggtgtcattctattctggggggtggggtggggcaggacagcaagggggaggattgggaagacaatagcaggcatgctggggatgcggtgggctctatggcttctgaggcgaaaagaaccagctggggctcgataccgtcgacctctagctagagcttggcgtaatcatggtcatagctgtttcctgtgtgaaattgttatccgctcacaattccacacaacatacgagccggaagcataaagtgtaaagcctagggtgcctaatgagtgagctaactcacattaattgcgttgcgctcactgcccgctttccagtcgggaaacctgtcgtgccagctgcattaatgaatcggccaacgcgcgggaagaggcggtttgcgtattgggcgctcttccgcttcctcgctcactgactcgctgcgctcggtcgttcggctgcggcgagcggtatcagctcactcaaaggcggtaatacggttatccacagaatcaggggataacgcaggaaagaacatgtgagcaaaaggccagcaaaaggccaggaaccgtaaaaaggccgcgttgctggcgtttttccataggctccgcccccctgacgagcatcacaaaaatcgacgctcaagtcagaggtggcgaaacccgacaggactataaagataccaggcgtttccccctggaagctccctcgtgcgctctcctgttccgaccctgccgcttaccggatacctgtccgcctttctcccttcgggaagcgtggcgctttctcatagctcacgctgtaggtatctcagttcggtgtaggtcgttcgctccaagctgggctgtgtgcacgaaccccccgttcagcccgaccgctgcgccttatccggtaactatcgtcttgagtccaacccggtaagacacgacttatcgccactggcagcagccactggtaacaggattagcagagcgaggtatgtaggcggtgctacagagttcttgaagtggtggcctaactacggctacactagaagaacagtatttggtatctgcgctctgctgaagccagttaccttcggaaaaagagttggtagctcttgatccggcaaacaaaccaccgctggtagcggtggtttttttgtttgcaagcagcagattacgcgcagaaaaaaaggatctcaagaagatcctttgatcttttctacggggtctgacactcagtggaacgaaaactcacgttaagggattttggtcatgagattatcaaaaaggatcttcacctagatccttttaaattaaaaatgaagttttaaatcaatctaaagtatatatgagtaaacttggtctgacagttaccaatgcttaatcagtgaggcacctatctcagcgatctgtctatttcgttcatccatagttgcctgactccccgtcgtgtagataactacgatacgggagggcttaccatctggccccagtgctgcaatgataccgcgagacccacgctcaccggctccagatttatcagcaataaaccagccagccggaagggccgagcgcagaagtggtcctgcaactttatccgcctccatccagtctattaattgttgccgggaagctagagtaagtagttcgccagttaatagtttgcgcaacgttgttgccattgctacaggcatcgtggtgtcacgctcgtcgtttggtatggcttcattcagctccggttcccaacgatcaaggcgagttacatgatcccccatgttgtgcaaaaaagcggttagctccttcggtcctccgatcgttgtcagaagtaagttggccgcagtgttatcactcatggttatggcagcactgcataattctcttactgtcatgccatccgtaagatgcttttctgtgactggtgagtactcaaccaagtcattctgagaatagtgtatgcggcgaccgagttgctcttgcccggcgtcaatacgggataataccgcgccacatagcagaactttaaaagtgctcatcattggaaaacgttcttcggggcgaaaactctcaaggatcttaccgctgttgagatccagttcgatgtaacccactcgtgcacccaactgatcttcagcatcttttactttcaccagcgtttctgggtgagcaaaaacaggaaggcaaaatgccgcaaaaaagggaataagggcgacacggaaatgttgaatactcatactcttcctttttcaatattattgaagcatttatcagggttattgtctcatgagcggatacatatttgaatgtatttagaaaaataaacaaataggggttccgcgcacatttccccgaaaagtgccacctgacgtcgacggatcgggagatcgatctcccgatcccctagggtcgactctcagtacaatctgctctgatgccgcatagttaagccagtatctgctccctgcttgtgtgttggaggtcgctgagtagtgcgcgagcaaaatttaagctacaacaaggcaaggcttgaccgacaattgcatgaagaatctgcttagggttaggcgttttgcgctgcttcgcgatgtacgggcc

SEQ ID NO: 444 - DNA, 9115 bp, synthetic construct
  source 1..9115: mol_type = other DNA
agatatacgcgttgacattgattattgactagttattaatagtaatcaattacggggtcattagttcatagcccatatatggagttccgcgttacataacttacggtaaatggcccgcctggctgaccgcccaacgacccccgcccattgacgtcaataatgacgtatgttcccatagtaacgccaatagggactttccattgacgtcaatgggtggagtatttacggtaaactgcccacttggcagtacatcaagtgtatcatatgccaagtacgccccctattgacgtcaatgacggtaaatggcccgcctggcattatgcccagtacatgaccttatgggactttcctacttggcagtacatctacgtattagtcatcgctattaccatggtgatgcggttttggcagtacatcaatgggcgtggatagcggtttgactcacggggatttccaagtctccaccccattgacgtcaatgggagtttgttttggcaccaaaatcaacgggactttccaaaatgtcgtaacaactccgccccattgacgcaaatgggcggtaggcgtgtacggtgggaggtctatataagcagagctggtttagtgaaccgtcagatccgctagagatccgcggccgctaatacgactcactatagggagagccgccaccatgaaacggacagccgacggaagcgagttcgagtcaccaaagaagaagcggaaagtcgaggcctcccccgcatcaggacctagacacctgatggatccccatattttcacatctaacttcaacaacggaatcggcagacacaagacctacctgtgctatgaggtggaaaggctggataacggaacctctgtgaagatggaccagcacaggtaagtatcaaggttacaagacaggtttaaggagaccaatagaaactgggcttgtcgagacagagaagactcttgcgtttctgataggcacctattggtcttactgacatccactttgcctttctctccacaggggcttcctgcataaccaggccaagaatctgctgtgcggtttctacgggagacatgcagaactgaggtttctggatctggtgccatccctgcagctggaccccgctcagatctacagagtgacttggttcatctcttggagcccttgcttttcatggggatgtgctggcgaggtgagggccttccttcaggaaaacacacacgtgagactgaggatttttgctgccagaatctacgattatgacccactgtacaaggaagctctgcagatgctgagggatgcaggcgctcaggtgagcattatgacctatgacgaattcaagcactgctgggatacttttgtggaccatcagggttgtccttttcagccatgggatgggctggacgagcattctcaggcactgagcggtagactgagggctatcctgcagaaccaggggaattctacttctcaatctgatggatcttctgttccagctgatattgatcaatcttctgattctgatcaatcttcttctcaaggacaaccaggatccaagctggagaagtttacaaactgttacagcctctccaaaaccctcaggtttaaagcgatcccggtgggcaagacccaggagaacatcgacaacaagaggctcctggtggaagacgagaagcgcgccgaagactacaagggcgtgaagaagctgctcgataggtactacctcagctttattaacgacgtgctgcacagcatcaaactcaagaatctcaacaactacatctccctcttccgcaaaaagacccgcaccgagaaggagaacaaggagctggagaacctggagatcaacctccgcaaggaaatcgccaaagcgttcaagggcaatgaagggtacaagagcctcttcaagaaagacatcatcgaaactatcctcccagagtttctcgatgacaaggacgagatcgcgctggtgaactcctttaacgggttcacaaccgcgtttaccggcttctttgataacagggaaaatatgttctccgaggaggccaagtccaccagcatcgccttcaggtgtatcaacgagaacctcacccgctacatttccaatatggacattttcgagaaggtggatgcgatcttcgataagcacgaggtgcaggagatcaaagagaagattctcaattccgattatgacgtcgaggatttcttcgaaggggagttctttaattttgtgctcacacaagagggcattgacgtgtacaacgcgattatcgggggcttcgtcacagagtccggggagaagattaaggggctgaatgagtacatcaatctgtacaatcagaagaccaagcagaaactgccgaaattcaagccgctctacaagcaagtcctgtccgatagggaaagcctctccttctacggcgagggctataccagcgacgaggaggtgctggaagtcttccgcaacacactgaataagaatagcgagattttctcctccatcaagaagctcgagaagctctttaagaactttgacgagtacagctccgccgggattttcgtgaagaacgggccggcgatcagcaccatctccaaggacatctttggcgagtggaacgtcatcagggacaagtggaacgccgagtacgacgacatccacctgaagaagaaggcggtggtgaccgagaagtatgaggacgatcgcaggaagtccttcaaaaaaatcggctccttcagcctcgaacagctccaggagtatgccgatgcggatctgtccgtcgtcgagaagctgaaggaaatcatcattcagaaggtcgacgagatctataaagtgtacgggtccagcgagaagctgttcgacgccgactttgtgctcgagaagtccctcaaaaagaatgacgccgtggtggccattatgaaagacctgctcgactccgtgaagtccttcgaaaattacattaaagcgttctttggggaggggaaggaaactaacagggatgagtccttctatggcgactttgtcctcgcgtacgacatcctgctgaaggtcgaccacatttacgacgcgatccgcaactacgtgacacagaagccgtactccaaagacaagttcaagctgtacttccagaacccgcaatttatggggggctgggacaaggataaagagacagactaccgcgcgacaattctccgctatggctccaaatactatctggccatcatggacaagaagtacgcgaagtgcctgcagaagatcgacaaagacgacgtcaatggcaactatgaaaagatcaactacaagctgctgccgggcccgaacaagatgctcccgaaggtgttcttcagcaagaagtggatggcctactacaatccaagcgaggatattcagaaaatctataaaaacgggaccttcaagaagggggacatgtttaacctcaacgactgccacaagctcattgatttcttcaaggatagcatttcccgctacccgaaatggtccaatgcgtacgattttaacttctccgagacagaaaagtacaaagacatcgcgggcttttacagggaggtggaggagcaagggtataaagtttcttttgaatccgcgagcaagaaggaagtcgacaagctcgtcgaggagggcaagctctacatgttccaaatttataacaaggacttttccgacaagagccatgggaccccaaacctccacaccatgtacttcaaactgctctttgacgagaacaaccacgggcaaatcaggctgagcggcggcgccgaattattcatgcgcagggcctccctcaagaaggaggagctggtcgtccatccagccaattccccgatcgcgaacaagaacccggacaatccgaaaaagaccaccaccctgtcctacgacgtctacaaggacaaacgcttcagcgaagaccagtacgaattacacatcccaattgcgattaataagtgcccaaagaatatcttcaaaattaatacagaggtcagggtgctgctcaaacacgacgacaatccgtatgtcatcggcattgccaggggcgagcgcaatctgctctatatcgtggtcgtggatgggaagggcaatattgtggagcagtactccctgaacgagattatcaacaacttcaatgggattaggattaagaccgactatcacagcctgctcgacaagaaagaaaaagagaggtttgaggcccgccaaaactggacctccattgagaatatcaaagaattaaaggccggctatatttcccaagtcgtccacaagatctgcgagctggtggagaaatatgacgccgtgattgcgctcgaagacttaaattctgggttcaagaactcccgcgtgaaggtggaaaaacaggtgtatcagaaattcgagaaaatgctgatcgacaaactcaattatatggtggataagaagtccaacccgtgtgccacagggggcgcgctgaagggctatcagatcaccaacaagttcgagagcttcaagagcatgagcacccagaacgggtttattttctacatcccggcgtggctcacctccaagattgacccgagcaccggcttcgtgaacctcctgaagacaaagtatacctccattgccgacagcaagaagtttatctcctccttcgaccgcattatgtatgtgccggaggaggacctcttcgagttcgccctcgactacaaaaacttcagccgcacagatgcggattacatcaagaagtggaagctgtactcctacgggaacaggatccgcatcttcaggaatccaaaaaaaaataacgtctttgactgggaggaagtgtgcctgacatccgcctacaaggaactgttcaataaatacggcatcaattaccagcagggcgacattcgcgccctcctctgtgagcagtccgacaaagcgttttactccagcttcatggccctcatgtccctgatgctccaaatgaggaatagcatcacagggcgcaccgacgtcgacttcctcatcagcccggtgaagaactccgacgggatcttttacgactcccgcaactatgaggcgcaagagaatgcgatcctcccgaagaacgccgatgcgaacggggcctataatatcgccaggaaagtgctctgggccatcgggcagttcaaaaaggcggaggatgagaagctcgacaaggtgaaaattgccatttccaacaaggagtggctggagtacgcgcagacctccgtgaagcactcaggcggaagtggtggaagtggcggtagtaccaacctcagcgacattatcgagaaggaaaccggcaagcaactcgtgatccaggagagcatactgatgctccccgaggaggtcgaggaggtgattggcaataagcccgagtccgatatactggttcatactgcgtatgacgaaagcacagacgagaacgtcatgctacttaccagcgacgccccggagtacaagccctgggccctagtcatccaagacagcaacggtgagaacaagatcaagatgctttctggcggctcaaaaagaaccgccgacggcagcgaattcgagcccaagaagaagaggaaagtcggaagcggagctactaacttcagcctgctgaagcaggctggagacgtggaggagaaccctggacctatggtgagcaagggcgaggagctgttcaccggggtggtgcccatcctggtcgagctggacggcgacgtaaacggccacaagttcagcgtgtccggcgagggcgagggcgatgccacctacggcaagctgaccctgaagttcatctgcaccaccggcaagctgcccgtgccctggcccaccctcgtgaccaccctgacctatggagtgcagtgcttcagccgctaccccgaccacatgaagcagcacgacttcttcaagtccgccatgcccgaaggctacgtccaggagcgcaccatcttcttcaaggacgacggcaactacaagacccgcgccgaggtgaagttcgagggcgacaccctggtgaaccgcatcgagctgaagggcatcgacttcaaggaggacggcaacatcctggggcacaagctggagtacaactacaacagccacaacgtctatatcatggccgacaagcagaagaacggcatcaaggtgaacttcaagatccgccacaacatcgaggacggcagcgtgcagctcgccgaccactaccagcagaacacccccatcggcgacggccccgtgctgctgcccgacaaccactacctgagcacccagtccgccctgagcaaagaccccaacgagaagcgcgatcacatggtcctgctggagttcgtgaccgccgccgggatcactctcggcatggacgagctgtacaagtctggtggttctcccaagaagaagaggaaagtctaaccggtcatcatcaccatcaccattgagtttaaacccgctgatcagcctcgactgtgccttctagttgccagccatctgttgtttgcccctcccccgtgccttccttgaccctggaaggtgccactcccactgtcctttcctaataaaatgaggaaattgcatcgcattgtctgagtaggtgtcattctattctggggggtggggtggggcaggacagcaagggggaggattgggaagacaatagcaggcatgctggggatgcggtgggctctatggcttctgaggcgaaaagaaccagctggggctcgataccgtcgacctctagctagagcttggcgtaatcatggtcatagctgtttcctgtgtgaaattgttatccgctcacaattccacacaacatacgagccggaagcataaagtgtaaagcctagggtgcctaatgagtgagctaactcacattaattgcgttgcgctcactgcccgctttccagtcgggaaacctgtcgtgccagctgcattaatgaatcggccaacgcgcgggaagaggcggtttgcgtattgggcgctcttccgcttcctcgctcactgactcgctgcgctcggtcgttcggctgcggcgagcggtatcagctcactcaaaggcggtaatacggttatccacagaatcaggggataacgcaggaaagaacatgtgagcaaaaggccagcaaaaggccaggaaccgtaaaaaggccgcgttgctggcgtttttccataggctccgcccccctgacgagcatcacaaaaatcgacgctcaagtcagaggtggcgaaacccgacaggactataaagataccaggcgtttccccctggaagctccctcgtgcgctctcctgttccgaccctgccgcttaccggatacctgtccgcctttctcccttcgggaagcgtggcgctttctcatagctcacgctgtaggtatctcagttcggtgtaggtcgttcgctccaagctgggctgtgtgcacgaaccccccgttcagcccgaccgctgcgccttatccggtaactatcgtcttgagtccaacccggtaagacacgacttatcgccactggcagcagccactggtaacaggattagcagagcgaggtatgtaggcggtgctacagagttcttgaagtggtggcctaactacggctacactagaagaacagtatttggtatctgcgctctgctgaagccagttaccttcggaaaaagagttggtagctcttgatccggcaaacaaaccaccgctggtagcggtggtttttttgtttgcaagcagcagattacgcgcagaaaaaaaggatctcaagaagatcctttgatcttttctacggggtctgacactcagtggaacgaaaactcacgttaagggattttggtcatgagattatcaaaaaggatcttcacctagatccttttaaattaaaaatgaagttttaaatcaatctaaagtatatatgagtaaacttggtctgacagttaccaatgcttaatcagtgaggcacctatctcagcgatctgtctatttcgttcatccatagttgcctgactccccgtcgtgtagataactacgatacgggagggcttaccatctggccccagtgctgcaatgataccgcgagacccacgctcaccggctccagatttatcagcaataaaccagccagccggaagggccgagcgcagaagtggtcctgcaactttatccgcctccatccagtctattaattgttgccgggaagctagagtaagtagttcgccagttaatagtttgcgcaacgttgttgccattgctacaggcatcgtggtgtcacgctcgtcgtttggtatggcttcattcagctccggttcccaacgatcaaggcgagttacatgatcccccatgttgtgcaaaaaagcggttagctccttcggtcctccgatcgttgtcagaagtaagttggccgcagtgttatcactcatggttatggcagcactgcataattctcttactgtcatgccatccgtaagatgcttttctgtgactggtgagtactcaaccaagtcattctgagaatagtgtatgcggcgaccgagttgctcttgcccggcgtcaatacgggataataccgcgccacatagcagaactttaaaagtgctcatcattggaaaacgttcttcggggcgaaaactctcaaggatcttaccgctgttgagatccagttcgatgtaacccactcgtgcacccaactgatcttcagcatcttttactttcaccagcgtttctgggtgagcaaaaacaggaaggcaaaatgccgcaaaaaagggaataagggcgacacggaaatgttgaatactcatactcttcctttttcaatattattgaagcatttatcagggttattgtctcatgagcggatacatatttgaatgtatttagaaaaataaacaaataggggttccgcgcacatttccccgaaaagtgccacctgacgtcgacggatcgggagatcgatctcccgatcccctagggtcgactctcagtacaatctgctctgatgccgcatagttaagccagtatctgctccctgcttgtgtgttggaggtcgctgagtagtgcgcgagcaaaatttaagctacaacaaggcaaggcttgaccgacaattgcatgaagaatctgcttagggttaggcgttttgcgctgcttcgcgatgtacgggcc

SEQ ID NO: 445 - DNA, 9100 bp, synthetic construct
  source 1..9100: mol_type = other DNA
tttccataggctccgcccccctgacgagcatcacaaaaatcgacgctcaagtcagaggtggcgaaacccgacaggactataaagataccaggcgtttccccctggaagctccctcgtgcgctctcctgttccgaccctgccgcttaccggatacctgtccgcctttctcccttcgggaagcgtggcgctttctcatagctcacgctgtaggtatctcagttcggtgtaggtcgttcgctccaagctgggctgtgtgcacgaaccccccgttcagcccgaccgctgcgccttatccggtaactatcgtcttgagtccaacccggtaagacacgacttatcgccactggcagcagccactggtaacaggattagcagagcgaggtatgtaggcggtgctacagagttcttgaagtggtggcctaactacggctacactagaagaacagtatttggtatctgcgctctgctgaagccagttaccttcggaaaaagagttggtagctcttgatccggcaaacaaaccaccgctggtagcggtggtttttttgtttgcaagcagcagattacgcgcagaaaaaaaggatctcaagaagatcctttgatcttttctacggggtctgacactcagtggaacgaaaactcacgttaagggattttggtcatgagattatcaaaaaggatcttcacctagatccttttaaattaaaaatgaagttttaaatcaatctaaagtatatatgagtaaacttggtctgacagttaccaatgcttaatcagtgaggcacctatctcagcgatctgtctatttcgttcatccatagttgcctgactccccgtcgtgtagataactacgatacgggagggcttaccatctggccccagtgctgcaatgataccgcgagacccacgctcaccggctccagatttatcagcaataaaccagccagccggaagggccgagcgcagaagtggtcctgcaactttatccgcctccatccagtctattaattgttgccgggaagctagagtaagtagttcgccagttaatagtttgcgcaacgttgttgccattgctacaggcatcgtggtgtcacgctcgtcgtttggtatggcttcattcagctccggttcccaacgatcaaggcgagttacatgatcccccatgttgtgcaaaaaagcggttagctccttcggtcctccgatcgttgtcagaagtaagttggccgcagtgttatcactcatggttatggcagcactgcataattctcttactgtcatgccatccgtaagatgcttttctgtgactggtgagtactcaaccaagtcattctgagaatagtgtatgcggcgaccgagttgctcttgcccggcgtcaatacgggataataccgcgccacatagcagaactttaaaagtgctcatcattggaaaacgttcttcggggcgaaaactctcaaggatcttaccgctgttgagatccagttcgatgtaacccactcgtgcacccaactgatcttcagcatcttttactttcaccagcgtttctgggtgagcaaaaacaggaaggcaaaatgccgcaaaaaagggaataagggcgacacggaaatgttgaatactcatactcttcctttttcaatattattgaagcatttatcagggttattgtctcatgagcggatacatatttgaatgtatttagaaaaataaacaaataggggttccgcgcacatttccccgaaaagtgccacctgacgtcgacggatcgggagatcgatctcccgatcccctagggtcgactctcagtacaatctgctctgatgccgcatagttaagccagtatctgctccctgcttgtgtgttggaggtcgctgagtagtgcgcgagcaaaatttaagctacaacaaggcaaggcttgaccgacaattgcatgaagaatctgcttagggttaggcgttttgcgctgcttcgcgatgtacgggccagatatacgcgttgacattgattattgactagttattaatagtaatcaattacggggtcattagttcatagcccatatatggagttccgcgttacataacttacggtaaatggcccgcctggctgaccgcccaacgacccccgcccattgacgtcaataatgacgtatgttcccatagtaacgccaatagggactttccattgacgtcaatgggtggagtatttacggtaaactgcccacttggcagtacatcaagtgtatcatatgccaagtacgccccctattgacgtcaatgacggtaaatggcccgcctggcattatgcccagtacatgaccttatgggactttcctacttggcagtacatctacgtattagtcatcgctattaccatggtgatgcggttttggcagtacatcaatgggcgtggatagcggtttgactcacggggatttccaagtctccaccccattgacgtcaatgggagtttgttttggcaccaaaatcaacgggactttccaaaatgtcgtaacaactccgccccattgacgcaaatgggcggtaggcgtgtacggtgggaggtctatataagcagagctggtttagtgaaccgtcagatccgctagagatccgcggccgctaatacgactcactatagggagagccgccaccatgaaacggacagccgacggaagcgagttcgagtcaccaaagaagaagcggaaagtcatggaggcctcccccgcatcaggacctagacacctgatggatccccatattttcacatctaacttcaacaacggaatcggcagacacaagacctacctgtgctatgaggtggaaaggctggataacggaacctctgtgaagatggaccagcacaggtaagtatcaaggttacaagacaggtttaaggagaccaatagaaactgggcttgtcgagacagagaagactcttgcgtttctgataggcacctattggtcttactgacatccactttgcctttctctccacaggggcttcctgcataaccaggccaagaatctgctgtgcggtttctacgggagacatgcagaactgaggtttctggatctggtgccatccctgcagctggaccccgctcagatctacagagtgacttggttcatctcttggagcccttgcttttcatggggatgtgctggcgaggtgagggccttccttcaggaaaacacacacgtgagactgaggatttttgctgccagaatctacgattatgacccactgtacaaggaagctctgcagatgctgagggatgcaggcgctcaggtgagcattatgacctatgacgaattcaagcactgctgggatacttttgtggaccatcagggttgtccttttcagccatgggatgggctggacgagcattctcaggcactgagcggtagactgagggctatcctgcagaaccaggggaattctggatctgaaactccaggaacttctgaatctgctactccagaatctatgtccaagctggagaagtttacaaactgttacagcctctccaaaaccctcaggtttaaagcgatcccggtgggcaagacccaggagaacatcgacaacaagaggctcctggtggaagacgagaagcgcgccgaagactacaagggcgtgaagaagctgctcgataggtactacctcagctttattaacgacgtgctgcacagcatcaaactcaagaatctcaacaactacatctccctcttccgcaaaaagacccgcaccgagaaggagaacaaggagctggagaacctggagatcaacctccgcaaggaaatcgccaaagcgttcaagggcaatgaagggtacaagagcctcttcaagaaagacatcatcgaaactatcctcccagagtttctcgatgacaaggacgagatcgcgctggtgaactcctttaacgggttcacaaccgcgtttaccggcttctttgataacagggaaaatatgttctccgaggaggccaagtccaccagcatcgccttcaggtgtatcaacgagaacctcacccgctacatttccaatatggacattttcgagaaggtggatgcgatcttcgataagcacgaggtgcaggagatcaaagagaagattctcaattccgattatgacgtcgaggatttcttcgaaggggagttctttaattttgtgctcacacaagagggcattgacgtgtacaacgcgattatcgggggcttcgtcacagagtccggggagaagattaaggggctgaatgagtacatcaatctgtacaatcagaagaccaagcagaaactgccgaaattcaagccgctctacaagcaagtcctgtccgatagggaaagcctctccttctacggcgagggctataccagcgacgaggaggtgctggaagtcttccgcaacacactgaataagaatagcgagattttctcctccatcaagaagctcgagaagctctttaagaactttgacgagtacagctccgccgggattttcgtgaagaacgggccggcgatcagcaccatctccaaggacatctttggcgagtggaacgtcatcagggacaagtggaacgccgagtacgacgacatccacctgaagaagaaggcggtggtgaccgagaagtatgaggacgatcgcaggaagtccttcaaaaaaatcggctccttcagcctcgaacagctccaggagtatgccgatgcggatctgtccgtcgtcgagaagctgaaggaaatcatcattcagaaggtcgacgagatctataaagtgtacgggtccagcgagaagctgttcgacgccgactttgtgctcgagaagtccctcaaaaagaatgacgccgtggtggccattatgaaagacctgctcgactccgtgaagtccttcgaaaattacattaaagcgttctttggggaggggaaggaaactaacagggatgagtccttctatggcgactttgtcctcgcgtacgacatcctgctgaaggtcgaccacatttacgacgcgatccgcaactacgtgacacagaagccgtactccaaagacaagttcaagctgtacttccagaacccgcaatttatggggggctgggacaaggataaagagacagactaccgcgcgacaattctccgctatggctccaaatactatctggccatcatggacaagaagtacgcgaagtgcctgcagaagatcgacaaagacgacgtcaatggcaactatgaaaagatcaactacaagctgctgccgggcccgaacaagatgctcccgaaggtgttcttcagcaagaagtggatggcctactacaatccaagcgaggatattcagaaaatctataaaaacgggaccttcaagaagggggacatgtttaacctcaacgactgccacaagctcattgatttcttcaaggatagcatttcccgctacccgaaatggtccaatgcgtacgattttaacttctccgagacagaaaagtacaaagacatcgcgggcttttacagggaggtggaggagcaagggtataaagtttcttttgaatccgcgagcaagaaggaagtcgacaagctcgtcgaggagggcaagctctacatgttccaaatttataacaaggacttttccgacaagagccatgggaccccaaacctccacaccatgtacttcaaactgctctttgacgagaacaaccacgggcaaatcaggctgagcggcggcgccgaattattcatgcgcagggcctccctcaagaaggaggagctggtcgtccatccagccaattccccgatcgcgaacaagaacccggacaatccgaaaaagaccaccaccctgtcctacgacgtctacaaggacaaacgcttcagcgaagaccagtacgaattacacatcccaattgcgattaataagtgcccaaagaatatcttcaaaattaatacagaggtcagggtgctgctcaaacacgacgacaatccgtatgtcatcggcattgccaggggcgagcgcaatctgctctatatcgtggtcgtggatgggaagggcaatattgtggagcagtactccctgaacgagattatcaacaacttcaatgggattaggattaagaccgactatcacagcctgctcgacaagaaagaaaaagagaggtttgaggcccgccaaaactggacctccattgagaatatcaaagaattaaaggccggctatatttcccaagtcgtccacaagatctgcgagctggtggagaaatatgacgccgtgattgcgctcgaagacttaaattctgggttcaagaactcccgcgtgaaggtggaaaaacaggtgtatcagaaattcgagaaaatgctgatcgacaaactcaattatatggtggataagaagtccaacccgtgtgccacagggggcgcgctgaagggctatcagatcaccaacaagttcgagagcttcaagagcatgagcacccagaacgggtttattttctacatcccggcgtggctcacctccaagattgacccgagcaccggcttcgtgaacctcctgaagacaaagtatacctccattgccgacagcaagaagtttatctcctccttcgaccgcattatgtatgtgccggaggaggacctcttcgagttcgccctcgactacaaaaacttcagccgcacagatgcggattacatcaagaagtggaagctgtactcctacgggaacaggatccgcatcttcaggaatccaaaaaaaaataacgtctttgactgggaggaagtgtgcctgacatccgcctacaaggaactgttcaataaatacggcatcaattaccagcagggcgacattcgcgccctcctctgtgagcagtccgacaaagcgttttactccagcttcatggccctcatgtccctgatgctccaaatgaggaatagcatcacagggcgcaccgacgtcgacttcctcatcagcccggtgaagaactccgacgggatcttttacgactcccgcaactatgaggcgcaagagaatgcgatcctcccgaagaacgccgatgcgaacggggcctataatatcgccaggaaagtgctctgggccatcgggcagttcaaaaaggcggaggatgagaagctcgacaaggtgaaaattgccatttccaacaaggagtggctggagtacgcgcagacctccgtgaagcacggatctcccaagaagaagaggaaagtctctggaggatctaccaacctcagcgacattatcgagaaggaaaccggcaagcaactcgtgatccaggagagcatactgatgctccccgaggaggtcgaggaggtgattggcaataagcccgagtccgatatactggttcatactgcgtatgacgaaagcacagacgagaacgtcatgctacttaccagcgacgccccggagtacaagccctgggccctagtcatccaagacagcaacggtgagaacaagatcaagatgcttactaagtatgattctggcggctcaaaaagaaccgccgacggcagcgaattcgagcccaagaagaagaggaaagtcggaagcggagctactaacttcagcctgctgaagcaggctggagacgtggaggagaaccctggacctatggtgagcaagggcgaggagctgttcaccggggtggtgcccatcctggtcgagctggacggcgacgtaaacggccacaagttcagcgtgtccggcgagggcgagggcgatgccacctacggcaagctgaccctgaagttcatctgcaccaccggcaagctgcccgtgccctggcccaccctcgtgaccaccctgacctatggagtgcagtgcttcagccgctaccccgaccacatgaagcagcacgacttcttcaagtccgccatgcccgaaggctacgtccaggagcgcaccatcttcttcaaggacgacggcaactacaagacccgcgccgaggtgaagttcgagggcgacaccctggtgaaccgcatcgagctgaagggcatcgacttcaaggaggacggcaacatcctggggcacaagctggagtacaactacaacagccacaacgtctatatcatggccgacaagcagaagaacggcatcaaggtgaacttcaagatccgccacaacatcgaggacggcagcgtgcagctcgccgaccactaccagcagaacacccccatcggcgacggccccgtgctgctgcccgacaaccactacctgagcacccagtccgccctgagcaaagaccccaacgagaagcgcgatcacatggtcctgctggagttcgtgaccgccgccgggatcactctcggcatggacgagctgtacaagtctggtggttctcccaagaagaagaggaaagtctaaccggtcatcatcaccatcaccattgagtttaaacccgctgatcagcctcgactgtgccttctagttgccagccatctgttgtttgcccctcccccgtgccttccttgaccctggaaggtgccactcccactgtcctttcctaataaaatgaggaaattgcatcgcattgtctgagtaggtgtcattctattctggggggtggggtggggcaggacagcaagggggaggattgggaagacaatagcaggcatgctggggatgcggtgggctctatggcttctgaggcgaaaagaaccagctggggctcgataccgtcgacctctagctagagcttggcgtaatcatggtcatagctgtttcctgtgtgaaattgttatccgctcacaattccacacaacatacgagccggaagcataaagtgtaaagcctagggtgcctaatgagtgagctaactcacattaattgcgttgcgctcactgcccgctttccagtcgggaaacctgtcgtgccagctgcattaatgaatcggccaacgcgcgggaagaggcggtttgcgtattgggcgctcttccgcttcctcgctcactgactcgctgcgctcggtcgttcggctgcggcgagcggtatcagctcactcaaaggcggtaatacggttatccacagaatcaggggataacgcaggaaagaacatgtgagcaaaaggccagcaaaaggccaggaaccgtaaaaaggccgcgttgctggcgtt

SEQ ID NO: 446 - DNA, 9559 bp, synthetic construct
  source 1..9559: mol_type = other DNA
gacattgattattgactagttattaatagtaatcaattacggggtcattagttcatagcccatatatggagttccgcgttacataacttacggtaaatggcccgcctggctgaccgcccaacgacccccgcccattgacgtcaataatgacgtatgttcccatagtaacgccaatagggactttccattgacgtcaatgggtggagtatttacggtaaactgcccacttggcagtacatcaagtgtatcatatgccaagtacgccccctattgacgtcaatgacggtaaatggcccgcctggcattatgcccagtacatgaccttatgggactttcctacttggcagtacatctacgtattagtcatcgctattaccatggtgatgcggttttggcagtacatcaatgggcgtggatagcggtttgactcacggggatttccaagtctccaccccattgacgtcaatgggagtttgttttggcaccaaaatcaacgggactttccaaaatgtcgtaacaactccgccccattgacgcaaatgggcggtaggcgtgtacggtgggaggtctatataagcagagctggtttagtgaaccgtcagatccgctagagatccgcggccgctaatacgactcactatagggagagccgccaccatgaaacggacagccgacggaagcgagttcgagtcaccaaagaagaagcggaaagtcgaggcctcccccgcatcaggacctagacacctgatggatccccatattttcacatctaacttcaacaacggaatcggcagacacaagacctacctgtgctatgaggtggaaaggctggataacggaacctctgtgaagatggaccagcacaggtaagtatcaaggttacaagacaggtttaaggagaccaatagaaactgggcttgtcgagacagagaagactcttgcgtttctgataggcacctattggtcttactgacatccactttgcctttctctccacaggggcttcctgcataaccaggccaagaatctgctgtgcggtttctacgggagacatgcagaactgaggtttctggatctggtgccatccctgcagctggaccccgctcagatctacagagtgacttggttcatctcttggagcccttgcttttcatggggatgtgctggcgaggtgagggccttccttcaggaaaacacacacgtgagactgaggatttttgctgccagaatctacgattatgacccactgtacaaggaagctctgcagatgctgagggatgcaggcgctcaggtgagcattatgacctatgacgaattcaagcactgctgggatacttttgtggaccatcagggttgtccttttcagccatgggatgggctggacgagcattctcaggcactgagcggtagactgagggctatcctgcagaaccaggggaattctacttctcaatctgatggatcttctgttccagctgatattgatcaatcttctgattctgatcaatcttcttctcaaggacaaccaggatccaagctggagaagtttacaaactgttacagcctctccaaaaccctcaggtttaaagcgatcccggtgggcaagacccaggagaacatcgacaacaagaggctcctggtggaagacgagaagcgcgccgaagactacaagggcgtgaagaagctgctcgataggtactacctcagctttattaacgacgtgctgcacagcatcaaactcaagaatctcaacaactacatctccctcttccgcaaaaagacccgcaccgagaaggagaacaaggagctggagaacctggagatcaacctccgcaaggaaatcgccaaagcgttcaagggcaatgaagggtacaagagcctcttcaagaaagacatcatcgaaactatcctcccagagtttctcgatgacaaggacgagatcgcgctggtgaactcctttaacgggttcacaaccgcgtttaccggcttctttgataacagggaaaatatgttctccgaggaggccaagtccaccagcatcgccttcaggtgtatcaacgagaacctcacccgctacatttccaatatggacattttcgagaaggtggatgcgatcttcgataagcacgaggtgcaggagatcaaagagaagattctcaattccgattatgacgtcgaggatttcttcgaaggggagttctttaattttgtgctcacacaagagggcattgacgtgtacaacgcgattatcgggggcttcgtcacagagtccggggagaagattaaggggctgaatgagtacatcaatctgtacaatcagaagaccaagcagaaactgccgaaattcaagccgctctacaagcaagtcctgtccgatagggaaagcctctccttctacggcgagggatccagcggcgagaaccagaccacccagaagggacagaagaacagccgcgagagaatgaagcggatcgaagagggcatcaaagagctgggcagccagatcctgaaagaacaccccgtggaaaacacccagctgcagaacgagaagctgtacctgtactacctgcagaatgggcgggatatgtacgtggaccaggaactggacatcaaccggctgtccgactacgatgtggaccatatcgtgcctcagagctttctgaaggacgactccatcgacaacaaggtgctgaccagaagcgacaagaaccggggcaagagcgacaacgtgccctccgaagaggtcgtgaagaagatgaagaactactggcggcagctgctgaacgccaagctgattacccagagaaagttcgacaatctgaccaaggccgagagaggcggcctgagcggctataccagcgacgaggaggtgctggaagtcttccgcaacacactgaataagaatagcgagattttctcctccatcaagaagctcgagaagctctttaagaactttgacgagtacagctccgccgggattttcgtgaagaacgggccggcgatcagcaccatctccaaggacatctttggcgagtggaacgtcatcagggacaagtggaacgccgagtacgacgacatccacctgaagaagaaggcggtggtgaccgagaagtatgaggacgatcgcaggaagtccttcaaaaaaatcggctccttcagcctcgaacagctccaggagtatgccgatgcggatctgtccgtcgtcgagaagctgaaggaaatcatcattcagaaggtcgacgagatctataaagtgtacgggtccagcgagaagctgttcgacgccgactttgtgctcgagaagtccctcaaaaagaatgacgccgtggtggccattatgaaagacctgctcgactccgtgaagtccttcgaaaattacattaaagcgttctttggggaggggaaggaaactaacagggatgagtccttctatggcgactttgtcctcgcgtacgacatcctgctgaaggtcgaccacatttacgacgcgatccgcaactacgtgacacagaagccgtactccaaagacaagttcaagctgtacttccagaacccgcaatttatggggggctgggacaaggataaagagacagactaccgcgcgacaattctccgctatggctccaaatactatctggccatcatggacaagaagtacgcgaagtgcctgcagaagatcgacaaagacgacgtcaatggcaactatgaaaagatcaactacaagctgctgccgggcccgaacaagatgctcccgaaggtgttcttcagcaagaagtggatggcctactacaatccaagcgaggatattcagaaaatctataaaaacgggaccttcaagaagggggacatgtttaacctcaacgactgccacaagctcattgatttcttcaaggatagcatttcccgctacccgaaatggtccaatgcgtacgattttaacttctccgagacagaaaagtacaaagacatcgcgggcttttacagggaggtggaggagcaagggtataaagtttcttttgaatccgcgagcaagaaggaagtcgacaagctcgtcgaggagggcaagctctacatgttccaaatttataacaaggacttttccgacaagagccatgggaccccaaacctccacaccatgtacttcaaactgctctttgacgagaacaaccacgggcaaatcaggctgagcggcggcgccgaattattcatgcgcagggcctccctcaagaaggaggagctggtcgtccatccagccaattccccgatcgcgaacaagaacccggacaatccgaaaaagaccaccaccctgtcctacgacgtctacaaggacaaacgcttcagcgaagaccagtacgaattacacatcccaattgcgattaataagtgcccaaagaatatcttcaaaattaatacagaggtcagggtgctgctcaaacacgacgacaatccgtatgtcatcggcattgccaggggcgagcgcaatctgctctatatcgtggtcgtggatgggaagggcaatattgtggagcagtactccctgaacgagattatcaacaacttcaatgggattaggattaagaccgactatcacagcctgctcgacaagaaagaaaaagagaggtttgaggcccgccaaaactggacctccattgagaatatcaaagaattaaaggccggctatatttcccaagtcgtccacaagatctgcgagctggtggagaaatatgacgccgtgattgcgctcgaagacttaaattctgggttcaagaactcccgcgtgaaggtggaaaaacaggtgtatcagaaattcgagaaaatgctgatcgacaaactcaattatatggtggataagaagtccaacccgtgtgccacagggggcgcgctgaagggctatcagatcaccaacaagttcgagagcttcaagagcatgagcacccagaacgggtttattttctacatcccggcgtggctcacctccaagattgacccgagcaccggcttcgtgaacctcctgaagacaaagtatacctccattgccgacagcaagaagtttatctcctccttcgaccgcattatgtatgtgccggaggaggacctcttcgagttcgccctcgactacaaaaacttcagccgcacagatgcggattacatcaagaagtggaagctgtactcctacgggaacaggatccgcatcttcaggaatccaaaaaaaaataacgtctttgactgggaggaagtgtgcctgacatccgcctacaaggaactgttcaataaatacggcatcaattaccagcagggcgacattcgcgccctcctctgtgagcagtccgacaaagcgttttactccagcttcatggccctcatgtccctgatgctccaaatgaggaatagcatcacagggcgcaccgacgtcgacttcctcatcagcccggtgaagaactccgacgggatcttttacgactcccgcaactatgaggcgcaagagaatgcgatcctcccgaagaacgccgatgcgaacggggcctataatatcgccaggaaagtgctctgggccatcgggcagttcaaaaaggcggaggatgagaagctcgacaaggtgaaaattgccatttccaacaaggagtggctggagtacgcgcagacctccgtgaagcactcaggcggaagtggtggaagtggcggtagtaccaacctcagcgacattatcgagaaggaaaccggcaagcaactcgtgatccaggagagcatactgatgctccccgaggaggtcgaggaggtgattggcaataagcccgagtccgatatactggttcatactgcgtatgacgaaagcacagacgagaacgtcatgctacttaccagcgacgccccggagtacaagccctgggccctagtcatccaagacagcaacggtgagaacaagatcaagatgctttctggcggctcaaaaagaaccgccgacggcagcgaattcgagcccaagaagaagaggaaagtcggaagcggagctactaacttcagcctgctgaagcaggctggagacgtggaggagaaccctggacctatggtgagcaagggcgaggagctgttcaccggggtggtgcccatcctggtcgagctggacggcgacgtaaacggccacaagttcagcgtgtccggcgagggcgagggcgatgccacctacggcaagctgaccctgaagttcatctgcaccaccggcaagctgcccgtgccctggcccaccctcgtgaccaccctgacctatggagtgcagtgcttcagccgctaccccgaccacatgaagcagcacgacttcttcaagtccgccatgcccgaaggctacgtccaggagcgcaccatcttcttcaaggacgacggcaactacaagacccgcgccgaggtgaagttcgagggcgacaccctggtgaaccgcatcgagctgaagggcatcgacttcaaggaggacggcaacatcctggggcacaagctggagtacaactacaacagccacaacgtctatatcatggccgacaagcagaagaacggcatcaaggtgaacttcaagatccgccacaacatcgaggacggcagcgtgcagctcgccgaccactaccagcagaacacccccatcggcgacggccccgtgctgctgcccgacaaccactacctgagcacccagtccgccctgagcaaagaccccaacgagaagcgcgatcacatggtcctgctggagttcgtgaccgccgccgggatcactctcggcatggacgagctgtacaagtctggtggttctcccaagaagaagaggaaagtctaaccggtcatcatcaccatcaccattgagtttaaacccgctgatcagcctcgactgtgccttctagttgccagccatctgttgtttgcccctcccccgtgccttccttgaccctggaaggtgccactcccactgtcctttcctaataaaatgaggaaattgcatcgcattgtctgagtaggtgtcattctattctggggggtggggtggggcaggacagcaagggggaggattgggaagacaatagcaggcatgctggggatgcggtgggctctatggcttctgaggcgaaaagaaccagctggggctcgataccgtcgacctctagctagagcttggcgtaatcatggtcatagctgtttcctgtgtgaaattgttatccgctcacaattccacacaacatacgagccggaagcataaagtgtaaagcctagggtgcctaatgagtgagctaactcacattaattgcgttgcgctcactgcccgctttccagtcgggaaacctgtcgtgccagctgcattaatgaatcggccaacgcgcgggaagaggcggtttgcgtattgggcgctcttccgcttcctcgctcactgactcgctgcgctcggtcgttcggctgcggcgagcggtatcagctcactcaaaggcggtaatacggttatccacagaatcaggggataacgcaggaaagaacatgtgagcaaaaggccagcaaaaggccaggaaccgtaaaaaggccgcgttgctggcgtttttccataggctccgcccccctgacgagcatcacaaaaatcgacgctcaagtcagaggtggcgaaacccgacaggactataaagataccaggcgtttccccctggaagctccctcgtgcgctctcctgttccgaccctgccgcttaccggatacctgtccgcctttctcccttcgggaagcgtggcgctttctcatagctcacgctgtaggtatctcagttcggtgtaggtcgttcgctccaagctgggctgtgtgcacgaaccccccgttcagcccgaccgctgcgccttatccggtaactatcgtcttgagtccaacccggtaagacacgacttatcgccactggcagcagccactggtaacaggattagcagagcgaggtatgtaggcggtgctacagagttcttgaagtggtggcctaactacggctacactagaagaacagtatttggtatctgcgctctgctgaagccagttaccttcggaaaaagagttggtagctcttgatccggcaaacaaaccaccgctggtagcggtggtttttttgtttgcaagcagcagattacgcgcagaaaaaaaggatctcaagaagatcctttgatcttttctacggggtctgacactcagtggaacgaaaactcacgttaagggattttggtcatgagattatcaaaaaggatcttcacctagatccttttaaattaaaaatgaagttttaaatcaatctaaagtatatatgagtaaacttggtctgacagttaccaatgcttaatcagtgaggcacctatctcagcgatctgtctatttcgttcatccatagttgcctgactccccgtcgtgtagataactacgatacgggagggcttaccatctggccccagtgctgcaatgataccgcgagacccacgctcaccggctccagatttatcagcaataaaccagccagccggaagggccgagcgcagaagtggtcctgcaactttatccgcctccatccagtctattaattgttgccgggaagctagagtaagtagttcgccagttaatagtttgcgcaacgttgttgccattgctacaggcatcgtggtgtcacgctcgtcgtttggtatggcttcattcagctccggttcccaacgatcaaggcgagttacatgatcccccatgttgtgcaaaaaagcggttagctccttcggtcctccgatcgttgtcagaagtaagttggccgcagtgttatcactcatggttatggcagcactgcataattctcttactgtcatgccatccgtaagatgcttttctgtgactggtgagtactcaaccaagtcattctgagaatagtgtatgcggcgaccgagttgctcttgcccggcgtcaatacgggataataccgcgccacatagcagaactttaaaagtgctcatcattggaaaacgttcttcggggcgaaaactctcaaggatcttaccgctgttgagatccagttcgatgtaacccactcgtgcacccaactgatcttcagcatcttttactttcaccagcgtttctgggtgagcaaaaacaggaaggcaaaatgccgcaaaaaagggaataagggcgacacggaaatgttgaatactcatactcttcctttttcaatattattgaagcatttatcagggttattgtctcatgagcggatacatatttgaatgtatttagaaaaataaacaaataggggttccgcgcacatttccccgaaaagtgccacctgacgtcgacggatcgggagatcgatctcccgatcccctagggtcgactctcagtacaatctgctctgatgccgcatagttaagccagtatctgctccctgcttgtgtgttggaggtcgctgagtagtgcgcgagcaaaatttaagctacaacaaggcaaggcttgaccgacaattgcatgaagaatctgcttagggttaggcgttttgcgctgcttcgcgatgtacgggccagatatacgcgtt

SEQ ID NO: 447 - DNA, 9544 bp, synthetic construct
  source 1..9544: mol_type = other DNA
tttccataggctccgcccccctgacgagcatcacaaaaatcgacgctcaagtcagaggtggcgaaacccgacaggactataaagataccaggcgtttccccctggaagctccctcgtgcgctctcctgttccgaccctgccgcttaccggatacctgtccgcctttctcccttcgggaagcgtggcgctttctcatagctcacgctgtaggtatctcagttcggtgtaggtcgttcgctccaagctgggctgtgtgcacgaaccccccgttcagcccgaccgctgcgccttatccggtaactatcgtcttgagtccaacccggtaagacacgacttatcgccactggcagcagccactggtaacaggattagcagagcgaggtatgtaggcggtgctacagagttcttgaagtggtggcctaactacggctacactagaagaacagtatttggtatctgcgctctgctgaagccagttaccttcggaaaaagagttggtagctcttgatccggcaaacaaaccaccgctggtagcggtggtttttttgtttgcaagcagcagattacgcgcagaaaaaaaggatctcaagaagatcctttgatcttttctacggggtctgacactcagtggaacgaaaactcacgttaagggattttggtcatgagattatcaaaaaggatcttcacctagatccttttaaattaaaaatgaagttttaaatcaatctaaagtatatatgagtaaacttggtctgacagttaccaatgcttaatcagtgaggcacctatctcagcgatctgtctatttcgttcatccatagttgcctgactccccgtcgtgtagataactacgatacgggagggcttaccatctggccccagtgctgcaatgataccgcgagacccacgctcaccggctccagatttatcagcaataaaccagccagccggaagggccgagcgcagaagtggtcctgcaactttatccgcctccatccagtctattaattgttgccgggaagctagagtaagtagttcgccagttaatagtttgcgcaacgttgttgccattgctacaggcatcgtggtgtcacgctcgtcgtttggtatggcttcattcagctccggttcccaacgatcaaggcgagttacatgatcccccatgttgtgcaaaaaagcggttagctccttcggtcctccgatcgttgtcagaagtaagttggccgcagtgttatcactcatggttatggcagcactgcataattctcttactgtcatgccatccgtaagatgcttttctgtgactggtgagtactcaaccaagtcattctgagaatagtgtatgcggcgaccgagttgctcttgcccggcgtcaatacgggataataccgcgccacatagcagaactttaaaagtgctcatcattggaaaacgttcttcggggcgaaaactctcaaggatcttaccgctgttgagatccagttcgatgtaacccactcgtgcacccaactgatcttcagcatcttttactttcaccagcgtttctgggtgagcaaaaacaggaaggcaaaatgccgcaaaaaagggaataagggcgacacggaaatgttgaatactcatactcttcctttttcaatattattgaagcatttatcagggttattgtctcatgagcggatacatatttgaatgtatttagaaaaataaacaaataggggttccgcgcacatttccccgaaaagtgccacctgacgtcgacggatcgggagatcgatctcccgatcccctagggtcgactctcagtacaatctgctctgatgccgcatagttaagccagtatctgctccctgcttgtgtgttggaggtcgctgagtagtgcgcgagcaaaatttaagctacaacaaggcaaggcttgaccgacaattgcatgaagaatctgcttagggttaggcgttttgcgctgcttcgcgatgtacgggccagatatacgcgttgacattgattattgactagttattaatagtaatcaattacggggtcattagttcatagcccatatatggagttccgcgttacataacttacggtaaatggcccgcctggctgaccgcccaacgacccccgcccattgacgtcaataatgacgtatgttcccatagtaacgccaatagggactttccattgacgtcaatgggtggagtatttacggtaaactgcccacttggcagtacatcaagtgtatcatatgccaagtacgccccctattgacgtcaatgacggtaaatggcccgcctggcattatgcccagtacatgaccttatgggactttcctacttggcagtacatctacgtattagtcatcgctattaccatggtgatgcggttttggcagtacatcaatgggcgtggatagcggtttgactcacggggatttccaagtctccaccccattgacgtcaatgggagtttgttttggcaccaaaatcaacgggactttccaaaatgtcgtaacaactccgccccattgacgcaaatgggcggtaggcgtgtacggtgggaggtctatataagcagagctggtttagtgaaccgtcagatccgctagagatccgcggccgctaatacgactcactatagggagagccgccaccatgaaacggacagccgacggaagcgagttcgagtcaccaaagaagaagcggaaagtcatggaggcctcccccgcatcaggacctagacacctgatggatccccatattttcacatctaacttcaacaacggaatcggcagacacaagacctacctgtgctatgaggtggaaaggctggataacggaacctctgtgaagatggaccagcacaggtaagtatcaaggttacaagacaggtttaaggagaccaatagaaactgggcttgtcgagacagagaagactcttgcgtttctgataggcacctattggtcttactgacatccactttgcctttctctccacaggggcttcctgcataaccaggccaagaatctgctgtgcggtttctacgggagacatgcagaactgaggtttctggatctggtgccatccctgcagctggaccccgctcagatctacagagtgacttggttcatctcttggagcccttgcttttcatggggatgtgctggcgaggtgagggccttccttcaggaaaacacacacgtgagactgaggatttttgctgccagaatctacgattatgacccactgtacaaggaagctctgcagatgctgagggatgcaggcgctcaggtgagcattatgacctatgacgaattcaagcactgctgggatacttttgtggaccatcagggttgtccttttcagccatgggatgggctggacgagcattctcaggcactgagcggtagactgagggctatcctgcagaaccaggggaattctggatctgaaactccaggaacttctgaatctgctactccagaatctatgtccaagctggagaagtttacaaactgttacagcctctccaaaaccctcaggtttaaagcgatcccggtgggcaagacccaggagaacatcgacaacaagaggctcctggtggaagacgagaagcgcgccgaagactacaagggcgtgaagaagctgctcgataggtactacctcagctttattaacgacgtgctgcacagcatcaaactcaagaatctcaacaactacatctccctcttccgcaaaaagacccgcaccgagaaggagaacaaggagctggagaacctggagatcaacctccgcaaggaaatcgccaaagcgttcaagggcaatgaagggtacaagagcctcttcaagaaagacatcatcgaaactatcctcccagagtttctcgatgacaaggacgagatcgcgctggtgaactcctttaacgggttcacaaccgcgtttaccggcttctttgataacagggaaaatatgttctccgaggaggccaagtccaccagcatcgccttcaggtgtatcaacgagaacctcacccgctacatttccaatatggacattttcgagaaggtggatgcgatcttcgataagcacgaggtgcaggagatcaaagagaagattctcaattccgattatgacgtcgaggatttcttcgaaggggagttctttaattttgtgctcacacaagagggcattgacgtgtacaacgcgattatcgggggcttcgtcacagagtccggggagaagattaaggggctgaatgagtacatcaatctgtacaatcagaagaccaagcagaaactgccgaaattcaagccgctctacaagcaagtcctgtccgatagggaaagcctctccttctacggcgagggatccagcggcgagaaccagaccacccagaagggacagaagaacagccgcgagagaatgaagcggatcgaagagggcatcaaagagctgggcagccagatcctgaaagaacaccccgtggaaaacacccagctgcagaacgagaagctgtacctgtactacctgcagaatgggcgggatatgtacgtggaccaggaactggacatcaaccggctgtccgactacgatgtggaccatatcgtgcctcagagctttctgaaggacgactccatcgacaacaaggtgctgaccagaagcgacaagaaccggggcaagagcgacaacgtgccctccgaagaggtcgtgaagaagatgaagaactactggcggcagctgctgaacgccaagctgattacccagagaaagttcgacaatctgaccaaggccgagagaggcggcctgagcggctataccagcgacgaggaggtgctggaagtcttccgcaacacactgaataagaatagcgagattttctcctccatcaagaagctcgagaagctctttaagaactttgacgagtacagctccgccgggattttcgtgaagaacgggccggcgatcagcaccatctccaaggacatctttggcgagtggaacgtcatcagggacaagtggaacgccgagtacgacgacatccacctgaagaagaaggcggtggtgaccgagaagtatgaggacgatcgcaggaagtccttcaaaaaaatcggctccttcagcctcgaacagctccaggagtatgccgatgcggatctgtccgtcgtcgagaagctgaaggaaatcatcattcagaaggtcgacgagatctataaagtgtacgggtccagcgagaagctgttcgacgccgactttgtgctcgagaagtccctcaaaaagaatgacgccgtggtggccattatgaaagacctgctcgactccgtgaagtccttcgaaaattacattaaagcgttctttggggaggggaaggaaactaacagggatgagtccttctatggcgactttgtcctcgcgtacgacatcctgctgaaggtcgaccacatttacgacgcgatccgcaactacgtgacacagaagccgtactccaaagacaagttcaagctgtacttccagaacccgcaatttatggggggctgggacaaggataaagagacagactaccgcgcgacaattctccgctatggctccaaatactatctggccatcatggacaagaagtacgcgaagtgcctgcagaagatcgacaaagacgacgtcaatggcaactatgaaaagatcaactacaagctgctgccgggcccgaacaagatgctcccgaaggtgttcttcagcaagaagtggatggcctactacaatccaagcgaggatattcagaaaatctataaaaacgggaccttcaagaagggggacatgtttaacctcaacgactgccacaagctcattgatttcttcaaggatagcatttcccgctacccgaaatggtccaatgcgtacgattttaacttctccgagacagaaaagtacaaagacatcgcgggcttttacagggaggtggaggagcaagggtataaagtttcttttgaatccgcgagcaagaaggaagtcgacaagctcgtcgaggagggcaagctctacatgttccaaatttataacaaggacttttccgacaagagccatgggaccccaaacctccacaccatgtacttcaaactgctctttgacgagaacaaccacgggcaaatcaggctgagcggcggcgccgaattattcatgcgcagggcctccctcaagaaggaggagctggtcgtccatccagccaattccccgatcgcgaacaagaacccggacaatccgaaaaagaccaccaccctgtcctacgacgtctacaaggacaaacgcttcagcgaagaccagtacgaattacacatcccaattgcgattaataagtgcccaaagaatatcttcaaaattaatacagaggtcagggtgctgctcaaacacgacgacaatccgtatgtcatcggcattgccaggggcgagcgcaatctgctctatatcgtggtcgtggatgggaagggcaatattgtggagcagtactccctgaacgagattatcaacaacttcaatgggattaggattaagaccgactatcacagcctgctcgacaagaaagaaaaagagaggtttgaggcccgccaaaactggacctccattgagaatatcaaagaattaaaggccggctatatttcccaagtcgtccacaagatctgcgagctggtggagaaatatgacgccgtgattgcgctcgaagacttaaattctgggttcaagaactcccgcgtgaaggtggaaaaacaggtgtatcagaaattcgagaaaatgctgatcgacaaactcaattatatggtggataagaagtccaacccgtgtgccacagggggcgcgctgaagggctatcagatcaccaacaagttcgagagcttcaagagcatgagcacccagaacgggtttattttctacatcccggcgtggctcacctccaagattgacccgagcaccggcttcgtgaacctcctgaagacaaagtatacctccattgccgacagcaagaagtttatctcctccttcgaccgcattatgtatgtgccggaggaggacctcttcgagttcgccctcgactacaaaaacttcagccgcacagatgcggattacatcaagaagtggaagctgtactcctacgggaacaggatccgcatcttcaggaatccaaaaaaaaataacgtctttgactgggaggaagtgtgcctgacatccgcctacaaggaactgttcaataaatacggcatcaattaccagcagggcgacattcgcgccctcctctgtgagcagtccgacaaagcgttttactccagcttcatggccctcatgtccctgatgctccaaatgaggaatagcatcacagggcgcaccgacgtcgacttcctcatcagcccggtgaagaactccgacgggatcttttacgactcccgcaactatgaggcgcaagagaatgcgatcctcccgaagaacgccgatgcgaacggggcctataatatcgccaggaaagtgctctgggccatcgggcagttcaaaaaggcggaggatgagaagctcgacaaggtgaaaattgccatttccaacaaggagtggctggagtacgcgcagacctccgtgaagcacggatctcccaagaagaagaggaaagtctctggaggatctaccaacctcagcgacattatcgagaaggaaaccggcaagcaactcgtgatccaggagagcatactgatgctccccgaggaggtcgaggaggtgattggcaataagcccgagtccgatatactggttcatactgcgtatgacgaaagcacagacgagaacgtcatgctacttaccagcgacgccccggagtacaagccctgggccctagtcatccaagacagcaacggtgagaacaagatcaagatgcttactaagtatgattctggcggctcaaaaagaaccgccgacggcagcgaattcgagcccaagaagaagaggaaagtcggaagcggagctactaacttcagcctgctgaagcaggctggagacgtggaggagaaccctggacctatggtgagcaagggcgaggagctgttcaccggggtggtgcccatcctggtcgagctggacggcgacgtaaacggccacaagttcagcgtgtccggcgagggcgagggcgatgccacctacggcaagctgaccctgaagttcatctgcaccaccggcaagctgcccgtgccctggcccaccctcgtgaccaccctgacctatggagtgcagtgcttcagccgctaccccgaccacatgaagcagcacgacttcttcaagtccgccatgcccgaaggctacgtccaggagcgcaccatcttcttcaaggacgacggcaactacaagacccgcgccgaggtgaagttcgagggcgacaccctggtgaaccgcatcgagctgaagggcatcgacttcaaggaggacggcaacatcctggggcacaagctggagtacaactacaacagccacaacgtctatatcatggccgacaagcagaagaacggcatcaaggtgaacttcaagatccgccacaacatcgaggacggcagcgtgcagctcgccgaccactaccagcagaacacccccatcggcgacggccccgtgctgctgcccgacaaccactacctgagcacccagtccgccctgagcaaagaccccaacgagaagcgcgatcacatggtcctgctggagttcgtgaccgccgccgggatcactctcggcatggacgagctgtacaagtctggtggttctcccaagaagaagaggaaagtctaaccggtcatcatcaccatcaccattgagtttaaacccgctgatcagcctcgactgtgccttctagttgccagccatctgttgtttgcccctcccccgtgccttccttgaccctggaaggtgccactcccactgtcctttcctaataaaatgaggaaattgcatcgcattgtctgagtaggtgtcattctattctggggggtggggtggggcaggacagcaagggggaggattgggaagacaatagcaggcatgctggggatgcggtgggctctatggcttctgaggcgaaaagaaccagctggggctcgataccgtcgacctctagctagagcttggcgtaatcatggtcatagctgtttcctgtgtgaaattgttatccgctcacaattccacacaacatacgagccggaagcataaagtgtaaagcctagggtgcctaatgagtgagctaactcacattaattgcgttgcgctcactgcccgctttccagtcgggaaacctgtcgtgccagctgcattaatgaatcggccaacgcgcgggaagaggcggtttgcgtattgggcgctcttccgcttcctcgctcactgactcgctgcgctcggtcgttcggctgcggcgagcggtatcagctcactcaaaggcggtaatacggttatccacagaatcaggggataacgcaggaaagaacatgtgagcaaaaggccagcaaaaggccaggaaccgtaaaaaggccgcgttgctggcgtt

SEQ ID NO: 448 - DNA, 9547 bp, synthetic construct
  source 1..9547: mol_type = other DNA
agatatacgcgttgacattgattattgactagttattaatagtaatcaattacggggtcattagttcatagcccatatatggagttccgcgttacataacttacggtaaatggcccgcctggctgaccgcccaacgacccccgcccattgacgtcaataatgacgtatgttcccatagtaacgccaatagggactttccattgacgtcaatgggtggagtatttacggtaaactgcccacttggcagtacatcaagtgtatcatatgccaagtacgccccctattgacgtcaatgacggtaaatggcccgcctggcattatgcccagtacatgaccttatgggactttcctacttggcagtacatctacgtattagtcatcgctattaccatggtgatgcggttttggcagtacatcaatgggcgtggatagcggtttgactcacggggatttccaagtctccaccccattgacgtcaatgggagtttgttttggcaccaaaatcaacgggactttccaaaatgtcgtaacaactccgccccattgacgcaaatgggcggtaggcgtgtacggtgggaggtctatataagcagagctggtttagtgaaccgtcagatccgctagagatccgcggccgctaatacgactcactatagggagagccgccaccatgaaacggacagccgacggaagcgagttcgagtcaccaaagaagaagcggaaagtcgaggcctcccccgcatcaggacctagacacctgatggatccccatattttcacatctaacttcaacaacggaatcggcagacacaagacctacctgtgctatgaggtggaaaggctggataacggaacctctgtgaagatggaccagcacaggtaagtatcaaggttacaagacaggtttaaggagaccaatagaaactgggcttgtcgagacagagaagactcttgcgtttctgataggcacctattggtcttactgacatccactttgcctttctctccacaggggcttcctgcataaccaggccaagaatctgctgtgcggtttctacgggagacatgcagaactgaggtttctggatctggtgccatccctgcagctggaccccgctcagatctacagagtgacttggttcatctcttggagcccttgcttttcatggggatgtgctggcgaggtgagggccttccttcaggaaaacacacacgtgagactgaggatttttgctgccagaatctacgattatgacccactgtacaaggaagctctgcagatgctgagggatgcaggcgctcaggtgagcattatgacctatgacgaattcaagcactgctgggatacttttgtggaccatcagggttgtccttttcagccatgggatgggctggacgagcattctcaggcactgagcggtagactgagggctatcctgcagaaccaggggaattctacttctcaatctgatggatcttctgttccagctgatattgatcaatcttctgattctgatcaatcttcttctcaaggacaaccaggatccaagctggagaagtttacaaactgttacagcctctccaaaaccctcaggtttaaagcgatcccggtgggcaagacccaggagaacatcgacaacaagaggctcctggtggaagacgagaagcgcgccgaagactacaagggcgtgaagaagctgctcgataggtactacctcagctttattaacgacgtgctgcacagcatcaaactcaagaatctcaacaactacatctccctcttccgcaaaaagacccgcaccgagaaggagaacaaggagctggagaacctggagatcaacctccgcaaggaaatcgccaaagcgttcaagggcaatgaagggtacaagagcctcttcaagaaagacatcatcgaaactatcctcccagagtttctcgatgacaaggacgagatcgcgctggtgaactcctttaacgggttcacaaccgcgtttaccggcttctttgataacagggaaaatatgttctccgaggaggccaagtccaccagcatcgccttcaggtgtatcaacgagaacctcacccgctacatttccaatatggacattttcgagaaggtggatgcgatcttcgataagcacgaggtgcaggagatcaaagagaagattctcaattccgattatgacgtcgaggatttcttcgaaggggagttctttaattttgtgctcacacaagagggcattgacgtgtacaacgcgattatcgggggcttcgtcacagagtccggggagaagattaaggggctgaatgagtacatcaatctgtacaatcagaagaccaagcagaaactgccgaaattcaagccgctctacaagcaagtcctgtccgatagggaaagcctctccttctacggcgagaaccagaccacccagaagggacagaagaacagccgcgagagaatgaagcggatcgaagagggcatcaaagagctgggcagccagatcctgaaagaacaccccgtggaaaacacccagctgcagaacgagaagctgtacctgtactacctgcagaatgggcgggatatgtacgtggaccaggaactggacatcaaccggctgtccgactacgatgtggaccatatcgtgcctcagagctttctgaaggacgactccatcgacaacaaggtgctgaccagaagcgacaagaaccggggcaagagcgacaacgtgccctccgaagaggtcgtgaagaagatgaagaactactggcggcagctgctgaacgccaagctgattacccagagaaagttcgacaatctgaccaaggccgagagaggcggcctgagcgagggctataccagcgacgaggaggtgctggaagtcttccgcaacacactgaataagaatagcgagattttctcctccatcaagaagctcgagaagctctttaagaactttgacgagtacagctccgccgggattttcgtgaagaacgggccggcgatcagcaccatctccaaggacatctttggcgagtggaacgtcatcagggacaagtggaacgccgagtacgacgacatccacctgaagaagaaggcggtggtgaccgagaagtatgaggacgatcgcaggaagtccttcaaaaaaatcggctccttcagcctcgaacagctccaggagtatgccgatgcggatctgtccgtcgtcgagaagctgaaggaaatcatcattcagaaggtcgacgagatctataaagtgtacgggtccagcgagaagctgttcgacgccgactttgtgctcgagaagtccctcaaaaagaatgacgccgtggtggccattatgaaagacctgctcgactccgtgaagtccttcgaaaattacattaaagcgttctttggggaggggaaggaaactaacagggatgagtccttctatggcgactttgtcctcgcgtacgacatcctgctgaaggtcgaccacatttacgacgcgatccgcaactacgtgacacagaagccgtactccaaagacaagttcaagctgtacttccagaacccgcaatttatggggggctgggacaaggataaagagacagactaccgcgcgacaattctccgctatggctccaaatactatctggccatcatggacaagaagtacgcgaagtgcctgcagaagatcgacaaagacgacgtcaatggcaactatgaaaagatcaactacaagctgctgccgggcccgaacaagatgctcccgaaggtgttcttcagcaagaagtggatggcctactacaatccaagcgaggatattcagaaaatctataaaaacgggaccttcaagaagggggacatgtttaacctcaacgactgccacaagctcattgatttcttcaaggatagcatttcccgctacccgaaatggtccaatgcgtacgattttaacttctccgagacagaaaagtacaaagacatcgcgggcttttacagggaggtggaggagcaagggtataaagtttcttttgaatccgcgagcaagaaggaagtcgacaagctcgtcgaggagggcaagctctacatgttccaaatttataacaaggacttttccgacaagagccatgggaccccaaacctccacaccatgtacttcaaactgctctttgacgagaacaaccacgggcaaatcaggctgagcggcggcgccgaattattcatgcgcagggcctccctcaagaaggaggagctggtcgtccatccagccaattccccgatcgcgaacaagaacccggacaatccgaaaaagaccaccaccctgtcctacgacgtctacaaggacaaacgcttcagcgaagaccagtacgaattacacatcccaattgcgattaataagtgcccaaagaatatcttcaaaattaatacagaggtcagggtgctgctcaaacacgacgacaatccgtatgtcatcggcattgccaggggcgagcgcaatctgctctatatcgtggtcgtggatgggaagggcaatattgtggagcagtactccctgaacgagattatcaacaacttcaatgggattaggattaagaccgactatcacagcctgctcgacaagaaagaaaaagagaggtttgaggcccgccaaaactggacctccattgagaatatcaaagaattaaaggccggctatatttcccaagtcgtccacaagatctgcgagctggtggagaaatatgacgccgtgattgcgctcgaagacttaaattctgggttcaagaactcccgcgtgaaggtggaaaaacaggtgtatcagaaattcgagaaaatgctgatcgacaaactcaattatatggtggataagaagtccaacccgtgtgccacagggggcgcgctgaagggctatcagatcaccaacaagttcgagagcttcaagagcatgagcacccagaacgggtttattttctacatcccggcgtggctcacctccaagattgacccgagcaccggcttcgtgaacctcctgaagacaaagtatacctccattgccgacagcaagaagtttatctcctccttcgaccgcattatgtatgtgccggaggaggacctcttcgagttcgccctcgactacaaaaacttcagccgcacagatgcggattacatcaagaagtggaagctgtactcctacgggaacaggatccgcatcttcaggaatccaaaaaaaaataacgtctttgactgggaggaagtgtgcctgacatccgcctacaaggaactgttcaataaatacggcatcaattaccagcagggcgacattcgcgccctcctctgtgagcagtccgacaaagcgttttactccagcttcatggccctcatgtccctgatgctccaaatgaggaatagcatcacagggcgcaccgacgtcgacttcctcatcagcccggtgaagaactccgacgggatcttttacgactcccgcaactatgaggcgcaagagaatgcgatcctcccgaagaacgccgatgcgaacggggcctataatatcgccaggaaagtgctctgggccatcgggcagttcaaaaaggcggaggatgagaagctcgacaaggtgaaaattgccatttccaacaaggagtggctggagtacgcgcagacctccgtgaagcactcaggcggaagtggtggaagtggcggtagtaccaacctcagcgacattatcgagaaggaaaccggcaagcaactcgtgatccaggagagcatactgatgctccccgaggaggtcgaggaggtgattggcaataagcccgagtccgatatactggttcatactgcgtatgacgaaagcacagacgagaacgtcatgctacttaccagcgacgccccggagtacaagccctgggccctagtcatccaagacagcaacggtgagaacaagatcaagatgctttctggcggctcaaaaagaaccgccgacggcagcgaattcgagcccaagaagaagaggaaagtcggaagcggagctactaacttcagcctgctgaagcaggctggagacgtggaggagaaccctggacctatggtgagcaagggcgaggagctgttcaccggggtggtgcccatcctggtcgagctggacggcgacgtaaacggccacaagttcagcgtgtccggcgagggcgagggcgatgccacctacggcaagctgaccctgaagttcatctgcaccaccggcaagctgcccgtgccctggcccaccctcgtgaccaccctgacctatggagtgcagtgcttcagccgctaccccgaccacatgaagcagcacgacttcttcaagtccgccatgcccgaaggctacgtccaggagcgcaccatcttcttcaaggacgacggcaactacaagacccgcgccgaggtgaagttcgagggcgacaccctggtgaaccgcatcgagctgaagggcatcgacttcaaggaggacggcaacatcctggggcacaagctggagtacaactacaacagccacaacgtctatatcatggccgacaagcagaagaacggcatcaaggtgaacttcaagatccgccacaacatcgaggacggcagcgtgcagctcgccgaccactaccagcagaacacccccatcggcgacggccccgtgctgctgcccgacaaccactacctgagcacccagtccgccctgagcaaagaccccaacgagaagcgcgatcacatggtcctgctggagttcgtgaccgccgccgggatcactctcggcatggacgagctgtacaagtctggtggttctcccaagaagaagaggaaagtctaaccggtcatcatcaccatcaccattgagtttaaacccgctgatcagcctcgactgtgccttctagttgccagccatctgttgtttgcccctcccccgtgccttccttgaccctggaaggtgccactcccactgtcctttcctaataaaatgaggaaattgcatcgcattgtctgagtaggtgtcattctattctggggggtggggtggggcaggacagcaagggggaggattgggaagacaatagcaggcatgctggggatgcggtgggctctatggcttctgaggcgaaaagaaccagctggggctcgataccgtcgacctctagctagagcttggcgtaatcatggtcatagctgtttcctgtgtgaaattgttatccgctcacaattccacacaacatacgagccggaagcataaagtgtaaagcctagggtgcctaatgagtgagctaactcacattaattgcgttgcgctcactgcccgctttccagtcgggaaacctgtcgtgccagctgcattaatgaatcggccaacgcgcgggaagaggcggtttgcgtattgggcgctcttccgcttcctcgctcactgactcgctgcgctcggtcgttcggctgcggcgagcggtatcagctcactcaaaggcggtaatacggttatccacagaatcaggggataacgcaggaaagaacatgtgagcaaaaggccagcaaaaggccaggaaccgtaaaaaggccgcgttgctggcgtttttccataggctccgcccccctgacgagcatcacaaaaatcgacgctcaagtcagaggtggcgaaacccgacaggactataaagataccaggcgtttccccctggaagctccctcgtgcgctctcctgttccgaccctgccgcttaccggatacctgtccgcctttctcccttcgggaagcgtggcgctttctcatagctcacgctgtaggtatctcagttcggtgtaggtcgttcgctccaagctgggctgtgtgcacgaaccccccgttcagcccgaccgctgcgccttatccggtaactatcgtcttgagtccaacccggtaagacacgacttatcgccactggcagcagccactggtaacaggattagcagagcgaggtatgtaggcggtgctacagagttcttgaagtggtggcctaactacggctacactagaagaacagtatttggtatctgcgctctgctgaagccagttaccttcggaaaaagagttggtagctcttgatccggcaaacaaaccaccgctggtagcggtggtttttttgtttgcaagcagcagattacgcgcagaaaaaaaggatctcaagaagatcctttgatcttttctacggggtctgacactcagtggaacgaaaactcacgttaagggattttggtcatgagattatcaaaaaggatcttcacctagatccttttaaattaaaaatgaagttttaaatcaatctaaagtatatatgagtaaacttggtctgacagttaccaatgcttaatcagtgaggcacctatctcagcgatctgtctatttcgttcatccatagttgcctgactccccgtcgtgtagataactacgatacgggagggcttaccatctggccccagtgctgcaatgataccgcgagacccacgctcaccggctccagatttatcagcaataaaccagccagccggaagggccgagcgcagaagtggtcctgcaactttatccgcctccatccagtctattaattgttgccgggaagctagagtaagtagttcgccagttaatagtttgcgcaacgttgttgccattgctacaggcatcgtggtgtcacgctcgtcgtttggtatggcttcattcagctccggttcccaacgatcaaggcgagttacatgatcccccatgttgtgcaaaaaagcggttagctccttcggtcctccgatcgttgtcagaagtaagttggccgcagtgttatcactcatggttatggcagcactgcataattctcttactgtcatgccatccgtaagatgcttttctgtgactggtgagtactcaaccaagtcattctgagaatagtgtatgcggcgaccgagttgctcttgcccggcgtcaatacgggataataccgcgccacatagcagaactttaaaagtgctcatcattggaaaacgttcttcggggcgaaaactctcaaggatcttaccgctgttgagatccagttcgatgtaacccactcgtgcacccaactgatcttcagcatcttttactttcaccagcgtttctgggtgagcaaaaacaggaaggcaaaatgccgcaaaaaagggaataagggcgacacggaaatgttgaatactcatactcttcctttttcaatattattgaagcatttatcagggttattgtctcatgagcggatacatatttgaatgtatttagaaaaataaacaaataggggttccgcgcacatttccccgaaaagtgccacctgacgtcgacggatcgggagatcgatctcccgatcccctagggtcgactctcagtacaatctgctctgatgccgcatagttaagccagtatctgctccctgcttgtgtgttggaggtcgctgagtagtgcgcgagcaaaatttaagctacaacaaggcaaggcttgaccgacaattgcatgaagaatctgcttagggttaggcgttttgcgctgcttcgcgatgtacgggcc

SEQ ID NO: 449 - DNA, 9532 bp, synthetic construct
  source 1..9532: mol_type = other DNA
tttccataggctccgcccccctgacgagcatcacaaaaatcgacgctcaagtcagaggtggcgaaacccgacaggactataaagataccaggcgtttccccctggaagctccctcgtgcgctctcctgttccgaccctgccgcttaccggatacctgtccgcctttctcccttcgggaagcgtggcgctttctcatagctcacgctgtaggtatctcagttcggtgtaggtcgttcgctccaagctgggctgtgtgcacgaaccccccgttcagcccgaccgctgcgccttatccggtaactatcgtcttgagtccaacccggtaagacacgacttatcgccactggcagcagccactggtaacaggattagcagagcgaggtatgtaggcggtgctacagagttcttgaagtggtggcctaactacggctacactagaagaacagtatttggtatctgcgctctgctgaagccagttaccttcggaaaaagagttggtagctcttgatccggcaaacaaaccaccgctggtagcggtggtttttttgtttgcaagcagcagattacgcgcagaaaaaaaggatctcaagaagatcctttgatcttttctacggggtctgacactcagtggaacgaaaactcacgttaagggattttggtcatgagattatcaaaaaggatcttcacctagatccttttaaattaaaaatgaagttttaaatcaatctaaagtatatatgagtaaacttggtctgacagttaccaatgcttaatcagtgaggcacctatctcagcgatctgtctatttcgttcatccatagttgcctgactccccgtcgtgtagataactacgatacgggagggcttaccatctggccccagtgctgcaatgataccgcgagacccacgctcaccggctccagatttatcagcaataaaccagccagccggaagggccgagcgcagaagtggtcctgcaactttatccgcctccatccagtctattaattgttgccgggaagctagagtaagtagttcgccagttaatagtttgcgcaacgttgttgccattgctacaggcatcgtggtgtcacgctcgtcgtttggtatggcttcattcagctccggttcccaacgatcaaggcgagttacatgatcccccatgttgtgcaaaaaagcggttagctccttcggtcctccgatcgttgtcagaagtaagttggccgcagtgttatcactcatggttatggcagcactgcataattctcttactgtcatgccatccgtaagatgcttttctgtgactggtgagtactcaaccaagtcattctgagaatagtgtatgcggcgaccgagttgctcttgcccggcgtcaatacgggataataccgcgccacatagcagaactttaaaagtgctcatcattggaaaacgttcttcggggcgaaaactctcaaggatcttaccgctgttgagatccagttcgatgtaacccactcgtgcacccaactgatcttcagcatcttttactttcaccagcgtttctgggtgagcaaaaacaggaaggcaaaatgccgcaaaaaagggaataagggcgacacggaaatgttgaatactcatactcttcctttttcaatattattgaagcatttatcagggttattgtctcatgagcggatacatatttgaatgtatttagaaaaataaacaaataggggttccgcgcacatttccccgaaaagtgccacctgacgtcgacggatcgggagatcgatctcccgatcccctagggtcgactctcagtacaatctgctctgatgccgcatagttaagccagtatctgctccctgcttgtgtgttggaggtcgctgagtagtgcgcgagcaaaatttaagctacaacaaggcaaggcttgaccgacaattgcatgaagaatctgcttagggttaggcgttttgcgctgcttcgcgatgtacgggccagatatacgcgttgacattgattattgactagttattaatagtaatcaattacggggtcattagttcatagcccatatatggagttccgcgttacataacttacggtaaatggcccgcctggctgaccgcccaacgacccccgcccattgacgtcaataatgacgtatgttcccatagtaacgccaatagggactttccattgacgtcaatgggtggagtatttacggtaaactgcccacttggcagtacatcaagtgtatcatatgccaagtacgccccctattgacgtcaatgacggtaaatggcccgcctggcattatgcccagtacatgaccttatgggactttcctacttggcagtacatctacgtattagtcatcgctattaccatggtgatgcggttttggcagtacatcaatgggcgtggatagcggtttgactcacggggatttccaagtctccaccccattgacgtcaatgggagtttgttttggcaccaaaatcaacgggactttccaaaatgtcgtaacaactccgccccattgacgcaaatgggcggtaggcgtgtacggtgggaggtctatataagcagagctggtttagtgaaccgtcagatccgctagagatccgcggccgctaatacgactcactatagggagagccgccaccatgaaacggacagccgacggaagcgagttcgagtcaccaaagaagaagcggaaagtcatggaggcctcccccgcatcaggacctagacacctgatggatccccatattttcacatctaacttcaacaacggaatcggcagacacaagacctacctgtgctatgaggtggaaaggctggataacggaacctctgtgaagatggaccagcacaggtaagtatcaaggttacaagacaggtttaaggagaccaatagaaactgggcttgtcgagacagagaagactcttgcgtttctgataggcacctattggtcttactgacatccactttgcctttctctccacaggggcttcctgcataaccaggccaagaatctgctgtgcggtttctacgggagacatgcagaactgaggtttctggatctggtgccatccctgcagctggaccccgctcagatctacagagtgacttggttcatctcttggagcccttgcttttcatggggatgtgctggcgaggtgagggccttccttcaggaaaacacacacgtgagactgaggatttttgctgccagaatctacgattatgacccactgtacaaggaagctctgcagatgctgagggatgcaggcgctcaggtgagcattatgacctatgacgaattcaagcactgctgggatacttttgtggaccatcagggttgtccttttcagccatgggatgggctggacgagcattctcaggcactgagcggtagactgagggctatcctgcagaaccaggggaattctggatctgaaactccaggaacttctgaatctgctactccagaatctatgtccaagctggagaagtttacaaactgttacagcctctccaaaaccctcaggtttaaagcgatcccggtgggcaagacccaggagaacatcgacaacaagaggctcctggtggaagacgagaagcgcgccgaagactacaagggcgtgaagaagctgctcgataggtactacctcagctttattaacgacgtgctgcacagcatcaaactcaagaatctcaacaactacatctccctcttccgcaaaaagacccgcaccgagaaggagaacaaggagctggagaacctggagatcaacctccgcaaggaaatcgccaaagcgttcaagggcaatgaagggtacaagagcctcttcaagaaagacatcatcgaaactatcctcccagagtttctcgatgacaaggacgagatcgcgctggtgaactcctttaacgggttcacaaccgcgtttaccggcttctttgataacagggaaaatatgttctccgaggaggccaagtccaccagcatcgccttcaggtgtatcaacgagaacctcacccgctacatttccaatatggacattttcgagaaggtggatgcgatcttcgataagcacgaggtgcaggagatcaaagagaagattctcaattccgattatgacgtcgaggatttcttcgaaggggagttctttaattttgtgctcacacaagagggcattgacgtgtacaacgcgattatcgggggcttcgtcacagagtccggggagaagattaaggggctgaatgagtacatcaatctgtacaatcagaagaccaagcagaaactgccgaaattcaagccgctctacaagcaagtcctgtccgatagggaaagcctctccttctacggcgagaaccagaccacccagaagggacagaagaacagccgcgagagaatgaagcggatcgaagagggcatcaaagagctgggcagccagatcctgaaagaacaccccgtggaaaacacccagctgcagaacgagaagctgtacctgtactacctgcagaatgggcgggatatgtacgtggaccaggaactggacatcaaccggctgtccgactacgatgtggaccatatcgtgcctcagagctttctgaaggacgactccatcgacaacaaggtgctgaccagaagcgacaagaaccggggcaagagcgacaacgtgccctccgaagaggtcgtgaagaagatgaagaactactggcggcagctgctgaacgccaagctgattacccagagaaagttcgacaatctgaccaaggccgagagaggcggcctgagcgagggctataccagcgacgaggaggtgctggaagtcttccgcaacacactgaataagaatagcgagattttctcctccatcaagaagctcgagaagctctttaagaactttgacgagtacagctccgccgggattttcgtgaagaacgggccggcgatcagcaccatctccaaggacatctttggcgagtggaacgtcatcagggacaagtggaacgccgagtacgacgacatccacctgaagaagaaggcggtggtgaccgagaagtatgaggacgatcgcaggaagtccttcaaaaaaatcggctccttcagcctcgaacagctccaggagtatgccgatgcggatctgtccgtcgtcgagaagctgaaggaaatcatcattcagaaggtcgacgagatctataaagtgtacgggtccagcgagaagctgttcgacgccgactttgtgctcgagaagtccctcaaaaagaatgacgccgtggtggccattatgaaagacctgctcgactccgtgaagtccttcgaaaattacattaaagcgttctttggggaggggaaggaaactaacagggatgagtccttctatggcgactttgtcctcgcgtacgacatcctgctgaaggtcgaccacatttacgacgcgatccgcaactacgtgacacagaagccgtactccaaagacaagttcaagctgtacttccagaacccgcaatttatggggggctgggacaaggataaagagacagactaccgcgcgacaattctccgctatggctccaaatactatctggccatcatggacaagaagtacgcgaagtgcctgcagaagatcgacaaagacgacgtcaatggcaactatgaaaagatcaactacaagctgctgccgggcccgaacaagatgctcccgaaggtgttcttcagcaagaagtggatggcctactacaatccaagcgaggatattcagaaaatctataaaaacgggaccttcaagaagggggacatgtttaacctcaacgactgccacaagctcattgatttcttcaaggatagcatttcccgctacccgaaatggtccaatgcgtacgattttaacttctccgagacagaaaagtacaaagacatcgcgggcttttacagggaggtggaggagcaagggtataaagtttcttttgaatccgcgagcaagaaggaagtcgacaagctcgtcgaggagggcaagctctacatgttccaaatttataacaaggacttttccgacaagagccatgggaccccaaacctccacaccatgtacttcaaactgctctttgacgagaacaaccacgggcaaatcaggctgagcggcggcgccgaattattcatgcgcagggcctccctcaagaaggaggagctggtcgtccatccagccaattccccgatcgcgaacaagaacccggacaatccgaaaaagaccaccaccctgtcctacgacgtctacaaggacaaacgcttcagcgaagaccagtacgaattacacatcccaattgcgattaataagtgcccaaagaatatcttcaaaattaatacagaggtcagggtgctgctcaaacacgacgacaatccgtatgtcatcggcattgccaggggcgagcgcaatctgctctatatcgtggtcgtggatgggaagggcaatattgtggagcagtactccctgaacgagattatcaacaacttcaatgggattaggattaagaccgactatcacagcctgctcgacaagaaagaaaaagagaggtttgaggcccgccaaaactggacctccattgagaatatcaaagaattaaaggccggctatatttcccaagtcgtccacaagatctgcgagctggtggagaaatatgacgccgtgattgcgctcgaagacttaaattctgggttcaagaactcccgcgtgaaggtggaaaaacaggtgtatcagaaattcgagaaaatgctgatcgacaaactcaattatatggtggataagaagtccaacccgtgtgccacagggggcgcgctgaagggctatcagatcaccaacaagttcgagagcttcaagagcatgagcacccagaacgggtttattttctacatcccggcgtggctcacctccaagattgacccgagcaccggcttcgtgaacctcctgaagacaaagtatacctccattgccgacagcaagaagtttatctcctccttcgaccgcattatgtatgtgccggaggaggacctcttcgagttcgccctcgactacaaaaacttcagccgcacagatgcggattacatcaagaagtggaagctgtactcctacgggaacaggatccgcatcttcaggaatccaaaaaaaaataacgtctttgactgggaggaagtgtgcctgacatccgcctacaaggaactgttcaataaatacggcatcaattaccagcagggcgacattcgcgccctcctctgtgagcagtccgacaaagcgttttactccagcttcatggccctcatgtccctgatgctccaaatgaggaatagcatcacagggcgcaccgacgtcgacttcctcatcagcccggtgaagaactccgacgggatcttttacgactcccgcaactatgaggcgcaagagaatgcgatcctcccgaagaacgccgatgcgaacggggcctataatatcgccaggaaagtgctctgggccatcgggcagttcaaaaaggcggaggatgagaagctcgacaaggtgaaaattgccatttccaacaaggagtggctggagtacgcgcagacctccgtgaagcacggatctcccaagaagaagaggaaagtctctggaggatctaccaacctcagcgacattatcgagaaggaaaccggcaagcaactcgtgatccaggagagcatactgatgctccccgaggaggtcgaggaggtgattggcaataagcccgagtccgatatactggttcatactgcgtatgacgaaagcacagacgagaacgtcatgctacttaccagcgacgccccggagtacaagccctgggccctagtcatccaagacagcaacggtgagaacaagatcaagatgcttactaagtatgattctggcggctcaaaaagaaccgccgacggcagcgaattcgagcccaagaagaagaggaaagtcggaagcggagctactaacttcagcctgctgaagcaggctggagacgtggaggagaaccctggacctatggtgagcaagggcgaggagctgttcaccggggtggtgcccatcctggtcgagctggacggcgacgtaaacggccacaagttcagcgtgtccggcgagggcgagggcgatgccacctacggcaagctgaccctgaagttcatctgcaccaccggcaagctgcccgtgccctggcccaccctcgtgaccaccctgacctatggagtgcagtgcttcagccgctaccccgaccacatgaagcagcacgacttcttcaagtccgccatgcccgaaggctacgtccaggagcgcaccatcttcttcaaggacgacggcaactacaagacccgcgccgaggtgaagttcgagggcgacaccctggtgaaccgcatcgagctgaagggcatcgacttcaaggaggacggcaacatcctggggcacaagctggagtacaactacaacagccacaacgtctatatcatggccgacaagcagaagaacggcatcaaggtgaacttcaagatccgccacaacatcgaggacggcagcgtgcagctcgccgaccactaccagcagaacacccccatcggcgacggccccgtgctgctgcccgacaaccactacctgagcacccagtccgccctgagcaaagaccccaacgagaagcgcgatcacatggtcctgctggagttcgtgaccgccgccgggatcactctcggcatggacgagctgtacaagtctggtggttctcccaagaagaagaggaaagtctaaccggtcatcatcaccatcaccattgagtttaaacccgctgatcagcctcgactgtgccttctagttgccagccatctgttgtttgcccctcccccgtgccttccttgaccctggaaggtgccactcccactgtcctttcctaataaaatgaggaaattgcatcgcattgtctgagtaggtgtcattctattctggggggtggggtggggcaggacagcaagggggaggattgggaagacaatagcaggcatgctggggatgcggtgggctctatggcttctgaggcgaaaagaaccagctggggctcgataccgtcgacctctagctagagcttggcgtaatcatggtcatagctgtttcctgtgtgaaattgttatccgctcacaattccacacaacatacgagccggaagcataaagtgtaaagcctagggtgcctaatgagtgagctaactcacattaattgcgttgcgctcactgcccgctttccagtcgggaaacctgtcgtgccagctgcattaatgaatcggccaacgcgcgggaagaggcggtttgcgtattgggcgctcttccgcttcctcgctcactgactcgctgcgctcggtcgttcggctgcggcgagcggtatcagctcactcaaaggcggtaatacggttatccacagaatcaggggataacgcaggaaagaacatgtgagcaaaaggccagcaaaaggccaggaaccgtaaaaaggccgcgttgctggcgtt

SEQ ID NO: 450 - protein, 1566 aa, synthetic construct
EASPASGPRHLMDPHIFTSNFNNGIGRHKTYLCYEVERLDNGTSVKMDQHRGFLHNQAKNLLCGFYGRHAELRFLDLVPSLQLDPAQIYRVTWFISWSPCFSWGCAGEVRAFLQENTHVRLRIFAARIYDYDPLYKEALQMLRDAGAQVSIMTYDEFKHCWDTFVDHQGCPFQPWDGLDEHSQALSGRLRAILQNQGNSGGSSGGSSGSETPGTSESATPESSGGSSGGSRTEKENKELENLEINLRKEIAKAFKGNEGYKSLFKKDIIETILPEFLDDKDEIALVNSFNGFTTAFTGFFDNRENMFSEEAKSTSIAFRCINENLTRYISNMDIFEKVDAIFDKHEVQEIKEKILNSDYDVEDFFEGEFFNFVLTQEGIDVYNAIIGGFVTESGEKIKGLNEYINLYNQKTKQKLPKFKPLYKQVLSDRESLSFYGEGYTSDEEVLEVFRNTLNKNSEIFSSIKKLEKLFKNFDEYSSAGIFVKNGPAISTISKDIFGEWNVIRDKWNAEYDDIHLKKKAVVTEKYEDDRRKSFKKIGSFSLEQLQEYADADLSVVEKLKEIIIQKVDEIYKVYGSSEKLFDADFVLEKSLKKNDAVVAIMKDLLDSVKSFENYIKAFFGEGKETNRDESFYGDFVLAYDILLKVDHIYDAIRNYVTQKPYSKDKFKLYFQNPQFMGGWDKDKETDYRATILRYGSKYYLAIMDKKYAKCLQKIDKDDVNGNYEKINYKLLPGPNKMLPKVFFSKKWMAYYNPSEDIQKIYKNGTFKKGDMFNLNDCHKLIDFFKDSISRYPKWSNAYDFNFSETEKYKDIAGFYREVEEQGYKVSFESASKKEVDKLVEEGKLYMFQIYNKDFSDKSHGTPNLHTMYFKLLFDENNHGQIRLSGGAELFMRRASLKKEELVVHPANSPIANKNPDNPKKTTTLSYDVYKDKRFSEDQYELHIPIAINKCPKNIFKINTEVRVLLKHDDNPYVIGIARGERNLLYIVVVDGKGNIVEQYSLNEIINNFNGIRIKTDYHSLLDKKEKERFEARQNWTSIENIKELKAGYISQVVHKICELVEKYDAVIALEDLNSGFKNSRVKVEKQVYQKFEKMLIDKLNYMVDKKSNPCATGGALKGYQITNKFESFKSMSTQNGFIFYIPAWLTSKIDPSTGFVNLLKTKYTSIADSKKFISSFDRIMYVPEEDLFEFALDYKNFSRTDADYIKKWKLYSYGNRIRIFRNPKKNNVFDWEEVCLTSAYKELFNKYGINYQQGDIRALLCEQSDKAFYSSFMALMSLMLQMRNSITGRTDVDFLISPVKNSDGIFYDSRNYEAQENAILPKNADANGAYNIARKVLWAIGQFKKAEDEKLDKVKIAISNKEWLEYAQTSVKHGSSGSSGSSGSSGSSGSKLEKFTNCYSLSKTLRFKAIPVGKTQENIDNKRLLVEDEKRAEDYKGVKKLLDRYYLSFINDVLHSIKLKNLNNYISLFRKKTSGGSGGSGGSTNLSDIIEKETGKQLVIQESILMLPEEVEEVIGNKPESDILVHTAYDESTDENVMLLTSDAPEYKPWALVIQDSNGENKIKML

SEQ ID NO: 451 - protein, 1566 aa, synthetic construct
EASPASGPRHLMDPHIFTSNFNNGIGRHKTYLCYEVERLDNGTSVKMDQHRGFLHNQAKNLLCGFYGRHAELRFLDLVPSLQLDPAQIYRVTWFISWSPCFSWGCAGEVRAFLQENTHVRLRIFAARIYDYDPLYKEALQMLRDAGAQVSIMTYDEFKHCWDTFVDHQGCPFQPWDGLDEHSQALSGRLRAILQNQGNSGGSSGGSSGSETPGTSESATPESSGGSSGGSGYTSDEEVLEVFRNTLNKNSEIFSSIKKLEKLFKNFDEYSSAGIFVKNGPAISTISKDIFGEWNVIRDKWNAEYDDIHLKKKAVVTEKYEDDRRKSFKKIGSFSLEQLQEYADADLSVVEKLKEIIIQKVDEIYKVYGSSEKLFDADFVLEKSLKKNDAVVAIMKDLLDSVKSFENYIKAFFGEGKETNRDESFYGDFVLAYDILLKVDHIYDAIRNYVTQKPYSKDKFKLYFQNPQFMGGWDKDKETDYRATILRYGSKYYLAIMDKKYAKCLQKIDKDDVNGNYEKINYKLLPGPNKMLPKVFFSKKWMAYYNPSEDIQKIYKNGTFKKGDMFNLNDCHKLIDFFKDSISRYPKWSNAYDFNFSETEKYKDIAGFYREVEEQGYKVSFESASKKEVDKLVEEGKLYMFQIYNKDFSDKSHGTPNLHTMYFKLLFDENNHGQIRLSGGAELFMRRASLKKEELVVHPANSPIANKNPDNPKKTTTLSYDVYKDKRFSEDQYELHIPIAINKCPKNIFKINTEVRVLLKHDDNPYVIGIARGERNLLYIVVVDGKGNIVEQYSLNEIINNFNGIRIKTDYHSLLDKKEKERFEARQNWTSIENIKELKAGYISQVVHKICELVEKYDAVIALEDLNSGFKNSRVKVEKQVYQKFEKMLIDKLNYMVDKKSNPCATGGALKGYQITNKFESFKSMSTQNGFIFYIPAWLTSKIDPSTGFVNLLKTKYTSIADSKKFISSFDRIMYVPEEDLFEFALDYKNFSRTDADYIKKWKLYSYGNRIRIFRNPKKNNVFDWEEVCLTSAYKELFNKYGINYQQGDIRALLCEQSDKAFYSSFMALMSLMLQMRNSITGRTDVDFLISPVKNSDGIFYDSRNYEAQENAILPKNADANGAYNIARKVLWAIGQFKKAEDEKLDKVKIAISNKEWLEYAQTSVKHGSSGSSGSSGSSGSSGSKLEKFTNCYSLSKTLRFKAIPVGKTQENIDNKRLLVEDEKRAEDYKGVKKLLDRYYLSFINDVLHSIKLKNLNNYISLFRKKTRTEKENKELENLEINLRKEIAKAFKGNEGYKSLFKKDIIETILPEFLDDKDEIALVNSFNGFTTAFTGFFDNRENMFSEEAKSTSIAFRCINENLTRYISNMDIFEKVDAIFDKHEVQEIKEKILNSDYDVEDFFEGEFFNFVLTQEGIDVYNAIIGGFVTESGEKIKGLNEYINLYNQKTKQKLPKFKPLYKQVLSDRESLSFYGESGGSGGSGGSTNLSDIIEKETGKQLVIQESILMLPEEVEEVIGNKPESDILVHTAYDESTDENVMLLTSDAPEYKPWALVIQDSNGENKIKML

SEQ ID NO: 452 - protein, 1566 aa, synthetic construct
EASPASGPRHLMDPHIFTSNFNNGIGRHKTYLCYEVERLDNGTSVKMDQHRGFLHNQAKNLLCGFYGRHAELRFLDLVPSLQLDPAQIYRVTWFISWSPCFSWGCAGEVRAFLQENTHVRLRIFAARIYDYDPLYKEALQMLRDAGAQVSIMTYDEFKHCWDTFVDHQGCPFQPWDGLDEHSQALSGRLRAILQNQGNSGGSSGGSSGSETPGTSESATPESSGGSSGGSSDGIFYDSRNYEAQENAILPKNADANGAYNIARKVLWAIGQFKKAEDEKLDKVKIAISNKEWLEYAQTSVKHGSSGSSGSSGSSGSSGSKLEKFTNCYSLSKTLRFKAIPVGKTQENIDNKRLLVEDEKRAEDYKGVKKLLDRYYLSFINDVLHSIKLKNLNNYISLFRKKTRTEKENKELENLEINLRKEIAKAFKGNEGYKSLFKKDIIETILPEFLDDKDEIALVNSFNGFTTAFTGFFDNRENMFSEEAKSTSIAFRCINENLTRYISNMDIFEKVDAIFDKHEVQEIKEKILNSDYDVEDFFEGEFFNFVLTQEGIDVYNAIIGGFVTESGEKIKGLNEYINLYNQKTKQKLPKFKPLYKQVLSDRESLSFYGEGYTSDEEVLEVFRNTLNKNSEIFSSIKKLEKLFKNFDEYSSAGIFVKNGPAISTISKDIFGEWNVIRDKWNAEYDDIHLKKKAVVTEKYEDDRRKSFKKIGSFSLEQLQEYADADLSVVEKLKEIIIQKVDEIYKVYGSSEKLFDADFVLEKSLKKNDAVVAIMKDLLDSVKSFENYIKAFFGEGKETNRDESFYGDFVLAYDILLKVDHIYDAIRNYVTQKPYSKDKFKLYFQNPQFMGGWDKDKETDYRATILRYGSKYYLAIMDKKYAKCLQKIDKDDVNGNYEKINYKLLPGPNKMLPKVFFSKKWMAYYNPSEDIQKIYKNGTFKKGDMFNLNDCHKLIDFFKDSISRYPKWSNAYDFNFSETEKYKDIAGFYREVEEQGYKVSFESASKKEVDKLVEEGKLYMFQIYNKDFSDKSHGTPNLHTMYFKLLFDENNHGQIRLSGGAELFMRRASLKKEELVVHPANSPIANKNPDNPKKTTTLSYDVYKDKRFSEDQYELHIPIAINKCPKNIFKINTEVRVLLKHDDNPYVIGIARGERNLLYIVVVDGKGNIVEQYSLNEIINNFNGIRIKTDYHSLLDKKEKERFEARQNWTSIENIKELKAGYISQVVHKICELVEKYDAVIALEDLNSGFKNSRVKVEKQVYQKFEKMLIDKLNYMVDKKSNPCATGGALKGYQITNKFESFKSMSTQNGFIFYIPAWLTSKIDPSTGFVNLLKTKYTSIADSKKFISSFDRIMYVPEEDLFEFALDYKNFSRTDADYIKKWKLYSYGNRIRIFRNPKKNNVFDWEEVCLTSAYKELFNKYGINYQQGDIRALLCEQSDKAFYSSFMALMSLMLQMRNSITGRTDVDFLISPVKNSGGSGGSGGSTNLSDIIEKETGKQLVIQESILMLPEEVEEVIGNKPESDILVHTAYDESTDENVMLLTSDAPEYKPWALVIQDSNGENKIKML

SEQ ID NO: 453 - protein, 1566 aa, synthetic construct
EASPASGPRHLMDPHIFTSNFNNGIGRHKTYLCYEVERLDNGTSVKMDQHRGFLHNQAKNLLCGFYGRHAELRFLDLVPSLQLDPAQIYRVTWFISWSPCFSWGCAGEVRAFLQENTHVRLRIFAARIYDYDPLYKEALQMLRDAGAQVSIMTYDEFKHCWDTFVDHQGCPFQPWDGLDEHSQALSGRLRAILQNQGNSGGSSGGSSGSETPGTSESATPESSGGSSGGSKDKFKLYFQNPQFMGGWDKDKETDYRATILRYGSKYYLAIMDKKYAKCLQKIDKDDVNGNYEKINYKLLPGPNKMLPKVFFSKKWMAYYNPSEDIQKIYKNGTFKKGDMFNLNDCHKLIDFFKDSISRYPKWSNAYDFNFSETEKYKDIAGFYREVEEQGYKVSFESASKKEVDKLVEEGKLYMFQIYNKDFSDKSHGTPNLHTMYFKLLFDENNHGQIRLSGGAELFMRRASLKKEELVVHPANSPIANKNPDNPKKTTTLSYDVYKDKRFSEDQYELHIPIAINKCPKNIFKINTEVRVLLKHDDNPYVIGIARGERNLLYIVVVDGKGNIVEQYSLNEIINNFNGIRIKTDYHSLLDKKEKERFEARQNWTSIENIKELKAGYISQVVHKICELVEKYDAVIALEDLNSGFKNSRVKVEKQVYQKFEKMLIDKLNYMVDKKSNPCATGGALKGYQITNKFESFKSMSTQNGFIFYIPAWLTSKIDPSTGFVNLLKTKYTSIADSKKFISSFDRIMYVPEEDLFEFALDYKNFSRTDADYIKKWKLYSYGNRIRIFRNPKKNNVFDWEEVCLTSAYKELFNKYGINYQQGDIRALLCEQSDKAFYSSFMALMSLMLQMRNSITGRTDVDFLISPVKNSDGIFYDSRNYEAQENAILPKNADANGAYNIARKVLWAIGQFKKAEDEKLDKVKIAISNKEWLEYAQTSVKHGSSGSSGSSGSSGSSGSKLEKFTNCYSLSKTLRFKAIPVGKTQENIDNKRLLVEDEKRAEDYKGVKKLLDRYYLSFINDVLHSIKLKNLNNYISLFRKKTRTEKENKELENLEINLRKEIAKAFKGNEGYKSLFKKDIIETILPEFLDDKDEIALVNSFNGFTTAFTGFFDNRENMFSEEAKSTSIAFRCINENLTRYISNMDIFEKVDAIFDKHEVQEIKEKILNSDYDVEDFFEGEFFNFVLTQEGIDVYNAIIGGFVTESGEKIKGLNEYINLYNQKTKQKLPKFKPLYKQVLSDRESLSFYGEGYTSDEEVLEVFRNTLNKNSEIFSSIKKLEKLFKNFDEYSSAGIFVKNGPAISTISKDIFGEWNVIRDKWNAEYDDIHLKKKAVVTEKYEDDRRKSFKKIGSFSLEQLQEYADADLSVVEKLKEIIIQKVDEIYKVYGSSEKLFDADFVLEKSLKKNDAVVAIMKDLLDSVKSFENYIKAFFGEGKETNRDESFYGDFVLAYDILLKVDHIYDAIRNYVTQKPYSSGGSGGSGGSTNLSDIIEKETGKQLVIQESILMLPEEVEEVIGNKPESDILVHTAYDESTDENVMLLTSDAPEYKPWALVIQDSNGENKIKML

SEQ ID NO: 454 - protein, 1566 aa, synthetic construct
EASPASGPRHLMDPHIFTSNFNNGIGRHKTYLCYEVERLDNGTSVKMDQHRGFLHNQAKNLLCGFYGRHAELRFLDLVPSLQLDPAQIYRVTWFISWSPCFSWGCAGEVRAFLQENTHVRLRIFAARIYDYDPLYKEALQMLRDAGAQVSIMTYDEFKHCWDTFVDHQGCPFQPWDGLDEHSQALSGRLRAILQNQGNSGGSSGGSSGSETPGTSESATPESSGGSSGGSKSLKKNDAVVAIMKDLLDSVKSFENYIKAFFGEGKETNRDESFYGDFVLAYDILLKVDHIYDAIRNYVTQKPYSKDKFKLYFQNPQFMGGWDKDKETDYRATILRYGSKYYLAIMDKKYAKCLQKIDKDDVNGNYEKINYKLLPGPNKMLPKVFFSKKWMAYYNPSEDIQKIYKNGTFKKGDMFNLNDCHKLIDFFKDSISRYPKWSNAYDFNFSETEKYKDIAGFYREVEEQGYKVSFESASKKEVDKLVEEGKLYMFQIYNKDFSDKSHGTPNLHTMYFKLLFDENNHGQIRLSGGAELFMRRASLKKEELVVHPANSPIANKNPDNPKKTTTLSYDVYKDKRFSEDQYELHIPIAINKCPKNIFKINTEVRVLLKHDDNPYVIGIARGERNLLYIVVVDGKGNIVEQYSLNEIINNFNGIRIKTDYHSLLDKKEKERFEARQNWTSIENIKELKAGYISQVVHKICELVEKYDAVIALEDLNSGFKNSRVKVEKQVYQKFEKMLIDKLNYMVDKKSNPCATGGALKGYQITNKFESFKSMSTQNGFIFYIPAWLTSKIDPSTGFVNLLKTKYTSIADSKKFISSFDRIMYVPEEDLFEFALDYKNFSRTDADYIKKWKLYSYGNRIRIFRNPKKNNVFDWEEVCLTSAYKELFNKYGINYQQGDIRALLCEQSDKAFYSSFMALMSLMLQMRNSITGRTDVDFLISPVKNSDGIFYDSRNYEAQENAILPKNADANGAYNIARKVLWAIGQFKKAEDEKLDKVKIAISNKEWLEYAQTSVKHGSSGSSGSSGSSGSSGSKLEKFTNCYSLSKTLRFKAIPVGKTQENIDNKRLLVEDEKRAEDYKGVKKLLDRYYLSFINDVLHSIKLKNLNNYISLFRKKTRTEKENKELENLEINLRKEIAKAFKGNEGYKSLFKKDIIETILPEFLDDKDEIALVNSFNGFTTAFTGFFDNRENMFSEEAKSTSIAFRCINENLTRYISNMDIFEKVDAIFDKHEVQEIKEKILNSDYDVEDFFEGEFFNFVLTQEGIDVYNAIIGGFVTESGEKIKGLNEYINLYNQKTKQKLPKFKPLYKQVLSDRESLSFYGEGYTSDEEVLEVFRNTLNKNSEIFSSIKKLEKLFKNFDEYSSAGIFVKNGPAISTISKDIFGEWNVIRDKWNAEYDDIHLKKKAVVTEKYEDDRRKSFKKIGSFSLEQLQEYADADLSVVEKLKEIIIQKVDEIYKVYGSSEKLFDADFVLESGGSGGSGGSTNLSDIIEKETGKQLVIQESILMLPEEVEEVIGNKPESDILVHTAYDESTDENVMLLTSDAPEYKPWALVIQDSNGENKIKML

SEQ ID NO: 455 - protein, 1566 aa, synthetic construct
EASPASGPRHLMDPHIFTSNFNNGIGRHKTYLCYEVERLDNGTSVKMDQHRGFLHNQAKNLLCGFYGRHAELRFLDLVPSLQLDPAQIYRVTWFISWSPCFSWGCAGEVRAFLQENTHVRLRIFAARIYDYDPLYKEALQMLRDAGAQVSIMTYDEFKHCWDTFVDHQGCPFQPWDGLDEHSQALSGRLRAILQNQGNSGGSSGGSSGSETPGTSESATPESSGGSSGGSSDKAFYSSFMALMSLMLQMRNSITGRTDVDFLISPVKNSDGIFYDSRNYEAQENAILPKNADANGAYNIARKVLWAIGQFKKAEDEKLDKVKIAISNKEWLEYAQTSVKHGSSGSSGSSGSSGSSGSKLEKFTNCYSLSKTLRFKAIPVGKTQENIDNKRLLVEDEKRAEDYKGVKKLLDRYYLSFINDVLHSIKLKNLNNYISLFRKKTRTEKENKELENLEINLRKEIAKAFKGNEGYKSLFKKDIIETILPEFLDDKDEIALVNSFNGFTTAFTGFFDNRENMFSEEAKSTSIAFRCINENLTRYISNMDIFEKVDAIFDKHEVQEIKEKILNSDYDVEDFFEGEFFNFVLTQEGIDVYNAIIGGFVTESGEKIKGLNEYINLYNQKTKQKLPKFKPLYKQVLSDRESLSFYGEGYTSDEEVLEVFRNTLNKNSEIFSSIKKLEKLFKNFDEYSSAGIFVKNGPAISTISKDIFGEWNVIRDKWNAEYDDIHLKKKAVVTEKYEDDRRKSFKKIGSFSLEQLQEYADADLSVVEKLKEIIIQKVDEIYKVYGSSEKLFDADFVLEKSLKKNDAVVAIMKDLLDSVKSFENYIKAFFGEGKETNRDESFYGDFVLAYDILLKVDHIYDAIRNYVTQKPYSKDKFKLYFQNPQFMGGWDKDKETDYRATILRYGSKYYLAIMDKKYAKCLQKIDKDDVNGNYEKINYKLLPGPNKMLPKVFFSKKWMAYYNPSEDIQKIYKNGTFKKGDMFNLNDCHKLIDFFKDSISRYPKWSNAYDFNFSETEKYKDIAGFYREVEEQGYKVSFESASKKEVDKLVEEGKLYMFQIYNKDFSDKSHGTPNLHTMYFKLLFDENNHGQIRLSGGAELFMRRASLKKEELVVHPANSPIANKNPDNPKKTTTLSYDVYKDKRFSEDQYELHIPIAINKCPKNIFKINTEVRVLLKHDDNPYVIGIARGERNLLYIVVVDGKGNIVEQYSLNEIINNFNGIRIKTDYHSLLDKKEKERFEARQNWTSIENIKELKAGYISQVVHKICELVEKYDAVIALEDLNSGFKNSRVKVEKQVYQKFEKMLIDKLNYMVDKKSNPCATGGALKGYQITNKFESFKSMSTQNGFIFYIPAWLTSKIDPSTGFVNLLKTKYTSIADSKKFISSFDRIMYVPEEDLFEFALDYKNFSRTDADYIKKWKLYSYGNRIRIFRNPKKNNVFDWEEVCLTSAYKELFNKYGINYQQGDIRALLCEQSGGSGGSGGSTNLSDIIEKETGKQLVIQESILMLPEEVEEVIGNKPESDILVHTAYDESTDENVMLLTSDAPEYKPWALVIQDSNGENKIKML

SEQ ID NO: 456 - protein, 1566 aa, synthetic construct
TNLSDIIEKETGKQLVIQESILMLPEEVEEVIGNKPESDILVHTAYDESTDENVMLLTSDAPEYKPWALVIQDSNGENKIKMLSGGSGGSGGSRTEKENKELENLEINLRKEIAKAFKGNEGYKSLFKKDIIETILPEFLDDKDEIALVNSFNGFTTAFTGFFDNRENMFSEEAKSTSIAFRCINENLTRYISNMDIFEKVDAIFDKHEVQEIKEKILNSDYDVEDFFEGEFFNFVLTQEGIDVYNAIIGGFVTESGEKIKGLNEYINLYNQKTKQKLPKFKPLYKQVLSDRESLSFYGEGYTSDEEVLEVFRNTLNKNSEIFSSIKKLEKLFKNFDEYSSAGIFVKNGPAISTISKDIFGEWNVIRDKWNAEYDDIHLKKKAVVTEKYEDDRRKSFKKIGSFSLEQLQEYADADLSVVEKLKEIIIQKVDEIYKVYGSSEKLFDADFVLEKSLKKNDAVVAIMKDLLDSVKSFENYIKAFFGEGKETNRDESFYGDFVLAYDILLKVDHIYDAIRNYVTQKPYSKDKFKLYFQNPQFMGGWDKDKETDYRATILRYGSKYYLAIMDKKYAKCLQKIDKDDVNGNYEKINYKLLPGPNKMLPKVFFSKKWMAYYNPSEDIQKIYKNGTFKKGDMFNLNDCHKLIDFFKDSISRYPKWSNAYDFNFSETEKYKDIAGFYREVEEQGYKVSFESASKKEVDKLVEEGKLYMFQIYNKDFSDKSHGTPNLHTMYFKLLFDENNHGQIRLSGGAELFMRRASLKKEELVVHPANSPIANKNPDNPKKTTTLSYDVYKDKRFSEDQYELHIPIAINKCPKNIFKINTEVRVLLKHDDNPYVIGIARGERNLLYIVVVDGKGNIVEQYSLNEIINNFNGIRIKTDYHSLLDKKEKERFEARQNWTSIENIKELKAGYISQVVHKICELVEKYDAVIALEDLNSGFKNSRVKVEKQVYQKFEKMLIDKLNYMVDKKSNPCATGGALKGYQITNKFESFKSMSTQNGFIFYIPAWLTSKIDPSTGFVNLLKTKYTSIADSKKFISSFDRIMYVPEEDLFEFALDYKNFSRTDADYIKKWKLYSYGNRIRIFRNPKKNNVFDWEEVCLTSAYKELFNKYGINYQQGDIRALLCEQSDKAFYSSFMALMSLMLQMRNSITGRTDVDFLISPVKNSDGIFYDSRNYEAQENAILPKNADANGAYNIARKVLWAIGQFKKAEDEKLDKVKIAISNKEWLEYAQTSVKHGSSGSSGSSGSSGSSGSKLEKFTNCYSLSKTLRFKAIPVGKTQENIDNKRLLVEDEKRAEDYKGVKKLLDRYYLSFINDVLHSIKLKNLNNYISLFRKKTSGGSSGGSSGSETPGTSESATPESSGGSSGGSEASPASGPRHLMDPHIFTSNFNNGIGRHKTYLCYEVERLDNGTSVKMDQHRGFLHNQAKNLLCGFYGRHAELRFLDLVPSLQLDPAQIYRVTWFISWSPCFSWGCAGEVRAFLQENTHVRLRIFAARIYDYDPLYKEALQMLRDAGAQVSIMTYDEFKHCWDTFVDHQGCPFQPWDGLDEHSQALSGRLRAILQNQGN

SEQ ID NO: 457 - protein, 1566 aa, synthetic construct
TNLSDIIEKETGKQLVIQESILMLPEEVEEVIGNKPESDILVHTAYDESTDENVMLLTSDAPEYKPWALVIQDSNGENKIKMLSGGSGGSGGSGYTSDEEVLEVFRNTLNKNSEIFSSIKKLEKLFKNFDEYSSAGIFVKNGPAISTISKDIFGEWNVIRDKWNAEYDDIHLKKKAVVTEKYEDDRRKSFKKIGSFSLEQLQEYADADLSVVEKLKEIIIQKVDEIYKVYGSSEKLFDADFVLEKSLKKNDAVVAIMKDLLDSVKSFENYIKAFFGEGKETNRDESFYGDFVLAYDILLKVDHIYDAIRNYVTQKPYSKDKFKLYFQNPQFMGGWDKDKETDYRATILRYGSKYYLAIMDKKYAKCLQKIDKDDVNGNYEKINYKLLPGPNKMLPKVFFSKKWMAYYNPSEDIQKIYKNGTFKKGDMFNLNDCHKLIDFFKDSISRYPKWSNAYDFNFSETEKYKDIAGFYREVEEQGYKVSFESASKKEVDKLVEEGKLYMFQIYNKDFSDKSHGTPNLHTMYFKLLFDENNHGQIRLSGGAELFMRRASLKKEELVVHPANSPIANKNPDNPKKTTTLSYDVYKDKRFSEDQYELHIPIAINKCPKNIFKINTEVRVLLKHDDNPYVIGIARGERNLLYIVVVDGKGNIVEQYSLNEIINNFNGIRIKTDYHSLLDKKEKERFEARQNWTSIENIKELKAGYISQVVHKICELVEKYDAVIALEDLNSGFKNSRVKVEKQVYQKFEKMLIDKLNYMVDKKSNPCATGGALKGYQITNKFESFKSMSTQNGFIFYIPAWLTSKIDPSTGFVNLLKTKYTSIADSKKFISSFDRIMYVPEEDLFEFALDYKNFSRTDADYIKKWKLYSYGNRIRIFRNPKKNNVFDWEEVCLTSAYKELFNKYGINYQQGDIRALLCEQSDKAFYSSFMALMSLMLQMRNSITGRTDVDFLISPVKNSDGIFYDSRNYEAQENAILPKNADANGAYNIARKVLWAIGQFKKAEDEKLDKVKIAISNKEWLEYAQTSVKHGSSGSSGSSGSSGSSGSKLEKFTNCYSLSKTLRFKAIPVGKTQENIDNKRLLVEDEKRAEDYKGVKKLLDRYYLSFINDVLHSIKLKNLNNYISLFRKKTRTEKENKELENLEINLRKEIAKAFKGNEGYKSLFKKDIIETILPEFLDDKDEIALVNSFNGFTTAFTGFFDNRENMFSEEAKSTSIAFRCINENLTRYISNMDIFEKVDAIFDKHEVQEIKEKILNSDYDVEDFFEGEFFNFVLTQEGIDVYNAIIGGFVTESGEKIKGLNEYINLYNQKTKQKLPKFKPLYKQVLSDRESLSFYGESGGSSGGSSGSETPGTSESATPESSGGSSGGSEASPASGPRHLMDPHIFTSNFNNGIGRHKTYLCYEVERLDNGTSVKMDQHRGFLHNQAKNLLCGFYGRHAELRFLDLVPSLQLDPAQIYRVTWFISWSPCFSWGCAGEVRAFLQENTHVRLRIFAARIYDYDPLYKEALQMLRDAGAQVSIMTYDEFKHCWDTFVDHQGCPFQPWDGLDEHSQALSGRLRAILQNQGN

SEQ ID NO: 458 - protein, 1566 aa, synthetic construct
TNLSDIIEKETGKQLVIQESILMLPEEVEEVIGNKPESDILVHTAYDESTDENVMLLTSDAPEYKPWALVIQDSNGENKIKMLSGGSGGSGGSSDGIFYDSRNYEAQENAILPKNADANGAYNIARKVLWAIGQFKKAEDEKLDKVKIAISNKEWLEYAQTSVKHGSSGSSGSSGSSGSSGSKLEKFTNCYSLSKTLRFKAIPVGKTQENIDNKRLLVEDEKRAEDYKGVKKLLDRYYLSFINDVLHSIKLKNLNNYISLFRKKTRTEKENKELENLEINLRKEIAKAFKGNEGYKSLFKKDIIETILPEFLDDKDEIALVNSFNGFTTAFTGFFDNRENMFSEEAKSTSIAFRCINENLTRYISNMDIFEKVDAIFDKHEVQEIKEKILNSDYDVEDFFEGEFFNFVLTQEGIDVYNAIIGGFVTESGEKIKGLNEYINLYNQKTKQKLPKFKPLYKQVLSDRESLSFYGEGYTSDEEVLEVFRNTLNKNSEIFSSIKKLEKLFKNFDEYSSAGIFVKNGPAISTISKDIFGEWNVIRDKWNAEYDDIHLKKKAVVTEKYEDDRRKSFKKIGSFSLEQLQEYADADLSVVEKLKEIIIQKVDEIYKVYGSSEKLFDADFVLEKSLKKNDAVVAIMKDLLDSVKSFENYIKAFFGEGKETNRDESFYGDFVLAYDILLKVDHIYDAIRNYVTQKPYSKDKFKLYFQNPQFMGGWDKDKETDYRATILRYGSKYYLAIMDKKYAKCLQKIDKDDVNGNYEKINYKLLPGPNKMLPKVFFSKKWMAYYNPSEDIQKIYKNGTFKKGDMFNLNDCHKLIDFFKDSISRYPKWSNAYDFNFSETEKYKDIAGFYREVEEQGYKVSFESASKKEVDKLVEEGKLYMFQIYNKDFSDKSHGTPNLHTMYFKLLFDENNHGQIRLSGGAELFMRRASLKKEELVVHPANSPIANKNPDNPKKTTTLSYDVYKDKRFSEDQYELHIPIAINKCPKNIFKINTEVRVLLKHDDNPYVIGIARGERNLLYIVVVDGKGNIVEQYSLNEIINNFNGIRIKTDYHSLLDKKEKERFEARQNWTSIENIKELKAGYISQVVHKICELVEKYDAVIALEDLNSGFKNSRVKVEKQVYQKFEKMLIDKLNYMVDKKSNPCATGGALKGYQITNKFESFKSMSTQNGFIFYIPAWLTSKIDPSTGFVNLLKTKYTSIADSKKFISSFDRIMYVPEEDLFEFALDYKNFSRTDADYIKKWKLYSYGNRIRIFRNPKKNNVFDWEEVCLTSAYKELFNKYGINYQQGDIRALLCEQSDKAFYSSFMALMSLMLQMRNSITGRTDVDFLISPVKNSGGSSGGSSGSETPGTSESATPESSGGSSGGSEASPASGPRHLMDPHIFTSNFNNGIGRHKTYLCYEVERLDNGTSVKMDQHRGFLHNQAKNLLCGFYGRHAELRFLDLVPSLQLDPAQIYRVTWFISWSPCFSWGCAGEVRAFLQENTHVRLRIFAARIYDYDPLYKEALQMLRDAGAQVSIMTYDEFKHCWDTFVDHQGCPFQPWDGLDEHSQALSGRLRAILQNQGN

SEQ ID NO: 459 - protein, 1566 aa, synthetic construct
TNLSDIIEKETGKQLVIQESILMLPEEVEEVIGNKPESDILVHTAYDESTDENVMLLTSDAPEYKPWALVIQDSNGENKIKMLSGGSGGSGGSKDKFKLYFQNPQFMGGWDKDKETDYRATILRYGSKYYLAIMDKKYAKCLQKIDKDDVNGNYEKINYKLLPGPNKMLPKVFFSKKWMAYYNPSEDIQKIYKNGTFKKGDMFNLNDCHKLIDFFKDSISRYPKWSNAYDFNFSETEKYKDIAGFYREVEEQGYKVSFESASKKEVDKLVEEGKLYMFQIYNKDFSDKSHGTPNLHTMYFKLLFDENNHGQIRLSGGAELFMRRASLKKEELVVHPANSPIANKNPDNPKKTTTLSYDVYKDKRFSEDQYELHIPIAINKCPKNIFKINTEVRVLLKHDDNPYVIGIARGERNLLYIVVVDGKGNIVEQYSLNEIINNFNGIRIKTDYHSLLDKKEKERFEARQNWTSIENIKELKAGYISQVVHKICELVEKYDAVIALEDLNSGFKNSRVKVEKQVYQKFEKMLIDKLNYMVDKKSNPCATGGALKGYQITNKFESFKSMSTQNGFIFYIPAWLTSKIDPSTGFVNLLKTKYTSIADSKKFISSFDRIMYVPEEDLFEFALDYKNFSRTDADYIKKWKLYSYGNRIRIFRNPKKNNVFDWEEVCLTSAYKELFNKYGINYQQGDIRALLCEQSDKAFYSSFMALMSLMLQMRNSITGRTDVDFLISPVKNSDGIFYDSRNYEAQENAILPKNADANGAYNIARKVLWAIGQFKKAEDEKLDKVKIAISNKEWLEYAQTSVKHGSSGSSGSSGSSGSSGSKLEKFTNCYSLSKTLRFKAIPVGKTQENIDNKRLLVEDEKRAEDYKGVKKLLDRYYLSFINDVLHSIKLKNLNNYISLFRKKTRTEKENKELENLEINLRKEIAKAFKGNEGYKSLFKKDIIETILPEFLDDKDEIALVNSFNGFTTAFTGFFDNRENMFSEEAKSTSIAFRCINENLTRYISNMDIFEKVDAIFDKHEVQEIKEKILNSDYDVEDFFEGEFFNFVLTQEGIDVYNAIIGGFVTESGEKIKGLNEYINLYNQKTKQKLPKFKPLYKQVLSDRESLSFYGEGYTSDEEVLEVFRNTLNKNSEIFSSIKKLEKLFKNFDEYSSAGIFVKNGPAISTISKDIFGEWNVIRDKWNAEYDDIHLKKKAVVTEKYEDDRRKSFKKIGSFSLEQLQEYADADLSVVEKLKEIIIQKVDEIYKVYGSSEKLFDADFVLEKSLKKNDAVVAIMKDLLDSVKSFENYIKAFFGEGKETNRDESFYGDFVLAYDILLKVDHIYDAIRNYVTQKPYSSGGSSGGSSGSETPGTSESATPESSGGSSGGSEASPASGPRHLMDPHIFTSNFNNGIGRHKTYLCYEVERLDNGTSVKMDQHRGFLHNQAKNLLCGFYGRHAELRFLDLVPSLQLDPAQIYRVTWFISWSPCFSWGCAGEVRAFLQENTHVRLRIFAARIYDYDPLYKEALQMLRDAGAQVSIMTYDEFKHCWDTFVDHQGCPFQPWDGLDEHSQALSGRLRAILQNQGN

SEQ ID NO: 460 - protein, 1566 aa, synthetic construct
TNLSDIIEKETGKQLVIQESILMLPEEVEEVIGNKPESDILVHTAYDESTDENVMLLTSDAPEYKPWALVIQDSNGENKIKMLSGGSGGSGGSKSLKKNDAVVAIMKDLLDSVKSFENYIKAFFGEGKETNRDESFYGDFVLAYDILLKVDHIYDAIRNYVTQKPYSKDKFKLYFQNPQFMGGWDKDKETDYRATILRYGSKYYLAIMDKKYAKCLQKIDKDDVNGNYEKINYKLLPGPNKMLPKVFFSKKWMAYYNPSEDIQKIYKNGTFKKGDMFNLNDCHKLIDFFKDSISRYPKWSNAYDFNFSETEKYKDIAGFYREVEEQGYKVSFESASKKEVDKLVEEGKLYMFQIYNKDFSDKSHGTPNLHTMYFKLLFDENNHGQIRLSGGAELFMRRASLKKEELVVHPANSPIANKNPDNPKKTTTLSYDVYKDKRFSEDQYELHIPIAINKCPKNIFKINTEVRVLLKHDDNPYVIGIARGERNLLYIVVVDGKGNIVEQYSLNEIINNFNGIRIKTDYHSLLDKKEKERFEARQNWTSIENIKELKAGYISQVVHKICELVEKYDAVIALEDLNSGFKNSRVKVEKQVYQKFEKMLIDKLNYMVDKKSNPCATGGALKGYQITNKFESFKSMSTQNGFIFYIPAWLTSKIDPSTGFVNLLKTKYTSIADSKKFISSFDRIMYVPEEDLFEFALDYKNFSRTDADYIKKWKLYSYGNRIRIFRNPKKNNVFDWEEVCLTSAYKELFNKYGINYQQGDIRALLCEQSDKAFYSSFMALMSLMLQMRNSITGRTDVDFLISPVKNSDGIFYDSRNYEAQENAILPKNADANGAYNIARKVLWAIGQFKKAEDEKLDKVKIAISNKEWLEYAQTSVKHGSSGSSGSSGSSGSSGSKLEKFTNCYSLSKTLRFKAIPVGKTQENIDNKRLLVEDEKRAEDYKGVKKLLDRYYLSFINDVLHSIKLKNLNNYISLFRKKTRTEKENKELENLEINLRKEIAKAFKGNEGYKSLFKKDIIETILPEFLDDKDEIALVNSFNGFTTAFTGFFDNRENMFSEEAKSTSIAFRCINENLTRYISNMDIFEKVDAIFDKHEVQEIKEKILNSDYDVEDFFEGEFFNFVLTQEGIDVYNAIIGGFVTESGEKIKGLNEYINLYNQKTKQKLPKFKPLYKQVLSDRESLSFYGEGYTSDEEVLEVFRNTLNKNSEIFSSIKKLEKLFKNFDEYSSAGIFVKNGPAISTISKDIFGEWNVIRDKWNAEYDDIHLKKKAVVTEKYEDDRRKSFKKIGSFSLEQLQEYADADLSVVEKLKEIIIQKVDEIYKVYGSSEKLFDADFVLESGGSSGGSSGSETPGTSESATPESSGGSSGGSEASPASGPRHLMDPHIFTSNFNNGIGRHKTYLCYEVERLDNGTSVKMDQHRGFLHNQAKNLLCGFYGRHAELRFLDLVPSLQLDPAQIYRVTWFISWSPCFSWGCAGEVRAFLQENTHVRLRIFAARIYDYDPLYKEALQMLRDAGAQVSIMTYDEFKHCWDTFVDHQGCPFQPWDGLDEHSQALSGRLRAILQNQGN

SEQ ID NO: 461 - protein, 1566 aa, synthetic construct
TNLSDIIEKETGKQLVIQESILMLPEEVEEVIGNKPESDILVHTAYDESTDENVMLLTSDAPEYKPWALVIQDSNGENKIKMLSGGSGGSGGSSDKAFYSSFMALMSLMLQMRNSITGRTDVDFLISPVKNSDGIFYDSRNYEAQENAILPKNADANGAYNIARKVLWAIGQFKKAEDEKLDKVKIAISNKEWLEYAQTSVKHGSSGSSGSSGSSGSSGSKLEKFTNCYSLSKTLRFKAIPVGKTQENIDNKRLLVEDEKRAEDYKGVKKLLDRYYLSFINDVLHSIKLKNLNNYISLFRKKTRTEKENKELENLEINLRKEIAKAFKGNEGYKSLFKKDIIETILPEFLDDKDEIALVNSFNGFTTAFTGFFDNRENMFSEEAKSTSIAFRCINENLTRYISNMDIFEKVDAIFDKHEVQEIKEKILNSDYDVEDFFEGEFFNFVLTQEGIDVYNAIIGGFVTESGEKIKGLNEYINLYNQKTKQKLPKFKPLYKQVLSDRESLSFYGEGYTSDEEVLEVFRNTLNKNSEIFSSIKKLEKLFKNFDEYSSAGIFVKNGPAISTISKDIFGEWNVIRDKWNAEYDDIHLKKKAVVTEKYEDDRRKSFKKIGSFSLEQLQEYADADLSVVEKLKEIIIQKVDEIYKVYGSSEKLFDADFVLEKSLKKNDAVVAIMKDLLDSVKSFENYIKAFFGEGKETNRDESFYGDFVLAYDILLKVDHIYDAIRNYVTQKPYSKDKFKLYFQNPQFMGGWDKDKETDYRATILRYGSKYYLAIMDKKYAKCLQKIDKDDVNGNYEKINYKLLPGPNKMLPKVFFSKKWMAYYNPSEDIQKIYKNGTFKKGDMFNLNDCHKLIDFFKDSISRYPKWSNAYDFNFSETEKYKDIAGFYREVEEQGYKVSFESASKKEVDKLVEEGKLYMFQIYNKDFSDKSHGTPNLHTMYFKLLFDENNHGQIRLSGGAELFMRRASLKKEELVVHPANSPIANKNPDNPKKTTTLSYDVYKDKRFSEDQYELHIPIAINKCPKNIFKINTEVRVLLKHDDNPYVIGIARGERNLLYIVVVDGKGNIVEQYSLNEIINNFNGIRIKTDYHSLLDKKEKERFEARQNWTSIENIKELKAGYISQVVHKICELVEKYDAVIALEDLNSGFKNSRVKVEKQVYQKFEKMLIDKLNYMVDKKSNPCATGGALKGYQITNKFESFKSMSTQNGFIFYIPAWLTSKIDPSTGFVNLLKTKYTSIADSKKFISSFDRIMYVPEEDLFEFALDYKNFSRTDADYIKKWKLYSYGNRIRIFRNPKKNNVFDWEEVCLTSAYKELFNKYGINYQQGDIRALLCEQSGGSSGGSSGSETPGTSESATPESSGGSSGGSEASPASGPRHLMDPHIFTSNFNNGIGRHKTYLCYEVERLDNGTSVKMDQHRGFLHNQAKNLLCGFYGRHAELRFLDLVPSLQLDPAQIYRVTWFISWSPCFSWGCAGEVRAFLQENTHVRLRIFAARIYDYDPLYKEALQMLRDAGAQVSIMTYDEFKHCWDTFVDHQGCPFQPWDGLDEHSQALSGRLRAILQNQGN

SEQ ID NO: 462 - DNA, 4831 bp, synthetic construct
  source 1..4831: mol_type = other DNA
gaggcctcccccgcatcaggacctagacacctgatggatccccatattttcacatctaacttcaacaacggaatcggcagacacaagacctacctgtgctatgaggtggaaaggctggataacggaacctctgtgaagatggaccagcacaggtaagtatcaaggttacaagacaggtttaaggagaccaatagaaactgggcttgtcgagacagagaagactcttgcgtttctgataggcacctattggtcttactgacatccactttgcctttctctccacaggggcttcctgcataaccaggccaagaatctgctgtgcggtttctacgggagacatgcagaactgaggtttctggatctggtgccatccctgcagctggaccccgctcagatctacagagtgacttggttcatctcttggagcccttgcttttcatggggatgtgctggcgaggtgagggccttccttcaggaaaacacacacgtgagactgaggatttttgctgccagaatctacgattatgacccactgtacaaggaagctctgcagatgctgagggatgcaggcgctcaggtgagcattatgacctatgacgaattcaagcactgctgggatacttttgtggaccatcagggttgtccttttcagccatgggatgggctggacgagcattctcaggcactgagcggtagactgagggctatcctgcagaaccaggggaattctggtggttcttctggtggttctagcggcagcgagactcccgggacctcagagtccgccacacccgaaagttctggtggttcttctggtggttctcgcaccgagaaggagaacaaggagctggagaacctggagatcaacctccgcaaggaaatcgccaaagcgttcaagggcaatgaagggtacaagagcctcttcaagaaagacatcatcgaaactatcctcccagagtttctcgatgacaaggacgagatcgcgctggtgaactcctttaacgggttcacaaccgcgtttaccggcttctttgataacagggaaaatatgttctccgaggaggccaagtccaccagcatcgccttcaggtgtatcaacgagaacctcacccgctacatttccaatatggacattttcgagaaggtggatgcgatcttcgataagcacgaggtgcaggagatcaaagagaagattctcaattccgattatgacgtcgaggatttcttcgaaggggagttctttaattttgtgctcacacaagagggcattgacgtgtacaacgcgattatcgggggcttcgtcacagagtccggggagaagattaaggggctgaatgagtacatcaatctgtacaatcagaagaccaagcagaaactgccgaaattcaagccgctctacaagcaagtcctgtccgatagggaaagcctctccttctacggcgagggctataccagcgacgaggaggtgctggaagtcttccgcaacacactgaataagaatagcgagattttctcctccatcaagaagctcgagaagctctttaagaactttgacgagtacagctccgccgggattttcgtgaagaacgggccggcgatcagcaccatctccaaggacatctttggcgagtggaacgtcatcagggacaagtggaacgccgagtacgacgacatccacctgaagaagaaggcggtggtgaccgagaagtatgaggacgatcgcaggaagtccttcaaaaaaatcggctccttcagcctcgaacagctccaggagtatgccgatgcggatctgtccgtcgtcgagaagctgaaggaaatcatcattcagaaggtcgacgagatctataaagtgtacgggtccagcgagaagctgttcgacgccgactttgtgctcgagaagtccctcaaaaagaatgacgccgtggtggccattatgaaagacctgctcgactccgtgaagtccttcgaaaattacattaaagcgttctttggggaggggaaggaaactaacagggatgagtccttctatggcgactttgtcctcgcgtacgacatcctgctgaaggtcgaccacatttacgacgcgatccgcaactacgtgacacagaagccgtactccaaagacaagttcaagctgtacttccagaacccgcaatttatggggggctgggacaaggataaagagacagactaccgcgcgacaattctccgctatggctccaaatactatctggccatcatggacaagaagtacgcgaagtgcctgcagaagatcgacaaagacgacgtcaatggcaactatgaaaagatcaactacaagctgctgccgggcccgaacaagatgctcccgaaggtgttcttcagcaagaagtggatggcctactacaatccaagcgaggatattcagaaaatctataaaaacgggaccttcaagaagggggacatgtttaacctcaacgactgccacaagctcattgatttcttcaaggatagcatttcccgctacccgaaatggtccaatgcgtacgattttaacttctccgagacagaaaagtacaaagacatcgcgggcttttacagggaggtggaggagcaagggtataaagtttcttttgaatccgcgagcaagaaggaagtcgacaagctcgtcgaggagggcaagctctacatgttccaaatttataacaaggacttttccgacaagagccatgggaccccaaacctccacaccatgtacttcaaactgctctttgacgagaacaaccacgggcaaatcaggctgagcggcggcgccgaattattcatgcgcagggcctccctcaagaaggaagagctggtcgtccatccagccaattccccgatcgcgaacaagaacccggacaatccgaaaaagaccaccaccctgtcctacgacgtctacaaggacaaacgcttcagcgaagaccagtacgaattacacatcccaattgcgattaataagtgcccaaagaatatcttcaaaattaatacagaggtcagggtgctgctcaaacacgacgacaatccgtatgtcatcggcattgccaggggcgagcgcaatctgctctatatcgtggtcgtggatgggaagggcaatattgtggagcagtactccctgaacgagattatcaacaacttcaatgggattaggattaagaccgactatcacagcctgctcgacaagaaagaaaaagagaggtttgaggcccgccaaaactggacctccattgagaatatcaaagaattaaaggccggctatatttcccaagtcgtccacaagatctgcgagctggtggagaaatatgacgccgtgattgcgctcgaagacttaaattctgggttcaagaactcccgcgtgaaggtggaaaaacaggtgtatcagaaattcgagaaaatgctgatcgacaaactcaattatatggtggataagaagtccaacccgtgtgccacagggggcgcgctgaagggctatcagatcaccaacaagttcgagagcttcaagagcatgagcacccagaacgggtttattttctacatcccggcgtggctcacctccaagattgacccgagcaccggcttcgtgaacctcctgaagacaaagtatacctccattgccgacagcaagaagtttatctcctccttcgaccgcattatgtatgtgccggaggaggacctcttcgagttcgccctcgactacaaaaacttcagccgcacagatgcggattacatcaagaagtggaagctgtactcctacgggaacaggatccgcatcttcaggaatccaaaaaaaaataacgtctttgactgggaggaagtgtgcctgacatccgcctacaaggaactgttcaataaatacggcatcaattaccagcagggcgacattcgcgccctcctctgtgagcagtccgacaaagcgttttactccagcttcatggccctcatgtccctgatgctccaaatgaggaatagcatcacagggcgcaccgacgtcgacttcctcatcagcccggtgaagaactccgacgggatcttttacgactcccgcaactatgaggcgcaagagaatgcgatcctcccgaagaacgccgatgcgaacggggcctataatatcgccaggaaagtgctctgggccatcgggcagttcaaaaaggcggaggatgagaagctcgacaaggtgaaaattgccatttccaacaaggagtggctggagtacgcgcagacctccgtgaagcacggctcctctggcagctccggctctagcggctcctctggcagctccggctccaagctggagaagtttacaaactgttacagcctctccaaaaccctcaggtttaaagcgatcccggtgggcaagacccaggagaacatcgacaacaagaggctcctggtggaagacgagaagcgcgccgaagactacaagggcgtgaagaagctgctcgataggtactacctcagctttattaacgacgtgctgcacagcatcaaactcaagaatctcaacaactacatctccctcttccgcaaaaagacctcaggcggaagtggtggaagtggcggtagtaccaacctcagcgacattatcgagaaggaaaccggcaagcaactcgtgatccaggagagcatactgatgctccccgaggaggtcgaggaggtgattggcaataagcccgagtccgatatactggttcatactgcgtatgacgaaagcacagacgagaacgtcatgctacttaccagcgacgccccggagtacaagccctgggccctagtcatccaagacagcaacggtgagaacaagatcaagatgctt

SEQ ID NO: 463 - DNA, 4831 bp, synthetic construct
  source 1..4831: mol_type = other DNA
gaggcctcccccgcatcaggacctagacacctgatggatccccatattttcacatctaacttcaacaacggaatcggcagacacaagacctacctgtgctatgaggtggaaaggctggataacggaacctctgtgaagatggaccagcacaggtaagtatcaaggttacaagacaggtttaaggagaccaatagaaactgggcttgtcgagacagagaagactcttgcgtttctgataggcacctattggtcttactgacatccactttgcctttctctccacaggggcttcctgcataaccaggccaagaatctgctgtgcggtttctacgggagacatgcagaactgaggtttctggatctggtgccatccctgcagctggaccccgctcagatctacagagtgacttggttcatctcttggagcccttgcttttcatggggatgtgctggcgaggtgagggccttccttcaggaaaacacacacgtgagactgaggatttttgctgccagaatctacgattatgacccactgtacaaggaagctctgcagatgctgagggatgcaggcgctcaggtgagcattatgacctatgacgaattcaagcactgctgggatacttttgtggaccatcagggttgtccttttcagccatgggatgggctggacgagcattctcaggcactgagcggtagactgagggctatcctgcagaaccaggggaattctggtggttcttctggtggttctagcggcagcgagactcccgggacctcagagtccgccacacccgaaagttctggtggttcttctggtggttctggctataccagcgacgaggaggtgctggaagtcttccgcaacacactgaataagaatagcgagattttctcctccatcaagaagctcgagaagctctttaagaactttgacgagtacagctccgccgggattttcgtgaagaacgggccggcgatcagcaccatctccaaggacatctttggcgagtggaacgtcatcagggacaagtggaacgccgagtacgacgacatccacctgaagaagaaggcggtggtgaccgagaagtatgaggacgatcgcaggaagtccttcaaaaaaatcggctccttcagcctcgaacagctccaggagtatgccgatgcggatctgtccgtcgtcgagaagctgaaggaaatcatcattcagaaggtcgacgagatctataaagtgtacgggtccagcgagaagctgttcgacgccgactttgtgctcgagaagtccctcaaaaagaatgacgccgtggtggccattatgaaagacctgctcgactccgtgaagtccttcgaaaattacattaaagcgttctttggggaggggaaggaaactaacagggatgagtccttctatggcgactttgtcctcgcgtacgacatcctgctgaaggtcgaccacatttacgacgcgatccgcaactacgtgacacagaagccgtactccaaagacaagttcaagctgtacttccagaacccgcaatttatggggggctgggacaaggataaagagacagactaccgcgcgacaattctccgctatggctccaaatactatctggccatcatggacaagaagtacgcgaagtgcctgcagaagatcgacaaagacgacgtcaatggcaactatgaaaagatcaactacaagctgctgccgggcccgaacaagatgctcccgaaggtgttcttcagcaagaagtggatggcctactacaatccaagcgaggatattcagaaaatctataaaaacgggaccttcaagaagggggacatgtttaacctcaacgactgccacaagctcattgatttcttcaaggatagcatttcccgctacccgaaatggtccaatgcgtacgattttaacttctccgagacagaaaagtacaaagacatcgcgggcttttacagggaggtggaggagcaagggtataaagtttcttttgaatccgcgagcaagaaggaagtcgacaagctcgtcgaggagggcaagctctacatgttccaaatttataacaaggacttttccgacaagagccatgggaccccaaacctccacaccatgtacttcaaactgctctttgacgagaacaaccacgggcaaatcaggctgagcggcggcgccgaattattcatgcgcagggcctccctcaagaaggaagagctggtcgtccatccagccaattccccgatcgcgaacaagaacccggacaatccgaaaaagaccaccaccctgtcctacgacgtctacaaggacaaacgcttcagcgaagaccagtacgaattacacatcccaattgcgattaataagtgcccaaagaatatcttcaaaattaatacagaggtcagggtgctgctcaaacacgacgacaatccgtatgtcatcggcattgccaggggcgagcgcaatctgctctatatcgtggtcgtggatgggaagggcaatattgtggagcagtactccctgaacgagattatcaacaacttcaatgggattaggattaagaccgactatcacagcctgctcgacaagaaagaaaaagagaggtttgaggcccgccaaaactggacctccattgagaatatcaaagaattaaaggccggctatatttcccaagtcgtccacaagatctgcgagctggtggagaaatatgacgccgtgattgcgctcgaagacttaaattctgggttcaagaactcccgcgtgaaggtggaaaaacaggtgtatcagaaattcgagaaaatgctgatcgacaaactcaattatatggtggataagaagtccaacccgtgtgccacagggggcgcgctgaagggctatcagatcaccaacaagttcgagagcttcaagagcatgagcacccagaacgggtttattttctacatcccggcgtggctcacctccaagattgacccgagcaccggcttcgtgaacctcctgaagacaaagtatacctccattgccgacagcaagaagtttatctcctccttcgaccgcattatgtatgtgccggaggaggacctcttcgagttcgccctcgactacaaaaacttcagccgcacagatgcggattacatcaagaagtggaagctgtactcctacgggaacaggatccgcatcttcaggaatccaaaaaaaaataacgtctttgactgggaggaagtgtgcctgacatccgcctacaaggaactgttcaataaatacggcatcaattaccagcagggcgacattcgcgccctcctctgtgagcagtccgacaaagcgttttactccagcttcatggccctcatgtccctgatgctccaaatgaggaatagcatcacagggcgcaccgacgtcgacttcctcatcagcccggtgaagaactccgacgggatcttttacgactcccgcaactatgaggcgcaagagaatgcgatcctcccgaagaacgccgatgcgaacggggcctataatatcgccaggaaagtgctctgggccatcgggcagttcaaaaaggcggaggatgagaagctcgacaaggtgaaaattgccatttccaacaaggagtggctggagtacgcgcagacctccgtgaagcacggctcctctggcagctccggctctagcggctcctctggcagctccggctccaagctggagaagtttacaaactgttacagcctctccaaaaccctcaggtttaaagcgatcccggtgggcaagacccaggagaacatcgacaacaagaggctcctggtggaagacgagaagcgcgccgaagactacaagggcgtgaagaagctgctcgataggtactacctcagctttattaacgacgtgctgcacagcatcaaactcaagaatctcaacaactacatctccctcttccgcaaaaagacccgcaccgagaaggagaacaaggagctggagaacctggagatcaacctccgcaaggaaatcgccaaagcgttcaagggcaatgaagggtacaagagcctcttcaagaaagacatcatcgaaactatcctcccagagtttctcgatgacaaggacgagatcgcgctggtgaactcctttaacgggttcacaaccgcgtttaccggcttctttgataacagggaaaatatgttctccgaggaggccaagtccaccagcatcgccttcaggtgtatcaacgagaacctcacccgctacatttccaatatggacattttcgagaaggtggatgcgatcttcgataagcacgaggtgcaggagatcaaagagaagattctcaattccgattatgacgtcgaggatttcttcgaaggggagttctttaattttgtgctcacacaagagggcattgacgtgtacaacgcgattatcgggggcttcgtcacagagtccggggagaagattaaggggctgaatgagtacatcaatctgtacaatcagaagaccaagcagaaactgccgaaattcaagccgctctacaagcaagtcctgtccgatagggaaagcctctccttctacggcgagtcaggcggaagtggtggaagtggcggtagtaccaacctcagcgacattatcgagaaggaaaccggcaagcaactcgtgatccaggagagcatactgatgctccccgaggaggtcgaggaggtgattggcaataagcccgagtccgatatactggttcatactgcgtatgacgaaagcacagacgagaacgtcatgctacttaccagcgacgccccggagtacaagccctgggccctagtcatccaagacagcaacggtgagaacaagatcaagatgctt

SEQ ID NO: 464 - DNA, 4831 bp, synthetic construct
  source 1..4831: mol_type = other DNA
gaggcctcccccgcatcaggacctagacacctgatggatccccatattttcacatctaacttcaacaacggaatcggcagacacaagacctacctgtgctatgaggtggaaaggctggataacggaacctctgtgaagatggaccagcacaggtaagtatcaaggttacaagacaggtttaaggagaccaatagaaactgggcttgtcgagacagagaagactcttgcgtttctgataggcacctattggtcttactgacatccactttgcctttctctccacaggggcttcctgcataaccaggccaagaatctgctgtgcggtttctacgggagacatgcagaactgaggtttctggatctggtgccatccctgcagctggaccccgctcagatctacagagtgacttggttcatctcttggagcccttgcttttcatggggatgtgctggcgaggtgagggccttccttcaggaaaacacacacgtgagactgaggatttttgctgccagaatctacgattatgacccactgtacaaggaagctctgcagatgctgagggatgcaggcgctcaggtgagcattatgacctatgacgaattcaagcactgctgggatacttttgtggaccatcagggttgtccttttcagccatgggatgggctggacgagcattctcaggcactgagcggtagactgagggctatcctgcagaaccaggggaattctggtggttcttctggtggttctagcggcagcgagactcccgggacctcagagtccgccacacccgaaagttctggtggttcttctggtggttcttccgacgggatcttttacgactcccgcaactatgaggcgcaagagaatgcgatcctcccgaagaacgccgatgcgaacggggcctataatatcgccaggaaagtgctctgggccatcgggcagttcaaaaaggcggaggatgagaagctcgacaaggtgaaaattgccatttccaacaaggagtggctggagtacgcgcagacctccgtgaagcacggctcctctggcagctccggctctagcggctcctctggcagctccggctccaagctggagaagtttacaaactgttacagcctctccaaaaccctcaggtttaaagcgatcccggtgggcaagacccaggagaacatcgacaacaagaggctcctggtggaagacgagaagcgcgccgaagactacaagggcgtgaagaagctgctcgataggtactacctcagctttattaacgacgtgctgcacagcatcaaactcaagaatctcaacaactacatctccctcttccgcaaaaagacccgcaccgagaaggagaacaaggagctggagaacctggagatcaacctccgcaaggaaatcgccaaagcgttcaagggcaatgaagggtacaagagcctcttcaagaaagacatcatcgaaactatcctcccagagtttctcgatgacaaggacgagatcgcgctggtgaactcctttaacgggttcacaaccgcgtttaccggcttctttgataacagggaaaatatgttctccgaggaggccaagtccaccagcatcgccttcaggtgtatcaacgagaacctcacccgctacatttccaatatggacattttcgagaaggtggatgcgatcttcgataagcacgaggtgcaggagatcaaagagaagattctcaattccgattatgacgtcgaggatttcttcgaaggggagttctttaattttgtgctcacacaagagggcattgacgtgtacaacgcgattatcgggggcttcgtcacagagtccggggagaagattaaggggctgaatgagtacatcaatctgtacaatcagaagaccaagcagaaactgccgaaattcaagccgctctacaagcaagtcctgtccgatagggaaagcctctccttctacggcgagggctataccagcgacgaggaggtgctggaagtcttccgcaacacactgaataagaatagcgagattttctcctccatcaagaagctcgagaagctctttaagaactttgacgagtacagctccgccgggattttcgtgaagaacgggccggcgatcagcaccatctccaaggacatctttggcgagtggaacgtcatcagggacaagtggaacgccgagtacgacgacatccacctgaagaagaaggcggtggtgaccgagaagtatgaggacgatcgcaggaagtccttcaaaaaaatcggctccttcagcctcgaacagctccaggagtatgccgatgcggatctgtccgtcgtcgagaagctgaaggaaatcatcattcagaaggtcgacgagatctataaagtgtacgggtccagcgagaagctgttcgacgccgactttgtgctcgagaagtccctcaaaaagaatgacgccgtggtggccattatgaaagacctgctcgactccgtgaagtccttcgaaaattacattaaagcgttctttggggaggggaaggaaactaacagggatgagtccttctatggcgactttgtcctcgcgtacgacatcctgctgaaggtcgaccacatttacgacgcgatccgcaactacgtgacacagaagccgtactccaaagacaagttcaagctgtacttccagaacccgcaatttatggggggctgggacaaggataaagagacagactaccgcgcgacaattctccgctatggctccaaatactatctggccatcatggacaagaagtacgcgaagtgcctgcagaagatcgacaaagacgacgtcaatggcaactatgaaaagatcaactacaagctgctgccgggcccgaacaagatgctcccgaaggtgttcttcagcaagaagtggatggcctactacaatccaagcgaggatattcagaaaatctataaaaacgggaccttcaagaagggggacatgtttaacctcaacgactgccacaagctcattgatttcttcaaggatagcatttcccgctacccgaaatggtccaatgcgtacgattttaacttctccgagacagaaaagtacaaagacatcgcgggcttttacagggaggtggaggagcaagggtataaagtttcttttgaatccgcgagcaagaaggaagtcgacaagctcgtcgaggagggcaagctctacatgttccaaatttataacaaggacttttccgacaagagccatgggaccccaaacctccacaccatgtacttcaaactgctctttgacgagaacaaccacgggcaaatcaggctgagcggcggcgccgaattattcatgcgcagggcctccctcaagaaggaagagctggtcgtccatccagccaattccccgatcgcgaacaagaacccggacaatccgaaaaagaccaccaccctgtcctacgacgtctacaaggacaaacgcttcagcgaagaccagtacgaattacacatcccaattgcgattaataagtgcccaaagaatatcttcaaaattaatacagaggtcagggtgctgctcaaacacgacgacaatccgtatgtcatcggcattgccaggggcgagcgcaatctgctctatatcgtggtcgtggatgggaagggcaatattgtggagcagtactccctgaacgagattatcaacaacttcaatgggattaggattaagaccgactatcacagcctgctcgacaagaaagaaaaagagaggtttgaggcccgccaaaactggacctccattgagaatatcaaagaattaaaggccggctatatttcccaagtcgtccacaagatctgcgagctggtggagaaatatgacgccgtgattgcgctcgaagacttaaattctgggttcaagaactcccgcgtgaaggtggaaaaacaggtgtatcagaaattcgagaaaatgctgatcgacaaactcaattatatggtggataagaagtccaacccgtgtgccacagggggcgcgctgaagggctatcagatcaccaacaagttcgagagcttcaagagcatgagcacccagaacgggtttattttctacatcccggcgtggctcacctccaagattgacccgagcaccggcttcgtgaacctcctgaagacaaagtatacctccattgccgacagcaagaagtttatctcctccttcgaccgcattatgtatgtgccggaggaggacctcttcgagttcgccctcgactacaaaaacttcagccgcacagatgcggattacatcaagaagtggaagctgtactcctacgggaacaggatccgcatcttcaggaatccaaaaaaaaataacgtctttgactgggaggaagtgtgcctgacatccgcctacaaggaactgttcaataaatacggcatcaattaccagcagggcgacattcgcgccctcctctgtgagcagtccgacaaagcgttttactccagcttcatggccctcatgtccctgatgctccaaatgaggaatagcatcacagggcgcaccgacgtcgacttcctcatcagcccggtgaagaactcaggcggaagtggtggaagtggcggtagtaccaacctcagcgacattatcgagaaggaaaccggcaagcaactcgtgatccaggagagcatactgatgctccccgaggaggtcgaggaggtgattggcaataagcccgagtccgatatactggttcatactgcgtatgacgaaagcacagacgagaacgtcatgctacttaccagcgacgccccggagtacaagccctgggccctagtcatccaagacagcaacggtgagaacaagatcaagatgctt

SEQ ID NO: 465 - DNA, 4831 bp, synthetic construct
  source 1..4831: mol_type = other DNA
gaggcctcccccgcatcaggacctagacacctgatggatccccatattttcacatctaacttcaacaacggaatcggcagacacaagacctacctgtgctatgaggtggaaaggctggataacggaacctctgtgaagatggaccagcacaggtaagtatcaaggttacaagacaggtttaaggagaccaatagaaactgggcttgtcgagacagagaagactcttgcgtttctgataggcacctattggtcttactgacatccactttgcctttctctccacaggggcttcctgcataaccaggccaagaatctgctgtgcggtttctacgggagacatgcagaactgaggtttctggatctggtgccatccctgcagctggaccccgctcagatctacagagtgacttggttcatctcttggagcccttgcttttcatggggatgtgctggcgaggtgagggccttccttcaggaaaacacacacgtgagactgaggatttttgctgccagaatctacgattatgacccactgtacaaggaagctctgcagatgctgagggatgcaggcgctcaggtgagcattatgacctatgacgaattcaagcactgctgggatacttttgtggaccatcagggttgtccttttcagccatgggatgggctggacgagcattctcaggcactgagcggtagactgagggctatcctgcagaaccaggggaattctggtggttcttctggtggttctagcggcagcgagactcccgggacctcagagtccgccacacccgaaagttctggtggttcttctggtggttctaaagacaagttcaagctgtacttccagaacccgcaatttatggggggctgggacaaggataaagagacagactaccgcgcgacaattctccgctatggctccaaatactatctggccatcatggacaagaagtacgcgaagtgcctgcagaagatcgacaaagacgacgtcaatggcaactatgaaaagatcaactacaagctgctgccgggcccgaacaagatgctcccgaaggtgttcttcagcaagaagtggatggcctactacaatccaagcgaggatattcagaaaatctataaaaacgggaccttcaagaagggggacatgtttaacctcaacgactgccacaagctcattgatttcttcaaggatagcatttcccgctacccgaaatggtccaatgcgtacgattttaacttctccgagacagaaaagtacaaagacatcgcgggcttttacagggaggtggaggagcaagggtataaagtttcttttgaatccgcgagcaagaaggaagtcgacaagctcgtcgaggagggcaagctctacatgttccaaatttataacaaggacttttccgacaagagccatgggaccccaaacctccacaccatgtacttcaaactgctctttgacgagaacaaccacgggcaaatcaggctgagcggcggcgccgaattattcatgcgcagggcctccctcaagaaggaagagctggtcgtccatccagccaattccccgatcgcgaacaagaacccggacaatccgaaaaagaccaccaccctgtcctacgacgtctacaaggacaaacgcttcagcgaagaccagtacgaattacacatcccaattgcgattaataagtgcccaaagaatatcttcaaaattaatacagaggtcagggtgctgctcaaacacgacgacaatccgtatgtcatcggcattgccaggggcgagcgcaatctgctctatatcgtggtcgtggatgggaagggcaatattgtggagcagtactccctgaacgagattatcaacaacttcaatgggattaggattaagaccgactatcacagcctgctcgacaagaaagaaaaagagaggtttgaggcccgccaaaactggacctccattgagaatatcaaagaattaaaggccggctatatttcccaagtcgtccacaagatctgcgagctggtggagaaatatgacgccgtgattgcgctcgaagacttaaattctgggttcaagaactcccgcgtgaaggtggaaaaacaggtgtatcagaaattcgagaaaatgctgatcgacaaactcaattatatggtggataagaagtccaacccgtgtgccacagggggcgcgctgaagggctatcagatcaccaacaagttcgagagcttcaagagcatgagcacccagaacgggtttattttctacatcccggcgtggctcacctccaagattgacccgagcaccggcttcgtgaacctcctgaagacaaagtatacctccattgccgacagcaagaagtttatctcctccttcgaccgcattatgtatgtgccggaggaggacctcttcgagttcgccctcgactacaaaaacttcagccgcacagatgcggattacatcaagaagtggaagctgtactcctacgggaacaggatccgcatcttcaggaatccaaaaaaaaataacgtctttgactgggaggaagtgtgcctgacatccgcctacaaggaactgttcaataaatacggcatcaattaccagcagggcgacattcgcgccctcctctgtgagcagtccgacaaagcgttttactccagcttcatggccctcatgtccctgatgctccaaatgaggaatagcatcacagggcgcaccgacgtcgacttcctcatcagcccggtgaagaactccgacgggatcttttacgactcccgcaactatgaggcgcaagagaatgcgatcctcccgaagaacgccgatgcgaacggggcctataatatcgccaggaaagtgctctgggccatcgggcagttcaaaaaggcggaggatgagaagctcgacaaggtgaaaattgccatttccaacaaggagtggctggagtacgcgcagacctccgtgaagcacggctcctctggcagctccggctctagcggctcctctggcagctccggctccaagctggagaagtttacaaactgttacagcctctccaaaaccctcaggtttaaagcgatcccggtgggcaagacccaggagaacatcgacaacaagaggctcctggtggaagacgagaagcgcgccgaagactacaagggcgtgaagaagctgctcgataggtactacctcagctttattaacgacgtgctgcacagcatcaaactcaagaatctcaacaactacatctccctcttccgcaaaaagacccgcaccgagaaggagaacaaggagctggagaacctggagatcaacctccgcaaggaaatcgccaaagcgttcaagggcaatgaagggtacaagagcctcttcaagaaagacatcatcgaaactatcctcccagagtttctcgatgacaaggacgagatcgcgctggtgaactcctttaacgggttcacaaccgcgtttaccggcttctttgataacagggaaaatatgttctccgaggaggccaagtccaccagcatcgccttcaggtgtatcaacgagaacctcacccgctacatttccaatatggacattttcgagaaggtggatgcgatcttcgataagcacgaggtgcaggagatcaaagagaagattctcaattccgattatgacgtcgaggatttcttcgaaggggagttctttaattttgtgctcacacaagagggcattgacgtgtacaacgcgattatcgggggcttcgtcacagagtccggggagaagattaaggggctgaatgagtacatcaatctgtacaatcagaagaccaagcagaaactgccgaaattcaagccgctctacaagcaagtcctgtccgatagggaaagcctctccttctacggcgagggctataccagcgacgaggaggtgctggaagtcttccgcaacacactgaataagaatagcgagattttctcctccatcaagaagctcgagaagctctttaagaactttgacgagtacagctccgccgggattttcgtgaagaacgggccggcgatcagcaccatctccaaggacatctttggcgagtggaacgtcatcagggacaagtggaacgccgagtacgacgacatccacctgaagaagaaggcggtggtgaccgagaagtatgaggacgatcgcaggaagtccttcaaaaaaatcggctccttcagcctcgaacagctccaggagtatgccgatgcggatctgtccgtcgtcgagaagctgaaggaaatcatcattcagaaggtcgacgagatctataaagtgtacgggtccagcgagaagctgttcgacgccgactttgtgctcgagaagtccctcaaaaagaatgacgccgtggtggccattatgaaagacctgctcgactccgtgaagtccttcgaaaattacattaaagcgttctttggggaggggaaggaaactaacagggatgagtccttctatggcgactttgtcctcgcgtacgacatcctgctgaaggtcgaccacatttacgacgcgatccgcaactacgtgacacagaagccgtactcctcaggcggaagtggtggaagtggcggtagtaccaacctcagcgacattatcgagaaggaaaccggcaagcaactcgtgatccaggagagcatactgatgctccccgaggaggtcgaggaggtgattggcaataagcccgagtccgatatactggttcatactgcgtatgacgaaagcacagacgagaacgtcatgctacttaccagcgacgccccggagtacaagccctgggccctagtcatccaagacagcaacggtgagaacaagatcaagatgctt

SEQ ID NO: 466 - DNA, 4831 bp, synthetic construct
  source 1..4831: mol_type = other DNA
gaggcctcccccgcatcaggacctagacacctgatggatccccatattttcacatctaacttcaacaacggaatcggcagacacaagacctacctgtgctatgaggtggaaaggctggataacggaacctctgtgaagatggaccagcacaggtaagtatcaaggttacaagacaggtttaaggagaccaatagaaactgggcttgtcgagacagagaagactcttgcgtttctgataggcacctattggtcttactgacatccactttgcctttctctccacaggggcttcctgcataaccaggccaagaatctgctgtgcggtttctacgggagacatgcagaactgaggtttctggatctggtgccatccctgcagctggaccccgctcagatctacagagtgacttggttcatctcttggagcccttgcttttcatggggatgtgctggcgaggtgagggccttccttcaggaaaacacacacgtgagactgaggatttttgctgccagaatctacgattatgacccactgtacaaggaagctctgcagatgctgagggatgcaggcgctcaggtgagcattatgacctatgacgaattcaagcactgctgggatacttttgtggaccatcagggttgtccttttcagccatgggatgggctggacgagcattctcaggcactgagcggtagactgagggctatcctgcagaaccaggggaattctggtggttcttctggtggttctagcggcagcgagactcccgggacctcagagtccgccacacccgaaagttctggtggttcttctggtggttctaagtccctcaaaaagaatgacgccgtggtggccattatgaaagacctgctcgactccgtgaagtccttcgaaaattacattaaagcgttctttggggaggggaaggaaactaacagggatgagtccttctatggcgactttgtcctcgcgtacgacatcctgctgaaggtcgaccacatttacgacgcgatccgcaactacgtgacacagaagccgtactccaaagacaagttcaagctgtacttccagaacccgcaatttatggggggctgggacaaggataaagagacagactaccgcgcgacaattctccgctatggctccaaatactatctggccatcatggacaagaagtacgcgaagtgcctgcagaagatcgacaaagacgacgtcaatggcaactatgaaaagatcaactacaagctgctgccgggcccgaacaagatgctcccgaaggtgttcttcagcaagaagtggatggcctactacaatccaagcgaggatattcagaaaatctataaaaacgggaccttcaagaagggggacatgtttaacctcaacgactgccacaagctcattgatttcttcaaggatagcatttcccgctacccgaaatggtccaatgcgtacgattttaacttctccgagacagaaaagtacaaagacatcgcgggcttttacagggaggtggaggagcaagggtataaagtttcttttgaatccgcgagcaagaaggaagtcgacaagctcgtcgaggagggcaagctctacatgttccaaatttataacaaggacttttccgacaagagccatgggaccccaaacctccacaccatgtacttcaaactgctctttgacgagaacaaccacgggcaaatcaggctgagcggcggcgccgaattattcatgcgcagggcctccctcaagaaggaagagctggtcgtccatccagccaattccccgatcgcgaacaagaacccggacaatccgaaaaagaccaccaccctgtcctacgacgtctacaaggacaaacgcttcagcgaagaccagtacgaattacacatcccaattgcgattaataagtgcccaaagaatatcttcaaaattaatacagaggtcagggtgctgctcaaacacgacgacaatccgtatgtcatcggcattgccaggggcgagcgcaatctgctctatatcgtggtcgtggatgggaagggcaatattgtggagcagtactccctgaacgagattatcaacaacttcaatgggattaggattaagaccgactatcacagcctgctcgacaagaaagaaaaagagaggtttgaggcccgccaaaactggacctccattgagaatatcaaagaattaaaggccggctatatttcccaagtcgtccacaagatctgcgagctggtggagaaatatgacgccgtgattgcgctcgaagacttaaattctgggttcaagaactcccgcgtgaaggtggaaaaacaggtgtatcagaaattcgagaaaatgctgatcgacaaactcaattatatggtggataagaagtccaacccgtgtgccacagggggcgcgctgaagggctatcagatcaccaacaagttcgagagcttcaagagcatgagcacccagaacgggtttattttctacatcccggcgtggctcacctccaagattgacccgagcaccggcttcgtgaacctcctgaagacaaagtatacctccattgccgacagcaagaagtttatctcctccttcgaccgcattatgtatgtgccggaggaggacctcttcgagttcgccctcgactacaaaaacttcagccgcacagatgcggattacatcaagaagtggaagctgtactcctacgggaacaggatccgcatcttcaggaatccaaaaaaaaataacgtctttgactgggaggaagtgtgcctgacatccgcctacaaggaactgttcaataaatacggcatcaattaccagcagggcgacattcgcgccctcctctgtgagcagtccgacaaagcgttttactccagcttcatggccctcatgtccctgatgctccaaatgaggaatagcatcacagggcgcaccgacgtcgacttcctcatcagcccggtgaagaactccgacgggatcttttacgactcccgcaactatgaggcgcaagagaatgcgatcctcccgaagaacgccgatgcgaacggggcctataatatcgccaggaaagtgctctgggccatcgggcagttcaaaaaggcggaggatgagaagctcgacaaggtgaaaattgccatttccaacaaggagtggctggagtacgcgcagacctccgtgaagcacggctcctctggcagctccggctctagcggctcctctggcagctccggctccaagctggagaagtttacaaactgttacagcctctccaaaaccctcaggtttaaagcgatcccggtgggcaagacccaggagaacatcgacaacaagaggctcctggtggaagacgagaagcgcgccgaagactacaagggcgtgaagaagctgctcgataggtactacctcagctttattaacgacgtgctgcacagcatcaaactcaagaatctcaacaactacatctccctcttccgcaaaaagacccgcaccgagaaggagaacaaggagctggagaacctggagatcaacctccgcaaggaaatcgccaaagcgttcaagggcaatgaagggtacaagagcctcttcaagaaagacatcatcgaaactatcctcccagagtttctcgatgacaaggacgagatcgcgctggtgaactcctttaacgggttcacaaccgcgtttaccggcttctttgataacagggaaaatatgttctccgaggaggccaagtccaccagcatcgccttcaggtgtatcaacgagaacctcacccgctacatttccaatatggacattttcgagaaggtggatgcgatcttcgataagcacgaggtgcaggagatcaaagagaagattctcaattccgattatgacgtcgaggatttcttcgaaggggagttctttaattttgtgctcacacaagagggcattgacgtgtacaacgcgattatcgggggcttcgtcacagagtccggggagaagattaaggggctgaatgagtacatcaatctgtacaatcagaagaccaagcagaaactgccgaaattcaagccgctctacaagcaagtcctgtccgatagggaaagcctctccttctacggcgagggctataccagcgacgaggaggtgctggaagtcttccgcaacacactgaataagaatagcgagattttctcctccatcaagaagctcgagaagctctttaagaactttgacgagtacagctccgccgggattttcgtgaagaacgggccggcgatcagcaccatctccaaggacatctttggcgagtggaacgtcatcagggacaagtggaacgccgagtacgacgacatccacctgaagaagaaggcggtggtgaccgagaagtatgaggacgatcgcaggaagtccttcaaaaaaatcggctccttcagcctcgaacagctccaggagtatgccgatgcggatctgtccgtcgtcgagaagctgaaggaaatcatcattcagaaggtcgacgagatctataaagtgtacgggtccagcgagaagctgttcgacgccgactttgtgctcgagtcaggcggaagtggtggaagtggcggtagtaccaacctcagcgacattatcgagaaggaaaccggcaagcaactcgtgatccaggagagcatactgatgctccccgaggaggtcgaggaggtgattggcaataagcccgagtccgatatactggttcatactgcgtatgacgaaagcacagacgagaacgtcatgctacttaccagcgacgccccggagtacaagccctgggccctagtcatccaagacagcaacggtgagaacaagatcaagatgctt

SEQ ID NO: 467 - DNA, 4831 bp, synthetic construct
  source 1..4831: mol_type = other DNA
gaggcctcccccgcatcaggacctagacacctgatggatccccatattttcacatctaacttcaacaacggaatcggcagacacaagacctacctgtgctatgaggtggaaaggctggataacggaacctctgtgaagatggaccagcacaggtaagtatcaaggttacaagacaggtttaaggagaccaatagaaactgggcttgtcgagacagagaagactcttgcgtttctgataggcacctattggtcttactgacatccactttgcctttctctccacaggggcttcctgcataaccaggccaagaatctgctgtgcggtttctacgggagacatgcagaactgaggtttctggatctggtgccatccctgcagctggaccccgctcagatctacagagtgacttggttcatctcttggagcccttgcttttcatggggatgtgctggcgaggtgagggccttccttcaggaaaacacacacgtgagactgaggatttttgctgccagaatctacgattatgacccactgtacaaggaagctctgcagatgctgagggatgcaggcgctcaggtgagcattatgacctatgacgaattcaagcactgctgggatacttttgtggaccatcagggttgtccttttcagccatgggatgggctggacgagcattctcaggcactgagcggtagactgagggctatcctgcagaaccaggggaattctggtggttcttctggtggttctagcggcagcgagactcccgggacctcagagtccgccacacccgaaagttctggtggttcttctggtggttcttccgacaaagcgttttactccagcttcatggccctcatgtccctgatgctccaaatgaggaatagcatcacagggcgcaccgacgtcgacttcctcatcagcccggtgaagaactccgacgggatcttttacgactcccgcaactatgaggcgcaagagaatgcgatcctcccgaagaacgccgatgcgaacggggcctataatatcgccaggaaagtgctctgggccatcgggcagttcaaaaaggcggaggatgagaagctcgacaaggtgaaaattgccatttccaacaaggagtggctggagtacgcgcagacctccgtgaagcacggctcctctggcagctccggctctagcggctcctctggcagctccggctccaagctggagaagtttacaaactgttacagcctctccaaaaccctcaggtttaaagcgatcccggtgggcaagacccaggagaacatcgacaacaagaggctcctggtggaagacgagaagcgcgccgaagactacaagggcgtgaagaagctgctcgataggtactacctcagctttattaacgacgtgctgcacagcatcaaactcaagaatctcaacaactacatctccctcttccgcaaaaagacccgcaccgagaaggagaacaaggagctggagaacctggagatcaacctccgcaaggaaatcgccaaagcgttcaagggcaatgaagggtacaagagcctcttcaagaaagacatcatcgaaactatcctcccagagtttctcgatgacaaggacgagatcgcgctggtgaactcctttaacgggttcacaaccgcgtttaccggcttctttgataacagggaaaatatgttctccgaggaggccaagtccaccagcatcgccttcaggtgtatcaacgagaacctcacccgctacatttccaatatggacattttcgagaaggtggatgcgatcttcgataagcacgaggtgcaggagatcaaagagaagattctcaattccgattatgacgtcgaggatttcttcgaaggggagttctttaattttgtgctcacacaagagggcattgacgtgtacaacgcgattatcgggggcttcgtcacagagtccggggagaagattaaggggctgaatgagtacatcaatctgtacaatcagaagaccaagcagaaactgccgaaattcaagccgctctacaagcaagtcctgtccgatagggaaagcctctccttctacggcgagggctataccagcgacgaggaggtgctggaagtcttccgcaacacactgaataagaatagcgagattttctcctccatcaagaagctcgagaagctctttaagaactttgacgagtacagctccgccgggattttcgtgaagaacgggccggcgatcagcaccatctccaaggacatctttggcgagtggaacgtcatcagggacaagtggaacgccgagtacgacgacatccacctgaagaagaaggcggtggtgaccgagaagtatgaggacgatcgcaggaagtccttcaaaaaaatcggctccttcagcctcgaacagctccaggagtatgccgatgcggatctgtccgtcgtcgagaagctgaaggaaatcatcattcagaaggtcgacgagatctataaagtgtacgggtccagcgagaagctgttcgacgccgactttgtgctcgagaagtccctcaaaaagaatgacgccgtggtggccattatgaaagacctgctcgactccgtgaagtccttcgaaaattacattaaagcgttctttggggaggggaaggaaactaacagggatgagtccttctatggcgactttgtcctcgcgtacgacatcctgctgaaggtcgaccacatttacgacgcgatccgcaactacgtgacacagaagccgtactccaaagacaagttcaagctgtacttccagaacccgcaatttatggggggctgggacaaggataaagagacagactaccgcgcgacaattctccgctatggctccaaatactatctggccatcatggacaagaagtacgcgaagtgcctgcagaagatcgacaaagacgacgtcaatggcaactatgaaaagatcaactacaagctgctgccgggcccgaacaagatgctcccgaaggtgttcttcagcaagaagtggatggcctactacaatccaagcgaggatattcagaaaatctataaaaacgggaccttcaagaagggggacatgtttaacctcaacgactgccacaagctcattgatttcttcaaggatagcatttcccgctacccgaaatggtccaatgcgtacgattttaacttctccgagacagaaaagtacaaagacatcgcgggcttttacagggaggtggaggagcaagggtataaagtttcttttgaatccgcgagcaagaaggaagtcgacaagctcgtcgaggagggcaagctctacatgttccaaatttataacaaggacttttccgacaagagccatgggaccccaaacctccacaccatgtacttcaaactgctctttgacgagaacaaccacgggcaaatcaggctgagcggcggcgccgaattattcatgcgcagggcctccctcaagaaggaagagctggtcgtccatccagccaattccccgatcgcgaacaagaacccggacaatccgaaaaagaccaccaccctgtcctacgacgtctacaaggacaaacgcttcagcgaagaccagtacgaattacacatcccaattgcgattaataagtgcccaaagaatatcttcaaaattaatacagaggtcagggtgctgctcaaacacgacgacaatccgtatgtcatcggcattgccaggggcgagcgcaatctgctctatatcgtggtcgtggatgggaagggcaatattgtggagcagtactccctgaacgagattatcaacaacttcaatgggattaggattaagaccgactatcacagcctgctcgacaagaaagaaaaagagaggtttgaggcccgccaaaactggacctccattgagaatatcaaagaattaaaggccggctatatttcccaagtcgtccacaagatctgcgagctggtggagaaatatgacgccgtgattgcgctcgaagacttaaattctgggttcaagaactcccgcgtgaaggtggaaaaacaggtgtatcagaaattcgagaaaatgctgatcgacaaactcaattatatggtggataagaagtccaacccgtgtgccacagggggcgcgctgaagggctatcagatcaccaacaagttcgagagcttcaagagcatgagcacccagaacgggtttattttctacatcccggcgtggctcacctccaagattgacccgagcaccggcttcgtgaacctcctgaagacaaagtatacctccattgccgacagcaagaagtttatctcctccttcgaccgcattatgtatgtgccggaggaggacctcttcgagttcgccctcgactacaaaaacttcagccgcacagatgcggattacatcaagaagtggaagctgtactcctacgggaacaggatccgcatcttcaggaatccaaaaaaaaataacgtctttgactgggaggaagtgtgcctgacatccgcctacaaggaactgttcaataaatacggcatcaattaccagcagggcgacattcgcgccctcctctgtgagcagtcaggcggaagtggtggaagtggcggtagtaccaacctcagcgacattatcgagaaggaaaccggcaagcaactcgtgatccaggagagcatactgatgctccccgaggaggtcgaggaggtgattggcaataagcccgagtccgatatactggttcatactgcgtatgacgaaagcacagacgagaacgtcatgctacttaccagcgacgccccggagtacaagccctgggccctagtcatccaagacagcaacggtgagaacaagatcaagatgctt

SEQ ID NO: 468 - DNA, 4831 bp, synthetic construct
  source 1..4831: mol_type = other DNA
accaacctcagcgacattatcgagaaggaaaccggcaagcaactcgtgatccaggagagcatactgatgctccccgaggaggtcgaggaggtgattggcaataagcccgagtccgatatactggttcatactgcgtatgacgaaagcacagacgagaacgtcatgctacttaccagcgacgccccggagtacaagccctgggccctagtcatccaagacagcaacggtgagaacaagatcaagatgctttcaggcggaagtggtggaagtggcggtagtcgcaccgagaaggagaacaaggagctggagaacctggagatcaacctccgcaaggaaatcgccaaagcgttcaagggcaatgaagggtacaagagcctcttcaagaaagacatcatcgaaactatcctcccagagtttctcgatgacaaggacgagatcgcgctggtgaactcctttaacgggttcacaaccgcgtttaccggcttctttgataacagggaaaatatgttctccgaggaggccaagtccaccagcatcgccttcaggtgtatcaacgagaacctcacccgctacatttccaatatggacattttcgagaaggtggatgcgatcttcgataagcacgaggtgcaggagatcaaagagaagattctcaattccgattatgacgtcgaggatttcttcgaaggggagttctttaattttgtgctcacacaagagggcattgacgtgtacaacgcgattatcgggggcttcgtcacagagtccggggagaagattaaggggctgaatgagtacatcaatctgtacaatcagaagaccaagcagaaactgccgaaattcaagccgctctacaagcaagtcctgtccgatagggaaagcctctccttctacggcgagggctataccagcgacgaggaggtgctggaagtcttccgcaacacactgaataagaatagcgagattttctcctccatcaagaagctcgagaagctctttaagaactttgacgagtacagctccgccgggattttcgtgaagaacgggccggcgatcagcaccatctccaaggacatctttggcgagtggaacgtcatcagggacaagtggaacgccgagtacgacgacatccacctgaagaagaaggcggtggtgaccgagaagtatgaggacgatcgcaggaagtccttcaaaaaaatcggctccttcagcctcgaacagctccaggagtatgccgatgcggatctgtccgtcgtcgagaagctgaaggaaatcatcattcagaaggtcgacgagatctataaagtgtacgggtccagcgagaagctgttcgacgccgactttgtgctcgagaagtccctcaaaaagaatgacgccgtggtggccattatgaaagacctgctcgactccgtgaagtccttcgaaaattacattaaagcgttctttggggaggggaaggaaactaacagggatgagtccttctatggcgactttgtcctcgcgtacgacatcctgctgaaggtcgaccacatttacgacgcgatccgcaactacgtgacacagaagccgtactccaaagacaagttcaagctgtacttccagaacccgcaatttatggggggctgggacaaggataaagagacagactaccgcgcgacaattctccgctatggctccaaatactatctggccatcatggacaagaagtacgcgaagtgcctgcagaagatcgacaaagacgacgtcaatggcaactatgaaaagatcaactacaagctgctgccgggcccgaacaagatgctcccgaaggtgttcttcagcaagaagtggatggcctactacaatccaagcgaggatattcagaaaatctataaaaacgggaccttcaagaagggggacatgtttaacctcaacgactgccacaagctcattgatttcttcaaggatagcatttcccgctacccgaaatggtccaatgcgtacgattttaacttctccgagacagaaaagtacaaagacatcgcgggcttttacagggaggtggaggagcaagggtataaagtttcttttgaatccgcgagcaagaaggaagtcgacaagctcgtcgaggagggcaagctctacatgttccaaatttataacaaggacttttccgacaagagccatgggaccccaaacctccacaccatgtacttcaaactgctctttgacgagaacaaccacgggcaaatcaggctgagcggcggcgccgaattattcatgcgcagggcctccctcaagaaggaagagctggtcgtccatccagccaattccccgatcgcgaacaagaacccggacaatccgaaaaagaccaccaccctgtcctacgacgtctacaaggacaaacgcttcagcgaagaccagtacgaattacacatcccaattgcgattaataagtgcccaaagaatatcttcaaaattaatacagaggtcagggtgctgctcaaacacgacgacaatccgtatgtcatcggcattgccaggggcgagcgcaatctgctctatatcgtggtcgtggatgggaagggcaatattgtggagcagtactccctgaacgagattatcaacaacttcaatgggattaggattaagaccgactatcacagcctgctcgacaagaaagaaaaagagaggtttgaggcccgccaaaactggacctccattgagaatatcaaagaattaaaggccggctatatttcccaagtcgtccacaagatctgcgagctggtggagaaatatgacgccgtgattgcgctcgaagacttaaattctgggttcaagaactcccgcgtgaaggtggaaaaacaggtgtatcagaaattcgagaaaatgctgatcgacaaactcaattatatggtggataagaagtccaacccgtgtgccacagggggcgcgctgaagggctatcagatcaccaacaagttcgagagcttcaagagcatgagcacccagaacgggtttattttctacatcccggcgtggctcacctccaagattgacccgagcaccggcttcgtgaacctcctgaagacaaagtatacctccattgccgacagcaagaagtttatctcctccttcgaccgcattatgtatgtgccggaggaggacctcttcgagttcgccctcgactacaaaaacttcagccgcacagatgcggattacatcaagaagtggaagctgtactcctacgggaacaggatccgcatcttcaggaatccaaaaaaaaataacgtctttgactgggaggaagtgtgcctgacatccgcctacaaggaactgttcaataaatacggcatcaattaccagcagggcgacattcgcgccctcctctgtgagcagtccgacaaagcgttttactccagcttcatggccctcatgtccctgatgctccaaatgaggaatagcatcacagggcgcaccgacgtcgacttcctcatcagcccggtgaagaactccgacgggatcttttacgactcccgcaactatgaggcgcaagagaatgcgatcctcccgaagaacgccgatgcgaacggggcctataatatcgccaggaaagtgctctgggccatcgggcagttcaaaaaggcggaggatgagaagctcgacaaggtgaaaattgccatttccaacaaggagtggctggagtacgcgcagacctccgtgaagcacggctcctctggcagctccggctctagcggctcctctggcagctccggctccaagctggagaagtttacaaactgttacagcctctccaaaaccctcaggtttaaagcgatcccggtgggcaagacccaggagaacatcgacaacaagaggctcctggtggaagacgagaagcgcgccgaagactacaagggcgtgaagaagctgctcgataggtactacctcagctttattaacgacgtgctgcacagcatcaaactcaagaatctcaacaactacatctccctcttccgcaaaaagacctctggtggttcttctggtggttctagcggcagcgagactcccgggacctcagagtccgccacacccgaaagttctggtggttcttctggtggttctgaggcctcccccgcatcaggacctagacacctgatggatccccatattttcacatctaacttcaacaacggaatcggcagacacaagacctacctgtgctatgaggtggaaaggctggataacggaacctctgtgaagatggaccagcacaggtaagtatcaaggttacaagacaggtttaaggagaccaatagaaactgggcttgtcgagacagagaagactcttgcgtttctgataggcacctattggtcttactgacatccactttgcctttctctccacaggggcttcctgcataaccaggccaagaatctgctgtgcggtttctacgggagacatgcagaactgaggtttctggatctggtgccatccctgcagctggaccccgctcagatctacagagtgacttggttcatctcttggagcccttgcttttcatggggatgtgctggcgaggtgagggccttccttcaggaaaacacacacgtgagactgaggatttttgctgccagaatctacgattatgacccactgtacaaggaagctctgcagatgctgagggatgcaggcgctcaggtgagcattatgacctatgacgaattcaagcactgctgggatacttttgtggaccatcagggttgtccttttcagccatgggatgggctggacgagcattctcaggcactgagcggtagactgagggctatcctgcagaaccaggggaat

SEQ ID NO: 469 - DNA, 4831 bp, synthetic construct
  source 1..4831: mol_type = other DNA
accaacctcagcgacattatcgagaaggaaaccggcaagcaactcgtgatccaggagagcatactgatgctccccgaggaggtcgaggaggtgattggcaataagcccgagtccgatatactggttcatactgcgtatgacgaaagcacagacgagaacgtcatgctacttaccagcgacgccccggagtacaagccctgggccctagtcatccaagacagcaacggtgagaacaagatcaagatgctttcaggcggaagtggtggaagtggcggtagtggctataccagcgacgaggaggtgctggaagtcttccgcaacacactgaataagaatagcgagattttctcctccatcaagaagctcgagaagctctttaagaactttgacgagtacagctccgccgggattttcgtgaagaacgggccggcgatcagcaccatctccaaggacatctttggcgagtggaacgtcatcagggacaagtggaacgccgagtacgacgacatccacctgaagaagaaggcggtggtgaccgagaagtatgaggacgatcgcaggaagtccttcaaaaaaatcggctccttcagcctcgaacagctccaggagtatgccgatgcggatctgtccgtcgtcgagaagctgaaggaaatcatcattcagaaggtcgacgagatctataaagtgtacgggtccagcgagaagctgttcgacgccgactttgtgctcgagaagtccctcaaaaagaatgacgccgtggtggccattatgaaagacctgctcgactccgtgaagtccttcgaaaattacattaaagcgttctttggggaggggaaggaaactaacagggatgagtccttctatggcgactttgtcctcgcgtacgacatcctgctgaaggtcgaccacatttacgacgcgatccgcaactacgtgacacagaagccgtactccaaagacaagttcaagctgtacttccagaacccgcaatttatggggggctgggacaaggataaagagacagactaccgcgcgacaattctccgctatggctccaaatactatctggccatcatggacaagaagtacgcgaagtgcctgcagaagatcgacaaagacgacgtcaatggcaactatgaaaagatcaactacaagctgctgccgggcccgaacaagatgctcccgaaggtgttcttcagcaagaagtggatggcctactacaatccaagcgaggatattcagaaaatctataaaaacgggaccttcaagaagggggacatgtttaacctcaacgactgccacaagctcattgatttcttcaaggatagcatttcccgctacccgaaatggtccaatgcgtacgattttaacttctccgagacagaaaagtacaaagacatcgcgggcttttacagggaggtggaggagcaagggtataaagtttcttttgaatccgcgagcaagaaggaagtcgacaagctcgtcgaggagggcaagctctacatgttccaaatttataacaaggacttttccgacaagagccatgggaccccaaacctccacaccatgtacttcaaactgctctttgacgagaacaaccacgggcaaatcaggctgagcggcggcgccgaattattcatgcgcagggcctccctcaagaaggaagagctggtcgtccatccagccaattccccgatcgcgaacaagaacccggacaatccgaaaaagaccaccaccctgtcctacgacgtctacaaggacaaacgcttcagcgaagaccagtacgaattacacatcccaattgcgattaataagtgcccaaagaatatcttcaaaattaatacagaggtcagggtgctgctcaaacacgacgacaatccgtatgtcatcggcattgccaggggcgagcgcaatctgctctatatcgtggtcgtggatgggaagggcaatattgtggagcagtactccctgaacgagattatcaacaacttcaatgggattaggattaagaccgactatcacagcctgctcgacaagaaagaaaaagagaggtttgaggcccgccaaaactggacctccattgagaatatcaaagaattaaaggccggctatatttcccaagtcgtccacaagatctgcgagctggtggagaaatatgacgccgtgattgcgctcgaagacttaaattctgggttcaagaactcccgcgtgaaggtggaaaaacaggtgtatcagaaattcgagaaaatgctgatcgacaaactcaattatatggtggataagaagtccaacccgtgtgccacagggggcgcgctgaagggctatcagatcaccaacaagttcgagagcttcaagagcatgagcacccagaacgggtttattttctacatcccggcgtggctcacctccaagattgacccgagcaccggcttcgtgaacctcctgaagacaaagtatacctccattgccgacagcaagaagtttatctcctccttcgaccgcattatgtatgtgccggaggaggacctcttcgagttcgccctcgactacaaaaacttcagccgcacagatgcggattacatcaagaagtggaagctgtactcctacgggaacaggatccgcatcttcaggaatccaaaaaaaaataacgtctttgactgggaggaagtgtgcctgacatccgcctacaaggaactgttcaataaatacggcatcaattaccagcagggcgacattcgcgccctcctctgtgagcagtccgacaaagcgttttactccagcttcatggccctcatgtccctgatgctccaaatgaggaatagcatcacagggcgcaccgacgtcgacttcctcatcagcccggtgaagaactccgacgggatcttttacgactcccgcaactatgaggcgcaagagaatgcgatcctcccgaagaacgccgatgcgaacggggcctataatatcgccaggaaagtgctctgggccatcgggcagttcaaaaaggcggaggatgagaagctcgacaaggtgaaaattgccatttccaacaaggagtggctggagtacgcgcagacctccgtgaagcacggctcctctggcagctccggctctagcggctcctctggcagctccggctccaagctggagaagtttacaaactgttacagcctctccaaaaccctcaggtttaaagcgatcccggtgggcaagacccaggagaacatcgacaacaagaggctcctggtggaagacgagaagcgcgccgaagactacaagggcgtgaagaagctgctcgataggtactacctcagctttattaacgacgtgctgcacagcatcaaactcaagaatctcaacaactacatctccctcttccgcaaaaagacccgcaccgagaaggagaacaaggagctggagaacctggagatcaacctccgcaaggaaatcgccaaagcgttcaagggcaatgaagggtacaagagcctcttcaagaaagacatcatcgaaactatcctcccagagtttctcgatgacaaggacgagatcgcgctggtgaactcctttaacgggttcacaaccgcgtttaccggcttctttgataacagggaaaatatgttctccgaggaggccaagtccaccagcatcgccttcaggtgtatcaacgagaacctcacccgctacatttccaatatggacattttcgagaaggtggatgcgatcttcgataagcacgaggtgcaggagatcaaagagaagattctcaattccgattatgacgtcgaggatttcttcgaaggggagttctttaattttgtgctcacacaagagggcattgacgtgtacaacgcgattatcgggggcttcgtcacagagtccggggagaagattaaggggctgaatgagtacatcaatctgtacaatcagaagaccaagcagaaactgccgaaattcaagccgctctacaagcaagtcctgtccgatagggaaagcctctccttctacggcgagtctggtggttcttctggtggttctagcggcagcgagactcccgggacctcagagtccgccacacccgaaagttctggtggttcttctggtggttctgaggcctcccccgcatcaggacctagacacctgatggatccccatattttcacatctaacttcaacaacggaatcggcagacacaagacctacctgtgctatgaggtggaaaggctggataacggaacctctgtgaagatggaccagcacaggtaagtatcaaggttacaagacaggtttaaggagaccaatagaaactgggcttgtcgagacagagaagactcttgcgtttctgataggcacctattggtcttactgacatccactttgcctttctctccacaggggcttcctgcataaccaggccaagaatctgctgtgcggtttctacgggagacatgcagaactgaggtttctggatctggtgccatccctgcagctggaccccgctcagatctacagagtgacttggttcatctcttggagcccttgcttttcatggggatgtgctggcgaggtgagggccttccttcaggaaaacacacacgtgagactgaggatttttgctgccagaatctacgattatgacccactgtacaaggaagctctgcagatgctgagggatgcaggcgctcaggtgagcattatgacctatgacgaattcaagcactgctgggatacttttgtggaccatcagggttgtccttttcagccatgggatgggctggacgagcattctcaggcactgagcggtagactgagggctatcctgcagaaccaggggaat

SEQ ID NO: 470 - DNA, 4831 bp, synthetic construct
  source 1..4831: mol_type = other DNA
accaacctcagcgacattatcgagaaggaaaccggcaagcaactcgtgatccaggagagcatactgatgctccccgaggaggtcgaggaggtgattggcaataagcccgagtccgatatactggttcatactgcgtatgacgaaagcacagacgagaacgtcatgctacttaccagcgacgccccggagtacaagccctgggccctagtcatccaagacagcaacggtgagaacaagatcaagatgctttcaggcggaagtggtggaagtggcggtagttccgacgggatcttttacgactcccgcaactatgaggcgcaagagaatgcgatcctcccgaagaacgccgatgcgaacggggcctataatatcgccaggaaagtgctctgggccatcgggcagttcaaaaaggcggaggatgagaagctcgacaaggtgaaaattgccatttccaacaaggagtggctggagtacgcgcagacctccgtgaagcacggctcctctggcagctccggctctagcggctcctctggcagctccggctccaagctggagaagtttacaaactgttacagcctctccaaaaccctcaggtttaaagcgatcccggtgggcaagacccaggagaacatcgacaacaagaggctcctggtggaagacgagaagcgcgccgaagactacaagggcgtgaagaagctgctcgataggtactacctcagctttattaacgacgtgctgcacagcatcaaactcaagaatctcaacaactacatctccctcttccgcaaaaagacccgcaccgagaaggagaacaaggagctggagaacctggagatcaacctccgcaaggaaatcgccaaagcgttcaagggcaatgaagggtacaagagcctcttcaagaaagacatcatcgaaactatcctcccagagtttctcgatgacaaggacgagatcgcgctggtgaactcctttaacgggttcacaaccgcgtttaccggcttctttgataacagggaaaatatgttctccgaggaggccaagtccaccagcatcgccttcaggtgtatcaacgagaacctcacccgctacatttccaatatggacattttcgagaaggtggatgcgatcttcgataagcacgaggtgcaggagatcaaagagaagattctcaattccgattatgacgtcgaggatttcttcgaaggggagttctttaattttgtgctcacacaagagggcattgacgtgtacaacgcgattatcgggggcttcgtcacagagtccggggagaagattaaggggctgaatgagtacatcaatctgtacaatcagaagaccaagcagaaactgccgaaattcaagccgctctacaagcaagtcctgtccgatagggaaagcctctccttctacggcgagggctataccagcgacgaggaggtgctggaagtcttccgcaacacactgaataagaatagcgagattttctcctccatcaagaagctcgagaagctctttaagaactttgacgagtacagctccgccgggattttcgtgaagaacgggccggcgatcagcaccatctccaaggacatctttggcgagtggaacgtcatcagggacaagtggaacgccgagtacgacgacatccacctgaagaagaaggcggtggtgaccgagaagtatgaggacgatcgcaggaagtccttcaaaaaaatcggctccttcagcctcgaacagctccaggagtatgccgatgcggatctgtccgtcgtcgagaagctgaaggaaatcatcattcagaaggtcgacgagatctataaagtgtacgggtccagcgagaagctgttcgacgccgactttgtgctcgagaagtccctcaaaaagaatgacgccgtggtggccattatgaaagacctgctcgactccgtgaagtccttcgaaaattacattaaagcgttctttggggaggggaaggaaactaacagggatgagtccttctatggcgactttgtcctcgcgtacgacatcctgctgaaggtcgaccacatttacgacgcgatccgcaactacgtgacacagaagccgtactccaaagacaagttcaagctgtacttccagaacccgcaatttatggggggctgggacaaggataaagagacagactaccgcgcgacaattctccgctatggctccaaatactatctggccatcatggacaagaagtacgcgaagtgcctgcagaagatcgacaaagacgacgtcaatggcaactatgaaaagatcaactacaagctgctgccgggcccgaacaagatgctcccgaaggtgttcttcagcaagaagtggatggcctactacaatccaagcgaggatattcagaaaatctataaaaacgggaccttcaagaagggggacatgtttaacctcaacgactgccacaagctcattgatttcttcaaggatagcatttcccgctacccgaaatggtccaatgcgtacgattttaacttctccgagacagaaaagtacaaagacatcgcgggcttttacagggaggtggaggagcaagggtataaagtttcttttgaatccgcgagcaagaaggaagtcgacaagctcgtcgaggagggcaagctctacatgttccaaatttataacaaggacttttccgacaagagccatgggaccccaaacctccacaccatgtacttcaaactgctctttgacgagaacaaccacgggcaaatcaggctgagcggcggcgccgaattattcatgcgcagggcctccctcaagaaggaagagctggtcgtccatccagccaattccccgatcgcgaacaagaacccggacaatccgaaaaagaccaccaccctgtcctacgacgtctacaaggacaaacgcttcagcgaagaccagtacgaattacacatcccaattgcgattaataagtgcccaaagaatatcttcaaaattaatacagaggtcagggtgctgctcaaacacgacgacaatccgtatgtcatcggcattgccaggggcgagcgcaatctgctctatatcgtggtcgtggatgggaagggcaatattgtggagcagtactccctgaacgagattatcaacaacttcaatgggattaggattaagaccgactatcacagcctgctcgacaagaaagaaaaagagaggtttgaggcccgccaaaactggacctccattgagaatatcaaagaattaaaggccggctatatttcccaagtcgtccacaagatctgcgagctggtggagaaatatgacgccgtgattgcgctcgaagacttaaattctgggttcaagaactcccgcgtgaaggtggaaaaacaggtgtatcagaaattcgagaaaatgctgatcgacaaactcaattatatggtggataagaagtccaacccgtgtgccacagggggcgcgctgaagggctatcagatcaccaacaagttcgagagcttcaagagcatgagcacccagaacgggtttattttctacatcccggcgtggctcacctccaagattgacccgagcaccggcttcgtgaacctcctgaagacaaagtatacctccattgccgacagcaagaagtttatctcctccttcgaccgcattatgtatgtgccggaggaggacctcttcgagttcgccctcgactacaaaaacttcagccgcacagatgcggattacatcaagaagtggaagctgtactcctacgggaacaggatccgcatcttcaggaatccaaaaaaaaataacgtctttgactgggaggaagtgtgcctgacatccgcctacaaggaactgttcaataaatacggcatcaattaccagcagggcgacattcgcgccctcctctgtgagcagtccgacaaagcgttttactccagcttcatggccctcatgtccctgatgctccaaatgaggaatagcatcacagggcgcaccgacgtcgacttcctcatcagcccggtgaagaactctggtggttcttctggtggttctagcggcagcgagactcccgggacctcagagtccgccacacccgaaagttctggtggttcttctggtggttctgaggcctcccccgcatcaggacctagacacctgatggatccccatattttcacatctaacttcaacaacggaatcggcagacacaagacctacctgtgctatgaggtggaaaggctggataacggaacctctgtgaagatggaccagcacaggtaagtatcaaggttacaagacaggtttaaggagaccaatagaaactgggcttgtcgagacagagaagactcttgcgtttctgataggcacctattggtcttactgacatccactttgcctttctctccacaggggcttcctgcataaccaggccaagaatctgctgtgcggtttctacgggagacatgcagaactgaggtttctggatctggtgccatccctgcagctggaccccgctcagatctacagagtgacttggttcatctcttggagcccttgcttttcatggggatgtgctggcgaggtgagggccttccttcaggaaaacacacacgtgagactgaggatttttgctgccagaatctacgattatgacccactgtacaaggaagctctgcagatgctgagggatgcaggcgctcaggtgagcattatgacctatgacgaattcaagcactgctgggatacttttgtggaccatcagggttgtccttttcagccatgggatgggctggacgagcattctcaggcactgagcggtagactgagggctatcctgcagaaccaggggaat

SEQ ID NO: 471 - DNA, 4831 bp, synthetic construct
  source 1..4831: mol_type = other DNA
accaacctcagcgacattatcgagaaggaaaccggcaagcaactcgtgatccaggagagcatactgatgctccccgaggaggtcgaggaggtgattggcaataagcccgagtccgatatactggttcatactgcgtatgacgaaagcacagacgagaacgtcatgctacttaccagcgacgccccggagtacaagccctgggccctagtcatccaagacagcaacggtgagaacaagatcaagatgctttcaggcggaagtggtggaagtggcggtagtaaagacaagttcaagctgtacttccagaacccgcaatttatggggggctgggacaaggataaagagacagactaccgcgcgacaattctccgctatggctccaaatactatctggccatcatggacaagaagtacgcgaagtgcctgcagaagatcgacaaagacgacgtcaatggcaactatgaaaagatcaactacaagctgctgccgggcccgaacaagatgctcccgaaggtgttcttcagcaagaagtggatggcctactacaatccaagcgaggatattcagaaaatctataaaaacgggaccttcaagaagggggacatgtttaacctcaacgactgccacaagctcattgatttcttcaaggatagcatttcccgctacccgaaatggtccaatgcgtacgattttaacttctccgagacagaaaagtacaaagacatcgcgggcttttacagggaggtggaggagcaagggtataaagtttcttttgaatccgcgagcaagaaggaagtcgacaagctcgtcgaggagggcaagctctacatgttccaaatttataacaaggacttttccgacaagagccatgggaccccaaacctccacaccatgtacttcaaactgctctttgacgagaacaaccacgggcaaatcaggctgagcggcggcgccgaattattcatgcgcagggcctccctcaagaaggaagagctggtcgtccatccagccaattccccgatcgcgaacaagaacccggacaatccgaaaaagaccaccaccctgtcctacgacgtctacaaggacaaacgcttcagcgaagaccagtacgaattacacatcccaattgcgattaataagtgcccaaagaatatcttcaaaattaatacagaggtcagggtgctgctcaaacacgacgacaatccgtatgtcatcggcattgccaggggcgagcgcaatctgctctatatcgtggtcgtggatgggaagggcaatattgtggagcagtactccctgaacgagattatcaacaacttcaatgggattaggattaagaccgactatcacagcctgctcgacaagaaagaaaaagagaggtttgaggcccgccaaaactggacctccattgagaatatcaaagaattaaaggccggctatatttcccaagtcgtccacaagatctgcgagctggtggagaaatatgacgccgtgattgcgctcgaagacttaaattctgggttcaagaactcccgcgtgaaggtggaaaaacaggtgtatcagaaattcgagaaaatgctgatcgacaaactcaattatatggtggataagaagtccaacccgtgtgccacagggggcgcgctgaagggctatcagatcaccaacaagttcgagagcttcaagagcatgagcacccagaacgggtttattttctacatcccggcgtggctcacctccaagattgacccgagcaccggcttcgtgaacctcctgaagacaaagtatacctccattgccgacagcaagaagtttatctcctccttcgaccgcattatgtatgtgccggaggaggacctcttcgagttcgccctcgactacaaaaacttcagccgcacagatgcggattacatcaagaagtggaagctgtactcctacgggaacaggatccgcatcttcaggaatccaaaaaaaaataacgtctttgactgggaggaagtgtgcctgacatccgcctacaaggaactgttcaataaatacggcatcaattaccagcagggcgacattcgcgccctcctctgtgagcagtccgacaaagcgttttactccagcttcatggccctcatgtccctgatgctccaaatgaggaatagcatcacagggcgcaccgacgtcgacttcctcatcagcccggtgaagaactccgacgggatcttttacgactcccgcaactatgaggcgcaagagaatgcgatcctcccgaagaacgccgatgcgaacggggcctataatatcgccaggaaagtgctctgggccatcgggcagttcaaaaaggcggaggatgagaagctcgacaaggtgaaaattgccatttccaacaaggagtggctggagtacgcgcagacctccgtgaagcacggctcctctggcagctccggctctagcggctcctctggcagctccggctccaagctggagaagtttacaaactgttacagcctctccaaaaccctcaggtttaaagcgatcccggtgggcaagacccaggagaacatcgacaacaagaggctcctggtggaagacgagaagcgcgccgaagactacaagggcgtgaagaagctgctcgataggtactacctcagctttattaacgacgtgctgcacagcatcaaactcaagaatctcaacaactacatctccctcttccgcaaaaagacccgcaccgagaaggagaacaaggagctggagaacctggagatcaacctccgcaaggaaatcgccaaagcgttcaagggcaatgaagggtacaagagcctcttcaagaaagacatcatcgaaactatcctcccagagtttctcgatgacaaggacgagatcgcgctggtgaactcctttaacgggttcacaaccgcgtttaccggcttctttgataacagggaaaatatgttctccgaggaggccaagtccaccagcatcgccttcaggtgtatcaacgagaacctcacccgctacatttccaatatggacattttcgagaaggtggatgcgatcttcgataagcacgaggtgcaggagatcaaagagaagattctcaattccgattatgacgtcgaggatttcttcgaaggggagttctttaattttgtgctcacacaagagggcattgacgtgtacaacgcgattatcgggggcttcgtcacagagtccggggagaagattaaggggctgaatgagtacatcaatctgtacaatcagaagaccaagcagaaactgccgaaattcaagccgctctacaagcaagtcctgtccgatagggaaagcctctccttctacggcgagggctataccagcgacgaggaggtgctggaagtcttccgcaacacactgaataagaatagcgagattttctcctccatcaagaagctcgagaagctctttaagaactttgacgagtacagctccgccgggattttcgtgaagaacgggccggcgatcagcaccatctccaaggacatctttggcgagtggaacgtcatcagggacaagtggaacgccgagtacgacgacatccacctgaagaagaaggcggtggtgaccgagaagtatgaggacgatcgcaggaagtccttcaaaaaaatcggctccttcagcctcgaacagctccaggagtatgccgatgcggatctgtccgtcgtcgagaagctgaaggaaatcatcattcagaaggtcgacgagatctataaagtgtacgggtccagcgagaagctgttcgacgccgactttgtgctcgagaagtccctcaaaaagaatgacgccgtggtggccattatgaaagacctgctcgactccgtgaagtccttcgaaaattacattaaagcgttctttggggaggggaaggaaactaacagggatgagtccttctatggcgactttgtcctcgcgtacgacatcctgctgaaggtcgaccacatttacgacgcgatccgcaactacgtgacacagaagccgtactcctctggtggttcttctggtggttctagcggcagcgagactcccgggacctcagagtccgccacacccgaaagttctggtggttcttctggtggttctgaggcctcccccgcatcaggacctagacacctgatggatccccatattttcacatctaacttcaacaacggaatcggcagacacaagacctacctgtgctatgaggtggaaaggctggataacggaacctctgtgaagatggaccagcacaggtaagtatcaaggttacaagacaggtttaaggagaccaatagaaactgggcttgtcgagacagagaagactcttgcgtttctgataggcacctattggtcttactgacatccactttgcctttctctccacaggggcttcctgcataaccaggccaagaatctgctgtgcggtttctacgggagacatgcagaactgaggtttctggatctggtgccatccctgcagctggaccccgctcagatctacagagtgacttggttcatctcttggagcccttgcttttcatggggatgtgctggcgaggtgagggccttccttcaggaaaacacacacgtgagactgaggatttttgctgccagaatctacgattatgacccactgtacaaggaagctctgcagatgctgagggatgcaggcgctcaggtgagcattatgacctatgacgaattcaagcactgctgggatacttttgtggaccatcagggttgtccttttcagccatgggatgggctggacgagcattctcaggcactgagcggtagactgagggctatcctgcagaaccaggggaat

SEQ ID NO: 472 - DNA, 4831 bp, synthetic construct
  source 1..4831: mol_type = other DNA
accaacctcagcgacattatcgagaaggaaaccggcaagcaactcgtgatccaggagagcatactgatgctccccgaggaggtcgaggaggtgattggcaataagcccgagtccgatatactggttcatactgcgtatgacgaaagcacagacgagaacgtcatgctacttaccagcgacgccccggagtacaagccctgggccctagtcatccaagacagcaacggtgagaacaagatcaagatgctttcaggcggaagtggtggaagtggcggtagtaagtccctcaaaaagaatgacgccgtggtggccattatgaaagacctgctcgactccgtgaagtccttcgaaaattacattaaagcgttctttggggaggggaaggaaactaacagggatgagtccttctatggcgactttgtcctcgcgtacgacatcctgctgaaggtcgaccacatttacgacgcgatccgcaactacgtgacacagaagccgtactccaaagacaagttcaagctgtacttccagaacccgcaatttatggggggctgggacaaggataaagagacagactaccgcgcgacaattctccgctatggctccaaatactatctggccatcatggacaagaagtacgcgaagtgcctgcagaagatcgacaaagacgacgtcaatggcaactatgaaaagatcaactacaagctgctgccgggcccgaacaagatgctcccgaaggtgttcttcagcaagaagtggatggcctactacaatccaagcgaggatattcagaaaatctataaaaacgggaccttcaagaagggggacatgtttaacctcaacgactgccacaagctcattgatttcttcaaggatagcatttcccgctacccgaaatggtccaatgcgtacgattttaacttctccgagacagaaaagtacaaagacatcgcgggcttttacagggaggtggaggagcaagggtataaagtttcttttgaatccgcgagcaagaaggaagtcgacaagctcgtcgaggagggcaagctctacatgttccaaatttataacaaggacttttccgacaagagccatgggaccccaaacctccacaccatgtacttcaaactgctctttgacgagaacaaccacgggcaaatcaggctgagcggcggcgccgaattattcatgcgcagggcctccctcaagaaggaagagctggtcgtccatccagccaattccccgatcgcgaacaagaacccggacaatccgaaaaagaccaccaccctgtcctacgacgtctacaaggacaaacgcttcagcgaagaccagtacgaattacacatcccaattgcgattaataagtgcccaaagaatatcttcaaaattaatacagaggtcagggtgctgctcaaacacgacgacaatccgtatgtcatcggcattgccaggggcgagcgcaatctgctctatatcgtggtcgtggatgggaagggcaatattgtggagcagtactccctgaacgagattatcaacaacttcaatgggattaggattaagaccgactatcacagcctgctcgacaagaaagaaaaagagaggtttgaggcccgccaaaactggacctccattgagaatatcaaagaattaaaggccggctatatttcccaagtcgtccacaagatctgcgagctggtggagaaatatgacgccgtgattgcgctcgaagacttaaattctgggttcaagaactcccgcgtgaaggtggaaaaacaggtgtatcagaaattcgagaaaatgctgatcgacaaactcaattatatggtggataagaagtccaacccgtgtgccacagggggcgcgctgaagggctatcagatcaccaacaagttcgagagcttcaagagcatgagcacccagaacgggtttattttctacatcccggcgtggctcacctccaagattgacccgagcaccggcttcgtgaacctcctgaagacaaagtatacctccattgccgacagcaagaagtttatctcctccttcgaccgcattatgtatgtgccggaggaggacctcttcgagttcgccctcgactacaaaaacttcagccgcacagatgcggattacatcaagaagtggaagctgtactcctacgggaacaggatccgcatcttcaggaatccaaaaaaaaataacgtctttgactgggaggaagtgtgcctgacatccgcctacaaggaactgttcaataaatacggcatcaattaccagcagggcgacattcgcgccctcctctgtgagcagtccgacaaagcgttttactccagcttcatggccctcatgtccctgatgctccaaatgaggaatagcatcacagggcgcaccgacgtcgacttcctcatcagcccggtgaagaactccgacgggatcttttacgactcccgcaactatgaggcgcaagagaatgcgatcctcccgaagaacgccgatgcgaacggggcctataatatcgccaggaaagtgctctgggccatcgggcagttcaaaaaggcggaggatgagaagctcgacaaggtgaaaattgccatttccaacaaggagtggctggagtacgcgcagacctccgtgaagcacggctcctctggcagctccggctctagcggctcctctggcagctccggctccaagctggagaagtttacaaactgttacagcctctccaaaaccctcaggtttaaagcgatcccggtgggcaagacccaggagaacatcgacaacaagaggctcctggtggaagacgagaagcgcgccgaagactacaagggcgtgaagaagctgctcgataggtactacctcagctttattaacgacgtgctgcacagcatcaaactcaagaatctcaacaactacatctccctcttccgcaaaaagacccgcaccgagaaggagaacaaggagctggagaacctggagatcaacctccgcaaggaaatcgccaaagcgttcaagggcaatgaagggtacaagagcctcttcaagaaagacatcatcgaaactatcctcccagagtttctcgatgacaaggacgagatcgcgctggtgaactcctttaacgggttcacaaccgcgtttaccggcttctttgataacagggaaaatatgttctccgaggaggccaagtccaccagcatcgccttcaggtgtatcaacgagaacctcacccgctacatttccaatatggacattttcgagaaggtggatgcgatcttcgataagcacgaggtgcaggagatcaaagagaagattctcaattccgattatgacgtcgaggatttcttcgaaggggagttctttaattttgtgctcacacaagagggcattgacgtgtacaacgcgattatcgggggcttcgtcacagagtccggggagaagattaaggggctgaatgagtacatcaatctgtacaatcagaagaccaagcagaaactgccgaaattcaagccgctctacaagcaagtcctgtccgatagggaaagcctctccttctacggcgagggctataccagcgacgaggaggtgctggaagtcttccgcaacacactgaataagaatagcgagattttctcctccatcaagaagctcgagaagctctttaagaactttgacgagtacagctccgccgggattttcgtgaagaacgggccggcgatcagcaccatctccaaggacatctttggcgagtggaacgtcatcagggacaagtggaacgccgagtacgacgacatccacctgaagaagaaggcggtggtgaccgagaagtatgaggacgatcgcaggaagtccttcaaaaaaatcggctccttcagcctcgaacagctccaggagtatgccgatgcggatctgtccgtcgtcgagaagctgaaggaaatcatcattcagaaggtcgacgagatctataaagtgtacgggtccagcgagaagctgttcgacgccgactttgtgctcgagtctggtggttcttctggtggttctagcggcagcgagactcccgggacctcagagtccgccacacccgaaagttctggtggttcttctggtggttctgaggcctcccccgcatcaggacctagacacctgatggatccccatattttcacatctaacttcaacaacggaatcggcagacacaagacctacctgtgctatgaggtggaaaggctggataacggaacctctgtgaagatggaccagcacaggtaagtatcaaggttacaagacaggtttaaggagaccaatagaaactgggcttgtcgagacagagaagactcttgcgtttctgataggcacctattggtcttactgacatccactttgcctttctctccacaggggcttcctgcataaccaggccaagaatctgctgtgcggtttctacgggagacatgcagaactgaggtttctggatctggtgccatccctgcagctggaccccgctcagatctacagagtgacttggttcatctcttggagcccttgcttttcatggggatgtgctggcgaggtgagggccttccttcaggaaaacacacacgtgagactgaggatttttgctgccagaatctacgattatgacccactgtacaaggaagctctgcagatgctgagggatgcaggcgctcaggtgagcattatgacctatgacgaattcaagcactgctgggatacttttgtggaccatcagggttgtccttttcagccatgggatgggctggacgagcattctcaggcactgagcggtagactgagggctatcctgcagaaccaggggaat

SEQ ID NO: 473 - DNA, 4831 bp, synthetic construct
  source 1..4831: mol_type = other DNA
accaacctcagcgacattatcgagaaggaaaccggcaagcaactcgtgatccaggagagcatactgatgctccccgaggaggtcgaggaggtgattggcaataagcccgagtccgatatactggttcatactgcgtatgacgaaagcacagacgagaacgtcatgctacttaccagcgacgccccggagtacaagccctgggccctagtcatccaagacagcaacggtgagaacaagatcaagatgctttcaggcggaagtggtggaagtggcggtagttccgacaaagcgttttactccagcttcatggccctcatgtccctgatgctccaaatgaggaatagcatcacagggcgcaccgacgtcgacttcctcatcagcccggtgaagaactccgacgggatcttttacgactcccgcaactatgaggcgcaagagaatgcgatcctcccgaagaacgccgatgcgaacggggcctataatatcgccaggaaagtgctctgggccatcgggcagttcaaaaaggcggaggatgagaagctcgacaaggtgaaaattgccatttccaacaaggagtggctggagtacgcgcagacctccgtgaagcacggctcctctggcagctccggctctagcggctcctctggcagctccggctccaagctggagaagtttacaaactgttacagcctctccaaaaccctcaggtttaaagcgatcccggtgggcaagacccaggagaacatcgacaacaagaggctcctggtggaagacgagaagcgcgccgaagactacaagggcgtgaagaagctgctcgataggtactacctcagctttattaacgacgtgctgcacagcatcaaactcaagaatctcaacaactacatctccctcttccgcaaaaagacccgcaccgagaaggagaacaaggagctggagaacctggagatcaacctccgcaaggaaatcgccaaagcgttcaagggcaatgaagggtacaagagcctcttcaagaaagacatcatcgaaactatcctcccagagtttctcgatgacaaggacgagatcgcgctggtgaactcctttaacgggttcacaaccgcgtttaccggcttctttgataacagggaaaatatgttctccgaggaggccaagtccaccagcatcgccttcaggtgtatcaacgagaacctcacccgctacatttccaatatggacattttcgagaaggtggatgcgatcttcgataagcacgaggtgcaggagatcaaagagaagattctcaattccgattatgacgtcgaggatttcttcgaaggggagttctttaattttgtgctcacacaagagggcattgacgtgtacaacgcgattatcgggggcttcgtcacagagtccggggagaagattaaggggctgaatgagtacatcaatctgtacaatcagaagaccaagcagaaactgccgaaattcaagccgctctacaagcaagtcctgtccgatagggaaagcctctccttctacggcgagggctataccagcgacgaggaggtgctggaagtcttccgcaacacactgaataagaatagcgagattttctcctccatcaagaagctcgagaagctctttaagaactttgacgagtacagctccgccgggattttcgtgaagaacgggccggcgatcagcaccatctccaaggacatctttggcgagtggaacgtcatcagggacaagtggaacgccgagtacgacgacatccacctgaagaagaaggcggtggtgaccgagaagtatgaggacgatcgcaggaagtccttcaaaaaaatcggctccttcagcctcgaacagctccaggagtatgccgatgcggatctgtccgtcgtcgagaagctgaaggaaatcatcattcagaaggtcgacgagatctataaagtgtacgggtccagcgagaagctgttcgacgccgactttgtgctcgagaagtccctcaaaaagaatgacgccgtggtggccattatgaaagacctgctcgactccgtgaagtccttcgaaaattacattaaagcgttctttggggaggggaaggaaactaacagggatgagtccttctatggcgactttgtcctcgcgtacgacatcctgctgaaggtcgaccacatttacgacgcgatccgcaactacgtgacacagaagccgtactccaaagacaagttcaagctgtacttccagaacccgcaatttatggggggctgggacaaggataaagagacagactaccgcgcgacaattctccgctatggctccaaatactatctggccatcatggacaagaagtacgcgaagtgcctgcagaagatcgacaaagacgacgtcaatggcaactatgaaaagatcaactacaagctgctgccgggcccgaacaagatgctcccgaaggtgttcttcagcaagaagtggatggcctactacaatccaagcgaggatattcagaaaatctataaaaacgggaccttcaagaagggggacatgtttaacctcaacgactgccacaagctcattgatttcttcaaggatagcatttcccgctacccgaaatggtccaatgcgtacgattttaacttctccgagacagaaaagtacaaagacatcgcgggcttttacagggaggtggaggagcaagggtataaagtttcttttgaatccgcgagcaagaaggaagtcgacaagctcgtcgaggagggcaagctctacatgttccaaatttataacaaggacttttccgacaagagccatgggaccccaaacctccacaccatgtacttcaaactgctctttgacgagaacaaccacgggcaaatcaggctgagcggcggcgccgaattattcatgcgcagggcctccctcaagaaggaagagctggtcgtccatccagccaattccccgatcgcgaacaagaacccggacaatccgaaaaagaccaccaccctgtcctacgacgtctacaaggacaaacgcttcagcgaagaccagtacgaattacacatcccaattgcgattaataagtgcccaaagaatatcttcaaaattaatacagaggtcagggtgctgctcaaacacgacgacaatccgtatgtcatcggcattgccaggggcgagcgcaatctgctctatatcgtggtcgtggatgggaagggcaatattgtggagcagtactccctgaacgagattatcaacaacttcaatgggattaggattaagaccgactatcacagcctgctcgacaagaaagaaaaagagaggtttgaggcccgccaaaactggacctccattgagaatatcaaagaattaaaggccggctatatttcccaagtcgtccacaagatctgcgagctggtggagaaatatgacgccgtgattgcgctcgaagacttaaattctgggttcaagaactcccgcgtgaaggtggaaaaacaggtgtatcagaaattcgagaaaatgctgatcgacaaactcaattatatggtggataagaagtccaacccgtgtgccacagggggcgcgctgaagggctatcagatcaccaacaagttcgagagcttcaagagcatgagcacccagaacgggtttattttctacatcccggcgtggctcacctccaagattgacccgagcaccggcttcgtgaacctcctgaagacaaagtatacctccattgccgacagcaagaagtttatctcctccttcgaccgcattatgtatgtgccggaggaggacctcttcgagttcgccctcgactacaaaaacttcagccgcacagatgcggattacatcaagaagtggaagctgtactcctacgggaacaggatccgcatcttcaggaatccaaaaaaaaataacgtctttgactgggaggaagtgtgcctgacatccgcctacaaggaactgttcaataaatacggcatcaattaccagcagggcgacattcgcgccctcctctgtgagcagtctggtggttcttctggtggttctagcggcagcgagactcccgggacctcagagtccgccacacccgaaagttctggtggttcttctggtggttctgaggcctcccccgcatcaggacctagacacctgatggatccccatattttcacatctaacttcaacaacggaatcggcagacacaagacctacctgtgctatgaggtggaaaggctggataacggaacctctgtgaagatggaccagcacaggtaagtatcaaggttacaagacaggtttaaggagaccaatagaaactgggcttgtcgagacagagaagactcttgcgtttctgataggcacctattggtcttactgacatccactttgcctttctctccacaggggcttcctgcataaccaggccaagaatctgctgtgcggtttctacgggagacatgcagaactgaggtttctggatctggtgccatccctgcagctggaccccgctcagatctacagagtgacttggttcatctcttggagcccttgcttttcatggggatgtgctggcgaggtgagggccttccttcaggaaaacacacacgtgagactgaggatttttgctgccagaatctacgattatgacccactgtacaaggaagctctgcagatgctgagggatgcaggcgctcaggtgagcattatgacctatgacgaattcaagcactgctgggatacttttgtggaccatcagggttgtccttttcagccatgggatgggctggacgagcattctcaggcactgagcggtagactgagggctatcctgcagaaccaggggaat

SEQ ID NO: 474 - DNA, 9169 bp, synthetic construct
  source 1..9169: mol_type = other DNA
agatatacgcgttgacattgattattgactagttattaatagtaatcaattacggggtcattagttcatagcccatatatggagttccgcgttacataacttacggtaaatggcccgcctggctgaccgcccaacgacccccgcccattgacgtcaataatgacgtatgttcccatagtaacgccaatagggactttccattgacgtcaatgggtggagtatttacggtaaactgcccacttggcagtacatcaagtgtatcatatgccaagtacgccccctattgacgtcaatgacggtaaatggcccgcctggcattatgcccagtacatgaccttatgggactttcctacttggcagtacatctacgtattagtcatcgctattaccatggtgatgcggttttggcagtacatcaatgggcgtggatagcggtttgactcacggggatttccaagtctccaccccattgacgtcaatgggagtttgttttggcaccaaaatcaacgggactttccaaaatgtcgtaacaactccgccccattgacgcaaatgggcggtaggcgtgtacggtgggaggtctatataagcagagctggtttagtgaaccgtcagatccgctagagatccgcggccgctaatacgactcactatagggagagccgccaccatgaaacggacagccgacggaagcgagttcgagtcaccaaagaagaagcggaaagtcgaggcctcccccgcatcaggacctagacacctgatggatccccatattttcacatctaacttcaacaacggaatcggcagacacaagacctacctgtgctatgaggtggaaaggctggataacggaacctctgtgaagatggaccagcacaggtaagtatcaaggttacaagacaggtttaaggagaccaatagaaactgggcttgtcgagacagagaagactcttgcgtttctgataggcacctattggtcttactgacatccactttgcctttctctccacaggggcttcctgcataaccaggccaagaatctgctgtgcggtttctacgggagacatgcagaactgaggtttctggatctggtgccatccctgcagctggaccccgctcagatctacagagtgacttggttcatctcttggagcccttgcttttcatggggatgtgctggcgaggtgagggccttccttcaggaaaacacacacgtgagactgaggatttttgctgccagaatctacgattatgacccactgtacaaggaagctctgcagatgctgagggatgcaggcgctcaggtgagcattatgacctatgacgaattcaagcactgctgggatacttttgtggaccatcagggttgtccttttcagccatgggatgggctggacgagcattctcaggcactgagcggtagactgagggctatcctgcagaaccaggggaattctggtggttcttctggtggttctagcggcagcgagactcccgggacctcagagtccgccacacccgaaagttctggtggttcttctggtggttctcgcaccgagaaggagaacaaggagctggagaacctggagatcaacctccgcaaggaaatcgccaaagcgttcaagggcaatgaagggtacaagagcctcttcaagaaagacatcatcgaaactatcctcccagagtttctcgatgacaaggacgagatcgcgctggtgaactcctttaacgggttcacaaccgcgtttaccggcttctttgataacagggaaaatatgttctccgaggaggccaagtccaccagcatcgccttcaggtgtatcaacgagaacctcacccgctacatttccaatatggacattttcgagaaggtggatgcgatcttcgataagcacgaggtgcaggagatcaaagagaagattctcaattccgattatgacgtcgaggatttcttcgaaggggagttctttaattttgtgctcacacaagagggcattgacgtgtacaacgcgattatcgggggcttcgtcacagagtccggggagaagattaaggggctgaatgagtacatcaatctgtacaatcagaagaccaagcagaaactgccgaaattcaagccgctctacaagcaagtcctgtccgatagggaaagcctctccttctacggcgagggctataccagcgacgaggaggtgctggaagtcttccgcaacacactgaataagaatagcgagattttctcctccatcaagaagctcgagaagctctttaagaactttgacgagtacagctccgccgggattttcgtgaagaacgggccggcgatcagcaccatctccaaggacatctttggcgagtggaacgtcatcagggacaagtggaacgccgagtacgacgacatccacctgaagaagaaggcggtggtgaccgagaagtatgaggacgatcgcaggaagtccttcaaaaaaatcggctccttcagcctcgaacagctccaggagtatgccgatgcggatctgtccgtcgtcgagaagctgaaggaaatcatcattcagaaggtcgacgagatctataaagtgtacgggtccagcgagaagctgttcgacgccgactttgtgctcgagaagtccctcaaaaagaatgacgccgtggtggccattatgaaagacctgctcgactccgtgaagtccttcgaaaattacattaaagcgttctttggggaggggaaggaaactaacagggatgagtccttctatggcgactttgtcctcgcgtacgacatcctgctgaaggtcgaccacatttacgacgcgatccgcaactacgtgacacagaagccgtactccaaagacaagttcaagctgtacttccagaacccgcaatttatggggggctgggacaaggataaagagacagactaccgcgcgacaattctccgctatggctccaaatactatctggccatcatggacaagaagtacgcgaagtgcctgcagaagatcgacaaagacgacgtcaatggcaactatgaaaagatcaactacaagctgctgccgggcccgaacaagatgctcccgaaggtgttcttcagcaagaagtggatggcctactacaatccaagcgaggatattcagaaaatctataaaaacgggaccttcaagaagggggacatgtttaacctcaacgactgccacaagctcattgatttcttcaaggatagcatttcccgctacccgaaatggtccaatgcgtacgattttaacttctccgagacagaaaagtacaaagacatcgcgggcttttacagggaggtggaggagcaagggtataaagtttcttttgaatccgcgagcaagaaggaagtcgacaagctcgtcgaggagggcaagctctacatgttccaaatttataacaaggacttttccgacaagagccatgggaccccaaacctccacaccatgtacttcaaactgctctttgacgagaacaaccacgggcaaatcaggctgagcggcggcgccgaattattcatgcgcagggcctccctcaagaaggaagagctggtcgtccatccagccaattccccgatcgcgaacaagaacccggacaatccgaaaaagaccaccaccctgtcctacgacgtctacaaggacaaacgcttcagcgaagaccagtacgaattacacatcccaattgcgattaataagtgcccaaagaatatcttcaaaattaatacagaggtcagggtgctgctcaaacacgacgacaatccgtatgtcatcggcattgccaggggcgagcgcaatctgctctatatcgtggtcgtggatgggaagggcaatattgtggagcagtactccctgaacgagattatcaacaacttcaatgggattaggattaagaccgactatcacagcctgctcgacaagaaagaaaaagagaggtttgaggcccgccaaaactggacctccattgagaatatcaaagaattaaaggccggctatatttcccaagtcgtccacaagatctgcgagctggtggagaaatatgacgccgtgattgcgctcgaagacttaaattctgggttcaagaactcccgcgtgaaggtggaaaaacaggtgtatcagaaattcgagaaaatgctgatcgacaaactcaattatatggtggataagaagtccaacccgtgtgccacagggggcgcgctgaagggctatcagatcaccaacaagttcgagagcttcaagagcatgagcacccagaacgggtttattttctacatcccggcgtggctcacctccaagattgacccgagcaccggcttcgtgaacctcctgaagacaaagtatacctccattgccgacagcaagaagtttatctcctccttcgaccgcattatgtatgtgccggaggaggacctcttcgagttcgccctcgactacaaaaacttcagccgcacagatgcggattacatcaagaagtggaagctgtactcctacgggaacaggatccgcatcttcaggaatccaaaaaaaaataacgtctttgactgggaggaagtgtgcctgacatccgcctacaaggaactgttcaataaatacggcatcaattaccagcagggcgacattcgcgccctcctctgtgagcagtccgacaaagcgttttactccagcttcatggccctcatgtccctgatgctccaaatgaggaatagcatcacagggcgcaccgacgtcgacttcctcatcagcccggtgaagaactccgacgggatcttttacgactcccgcaactatgaggcgcaagagaatgcgatcctcccgaagaacgccgatgcgaacggggcctataatatcgccaggaaagtgctctgggccatcgggcagttcaaaaaggcggaggatgagaagctcgacaaggtgaaaattgccatttccaacaaggagtggctggagtacgcgcagacctccgtgaagcacggctcctctggcagctccggctctagcggctcctctggcagctccggctccaagctggagaagtttacaaactgttacagcctctccaaaaccctcaggtttaaagcgatcccggtgggcaagacccaggagaacatcgacaacaagaggctcctggtggaagacgagaagcgcgccgaagactacaagggcgtgaagaagctgctcgataggtactacctcagctttattaacgacgtgctgcacagcatcaaactcaagaatctcaacaactacatctccctcttccgcaaaaagacctcaggcggaagtggtggaagtggcggtagtaccaacctcagcgacattatcgagaaggaaaccggcaagcaactcgtgatccaggagagcatactgatgctccccgaggaggtcgaggaggtgattggcaataagcccgagtccgatatactggttcatactgcgtatgacgaaagcacagacgagaacgtcatgctacttaccagcgacgccccggagtacaagccctgggccctagtcatccaagacagcaacggtgagaacaagatcaagatgctttctggcggctcaaaaagaaccgccgacggcagcgaattcgagcccaagaagaagaggaaagtcggaagcggagctactaacttcagcctgctgaagcaggctggagacgtggaggagaaccctggacctatggtgagcaagggcgaggagctgttcaccggggtggtgcccatcctggtcgagctggacggcgacgtaaacggccacaagttcagcgtgtccggcgagggcgagggcgatgccacctacggcaagctgaccctgaagttcatctgcaccaccggcaagctgcccgtgccctggcccaccctcgtgaccaccctgacctatggagtgcagtgcttcagccgctaccccgaccacatgaagcagcacgacttcttcaagtccgccatgcccgaaggctacgtccaggagcgcaccatcttcttcaaggacgacggcaactacaagacccgcgccgaggtgaagttcgagggcgacaccctggtgaaccgcatcgagctgaagggcatcgacttcaaggaggacggcaacatcctggggcacaagctggagtacaactacaacagccacaacgtctatatcatggccgacaagcagaagaacggcatcaaggtgaacttcaagatccgccacaacatcgaggacggcagcgtgcagctcgccgaccactaccagcagaacacccccatcggcgacggccccgtgctgctgcccgacaaccactacctgagcacccagtccgccctgagcaaagaccccaacgagaagcgcgatcacatggtcctgctggagttcgtgaccgccgccgggatcactctcggcatggacgagctgtacaagtctggtggttctcccaagaagaagaggaaagtctaaccggtcatcatcaccatcaccattgagtttaaacccgctgatcagcctcgactgtgccttctagttgccagccatctgttgtttgcccctcccccgtgccttccttgaccctggaaggtgccactcccactgtcctttcctaataaaatgaggaaattgcatcgcattgtctgagtaggtgtcattctattctggggggtggggtggggcaggacagcaagggggaggattgggaagacaatagcaggcatgctggggatgcggtgggctctatggcttctgaggcgaaaagaaccagctggggctcgataccgtcgacctctagctagagcttggcgtaatcatggtcatagctgtttcctgtgtgaaattgttatccgctcacaattccacacaacatacgagccggaagcataaagtgtaaagcctagggtgcctaatgagtgagctaactcacattaattgcgttgcgctcactgcccgctttccagtcgggaaacctgtcgtgccagctgcattaatgaatcggccaacgcgcgggaagaggcggtttgcgtattgggcgctcttccgcttcctcgctcactgactcgctgcgctcggtcgttcggctgcggcgagcggtatcagctcactcaaaggcggtaatacggttatccacagaatcaggggataacgcaggaaagaacatgtgagcaaaaggccagcaaaaggccaggaaccgtaaaaaggccgcgttgctggcgtttttccataggctccgcccccctgacgagcatcacaaaaatcgacgctcaagtcagaggtggcgaaacccgacaggactataaagataccaggcgtttccccctggaagctccctcgtgcgctctcctgttccgaccctgccgcttaccggatacctgtccgcctttctcccttcgggaagcgtggcgctttctcatagctcacgctgtaggtatctcagttcggtgtaggtcgttcgctccaagctgggctgtgtgcacgaaccccccgttcagcccgaccgctgcgccttatccggtaactatcgtcttgagtccaacccggtaagacacgacttatcgccactggcagcagccactggtaacaggattagcagagcgaggtatgtaggcggtgctacagagttcttgaagtggtggcctaactacggctacactagaagaacagtatttggtatctgcgctctgctgaagccagttaccttcggaaaaagagttggtagctcttgatccggcaaacaaaccaccgctggtagcggtggtttttttgtttgcaagcagcagattacgcgcagaaaaaaaggatctcaagaagatcctttgatcttttctacggggtctgacactcagtggaacgaaaactcacgttaagggattttggtcatgagattatcaaaaaggatcttcacctagatccttttaaattaaaaatgaagttttaaatcaatctaaagtatatatgagtaaacttggtctgacagttaccaatgcttaatcagtgaggcacctatctcagcgatctgtctatttcgttcatccatagttgcctgactccccgtcgtgtagataactacgatacgggagggcttaccatctggccccagtgctgcaatgataccgcgagacccacgctcaccggctccagatttatcagcaataaaccagccagccggaagggccgagcgcagaagtggtcctgcaactttatccgcctccatccagtctattaattgttgccgggaagctagagtaagtagttcgccagttaatagtttgcgcaacgttgttgccattgctacaggcatcgtggtgtcacgctcgtcgtttggtatggcttcattcagctccggttcccaacgatcaaggcgagttacatgatcccccatgttgtgcaaaaaagcggttagctccttcggtcctccgatcgttgtcagaagtaagttggccgcagtgttatcactcatggttatggcagcactgcataattctcttactgtcatgccatccgtaagatgcttttctgtgactggtgagtactcaaccaagtcattctgagaatagtgtatgcggcgaccgagttgctcttgcccggcgtcaatacgggataataccgcgccacatagcagaactttaaaagtgctcatcattggaaaacgttcttcggggcgaaaactctcaaggatcttaccgctgttgagatccagttcgatgtaacccactcgtgcacccaactgatcttcagcatcttttactttcaccagcgtttctgggtgagcaaaaacaggaaggcaaaatgccgcaaaaaagggaataagggcgacacggaaatgttgaatactcatactcttcctttttcaatattattgaagcatttatcagggttattgtctcatgagcggatacatatttgaatgtatttagaaaaataaacaaataggggttccgcgcacatttccccgaaaagtgccacctgacgtcgacggatcgggagatcgatctcccgatcccctagggtcgactctcagtacaatctgctctgatgccgcatagttaagccagtatctgctccctgcttgtgtgttggaggtcgctgagtagtgcgcgagcaaaatttaagctacaacaaggcaaggcttgaccgacaattgcatgaagaatctgcttagggttaggcgttttgcgctgcttcgcgatgtacgggcc

SEQ ID NO: 475 - DNA, 9169 bp, synthetic construct
  source 1..9169: mol_type = other DNA
agatatacgcgttgacattgattattgactagttattaatagtaatcaattacggggtcattagttcatagcccatatatggagttccgcgttacataacttacggtaaatggcccgcctggctgaccgcccaacgacccccgcccattgacgtcaataatgacgtatgttcccatagtaacgccaatagggactttccattgacgtcaatgggtggagtatttacggtaaactgcccacttggcagtacatcaagtgtatcatatgccaagtacgccccctattgacgtcaatgacggtaaatggcccgcctggcattatgcccagtacatgaccttatgggactttcctacttggcagtacatctacgtattagtcatcgctattaccatggtgatgcggttttggcagtacatcaatgggcgtggatagcggtttgactcacggggatttccaagtctccaccccattgacgtcaatgggagtttgttttggcaccaaaatcaacgggactttccaaaatgtcgtaacaactccgccccattgacgcaaatgggcggtaggcgtgtacggtgggaggtctatataagcagagctggtttagtgaaccgtcagatccgctagagatccgcggccgctaatacgactcactatagggagagccgccaccatgaaacggacagccgacggaagcgagttcgagtcaccaaagaagaagcggaaagtcgaggcctcccccgcatcaggacctagacacctgatggatccccatattttcacatctaacttcaacaacggaatcggcagacacaagacctacctgtgctatgaggtggaaaggctggataacggaacctctgtgaagatggaccagcacaggtaagtatcaaggttacaagacaggtttaaggagaccaatagaaactgggcttgtcgagacagagaagactcttgcgtttctgataggcacctattggtcttactgacatccactttgcctttctctccacaggggcttcctgcataaccaggccaagaatctgctgtgcggtttctacgggagacatgcagaactgaggtttctggatctggtgccatccctgcagctggaccccgctcagatctacagagtgacttggttcatctcttggagcccttgcttttcatggggatgtgctggcgaggtgagggccttccttcaggaaaacacacacgtgagactgaggatttttgctgccagaatctacgattatgacccactgtacaaggaagctctgcagatgctgagggatgcaggcgctcaggtgagcattatgacctatgacgaattcaagcactgctgggatacttttgtggaccatcagggttgtccttttcagccatgggatgggctggacgagcattctcaggcactgagcggtagactgagggctatcctgcagaaccaggggaattctggtggttcttctggtggttctagcggcagcgagactcccgggacctcagagtccgccacacccgaaagttctggtggttcttctggtggttctggctataccagcgacgaggaggtgctggaagtcttccgcaacacactgaataagaatagcgagattttctcctccatcaagaagctcgagaagctctttaagaactttgacgagtacagctccgccgggattttcgtgaagaacgggccggcgatcagcaccatctccaaggacatctttggcgagtggaacgtcatcagggacaagtggaacgccgagtacgacgacatccacctgaagaagaaggcggtggtgaccgagaagtatgaggacgatcgcaggaagtccttcaaaaaaatcggctccttcagcctcgaacagctccaggagtatgccgatgcggatctgtccgtcgtcgagaagctgaaggaaatcatcattcagaaggtcgacgagatctataaagtgtacgggtccagcgagaagctgttcgacgccgactttgtgctcgagaagtccctcaaaaagaatgacgccgtggtggccattatgaaagacctgctcgactccgtgaagtccttcgaaaattacattaaagcgttctttggggaggggaaggaaactaacagggatgagtccttctatggcgactttgtcctcgcgtacgacatcctgctgaaggtcgaccacatttacgacgcgatccgcaactacgtgacacagaagccgtactccaaagacaagttcaagctgtacttccagaacccgcaatttatggggggctgggacaaggataaagagacagactaccgcgcgacaattctccgctatggctccaaatactatctggccatcatggacaagaagtacgcgaagtgcctgcagaagatcgacaaagacgacgtcaatggcaactatgaaaagatcaactacaagctgctgccgggcccgaacaagatgctcccgaaggtgttcttcagcaagaagtggatggcctactacaatccaagcgaggatattcagaaaatctataaaaacgggaccttcaagaagggggacatgtttaacctcaacgactgccacaagctcattgatttcttcaaggatagcatttcccgctacccgaaatggtccaatgcgtacgattttaacttctccgagacagaaaagtacaaagacatcgcgggcttttacagggaggtggaggagcaagggtataaagtttcttttgaatccgcgagcaagaaggaagtcgacaagctcgtcgaggagggcaagctctacatgttccaaatttataacaaggacttttccgacaagagccatgggaccccaaacctccacaccatgtacttcaaactgctctttgacgagaacaaccacgggcaaatcaggctgagcggcggcgccgaattattcatgcgcagggcctccctcaagaaggaagagctggtcgtccatccagccaattccccgatcgcgaacaagaacccggacaatccgaaaaagaccaccaccctgtcctacgacgtctacaaggacaaacgcttcagcgaagaccagtacgaattacacatcccaattgcgattaataagtgcccaaagaatatcttcaaaattaatacagaggtcagggtgctgctcaaacacgacgacaatccgtatgtcatcggcattgccaggggcgagcgcaatctgctctatatcgtggtcgtggatgggaagggcaatattgtggagcagtactccctgaacgagattatcaacaacttcaatgggattaggattaagaccgactatcacagcctgctcgacaagaaagaaaaagagaggtttgaggcccgccaaaactggacctccattgagaatatcaaagaattaaaggccggctatatttcccaagtcgtccacaagatctgcgagctggtggagaaatatgacgccgtgattgcgctcgaagacttaaattctgggttcaagaactcccgcgtgaaggtggaaaaacaggtgtatcagaaattcgagaaaatgctgatcgacaaactcaattatatggtggataagaagtccaacccgtgtgccacagggggcgcgctgaagggctatcagatcaccaacaagttcgagagcttcaagagcatgagcacccagaacgggtttattttctacatcccggcgtggctcacctccaagattgacccgagcaccggcttcgtgaacctcctgaagacaaagtatacctccattgccgacagcaagaagtttatctcctccttcgaccgcattatgtatgtgccggaggaggacctcttcgagttcgccctcgactacaaaaacttcagccgcacagatgcggattacatcaagaagtggaagctgtactcctacgggaacaggatccgcatcttcaggaatccaaaaaaaaataacgtctttgactgggaggaagtgtgcctgacatccgcctacaaggaactgttcaataaatacggcatcaattaccagcagggcgacattcgcgccctcctctgtgagcagtccgacaaagcgttttactccagcttcatggccctcatgtccctgatgctccaaatgaggaatagcatcacagggcgcaccgacgtcgacttcctcatcagcccggtgaagaactccgacgggatcttttacgactcccgcaactatgaggcgcaagagaatgcgatcctcccgaagaacgccgatgcgaacggggcctataatatcgccaggaaagtgctctgggccatcgggcagttcaaaaaggcggaggatgagaagctcgacaaggtgaaaattgccatttccaacaaggagtggctggagtacgcgcagacctccgtgaagcacggctcctctggcagctccggctctagcggctcctctggcagctccggctccaagctggagaagtttacaaactgttacagcctctccaaaaccctcaggtttaaagcgatcccggtgggcaagacccaggagaacatcgacaacaagaggctcctggtggaagacgagaagcgcgccgaagactacaagggcgtgaagaagctgctcgataggtactacctcagctttattaacgacgtgctgcacagcatcaaactcaagaatctcaacaactacatctccctcttccgcaaaaagacccgcaccgagaaggagaacaaggagctggagaacctggagatcaacctccgcaaggaaatcgccaaagcgttcaagggcaatgaagggtacaagagcctcttcaagaaagacatcatcgaaactatcctcccagagtttctcgatgacaaggacgagatcgcgctggtgaactcctttaacgggttcacaaccgcgtttaccggcttctttgataacagggaaaatatgttctccgaggaggccaagtccaccagcatcgccttcaggtgtatcaacgagaacctcacccgctacatttccaatatggacattttcgagaaggtggatgcgatcttcgataagcacgaggtgcaggagatcaaagagaagattctcaattccgattatgacgtcgaggatttcttcgaaggggagttctttaattttgtgctcacacaagagggcattgacgtgtacaacgcgattatcgggggcttcgtcacagagtccggggagaagattaaggggctgaatgagtacatcaatctgtacaatcagaagaccaagcagaaactgccgaaattcaagccgctctacaagcaagtcctgtccgatagggaaagcctctccttctacggcgagtcaggcggaagtggtggaagtggcggtagtaccaacctcagcgacattatcgagaaggaaaccggcaagcaactcgtgatccaggagagcatactgatgctccccgaggaggtcgaggaggtgattggcaataagcccgagtccgatatactggttcatactgcgtatgacgaaagcacagacgagaacgtcatgctacttaccagcgacgccccggagtacaagccctgggccctagtcatccaagacagcaacggtgagaacaagatcaagatgctttctggcggctcaaaaagaaccgccgacggcagcgaattcgagcccaagaagaagaggaaagtcggaagcggagctactaacttcagcctgctgaagcaggctggagacgtggaggagaaccctggacctatggtgagcaagggcgaggagctgttcaccggggtggtgcccatcctggtcgagctggacggcgacgtaaacggccacaagttcagcgtgtccggcgagggcgagggcgatgccacctacggcaagctgaccctgaagttcatctgcaccaccggcaagctgcccgtgccctggcccaccctcgtgaccaccctgacctatggagtgcagtgcttcagccgctaccccgaccacatgaagcagcacgacttcttcaagtccgccatgcccgaaggctacgtccaggagcgcaccatcttcttcaaggacgacggcaactacaagacccgcgccgaggtgaagttcgagggcgacaccctggtgaaccgcatcgagctgaagggcatcgacttcaaggaggacggcaacatcctggggcacaagctggagtacaactacaacagccacaacgtctatatcatggccgacaagcagaagaacggcatcaaggtgaacttcaagatccgccacaacatcgaggacggcagcgtgcagctcgccgaccactaccagcagaacacccccatcggcgacggccccgtgctgctgcccgacaaccactacctgagcacccagtccgccctgagcaaagaccccaacgagaagcgcgatcacatggtcctgctggagttcgtgaccgccgccgggatcactctcggcatggacgagctgtacaagtctggtggttctcccaagaagaagaggaaagtctaaccggtcatcatcaccatcaccattgagtttaaacccgctgatcagcctcgactgtgccttctagttgccagccatctgttgtttgcccctcccccgtgccttccttgaccctggaaggtgccactcccactgtcctttcctaataaaatgaggaaattgcatcgcattgtctgagtaggtgtcattctattctggggggtggggtggggcaggacagcaagggggaggattgggaagacaatagcaggcatgctggggatgcggtgggctctatggcttctgaggcgaaaagaaccagctggggctcgataccgtcgacctctagctagagcttggcgtaatcatggtcatagctgtttcctgtgtgaaattgttatccgctcacaattccacacaacatacgagccggaagcataaagtgtaaagcctagggtgcctaatgagtgagctaactcacattaattgcgttgcgctcactgcccgctttccagtcgggaaacctgtcgtgccagctgcattaatgaatcggccaacgcgcgggaagaggcggtttgcgtattgggcgctcttccgcttcctcgctcactgactcgctgcgctcggtcgttcggctgcggcgagcggtatcagctcactcaaaggcggtaatacggttatccacagaatcaggggataacgcaggaaagaacatgtgagcaaaaggccagcaaaaggccaggaaccgtaaaaaggccgcgttgctggcgtttttccataggctccgcccccctgacgagcatcacaaaaatcgacgctcaagtcagaggtggcgaaacccgacaggactataaagataccaggcgtttccccctggaagctccctcgtgcgctctcctgttccgaccctgccgcttaccggatacctgtccgcctttctcccttcgggaagcgtggcgctttctcatagctcacgctgtaggtatctcagttcggtgtaggtcgttcgctccaagctgggctgtgtgcacgaaccccccgttcagcccgaccgctgcgccttatccggtaactatcgtcttgagtccaacccggtaagacacgacttatcgccactggcagcagccactggtaacaggattagcagagcgaggtatgtaggcggtgctacagagttcttgaagtggtggcctaactacggctacactagaagaacagtatttggtatctgcgctctgctgaagccagttaccttcggaaaaagagttggtagctcttgatccggcaaacaaaccaccgctggtagcggtggtttttttgtttgcaagcagcagattacgcgcagaaaaaaaggatctcaagaagatcctttgatcttttctacggggtctgacactcagtggaacgaaaactcacgttaagggattttggtcatgagattatcaaaaaggatcttcacctagatccttttaaattaaaaatgaagttttaaatcaatctaaagtatatatgagtaaacttggtctgacagttaccaatgcttaatcagtgaggcacctatctcagcgatctgtctatttcgttcatccatagttgcctgactccccgtcgtgtagataactacgatacgggagggcttaccatctggccccagtgctgcaatgataccgcgagacccacgctcaccggctccagatttatcagcaataaaccagccagccggaagggccgagcgcagaagtggtcctgcaactttatccgcctccatccagtctattaattgttgccgggaagctagagtaagtagttcgccagttaatagtttgcgcaacgttgttgccattgctacaggcatcgtggtgtcacgctcgtcgtttggtatggcttcattcagctccggttcccaacgatcaaggcgagttacatgatcccccatgttgtgcaaaaaagcggttagctccttcggtcctccgatcgttgtcagaagtaagttggccgcagtgttatcactcatggttatggcagcactgcataattctcttactgtcatgccatccgtaagatgcttttctgtgactggtgagtactcaaccaagtcattctgagaatagtgtatgcggcgaccgagttgctcttgcccggcgtcaatacgggataataccgcgccacatagcagaactttaaaagtgctcatcattggaaaacgttcttcggggcgaaaactctcaaggatcttaccgctgttgagatccagttcgatgtaacccactcgtgcacccaactgatcttcagcatcttttactttcaccagcgtttctgggtgagcaaaaacaggaaggcaaaatgccgcaaaaaagggaataagggcgacacggaaatgttgaatactcatactcttcctttttcaatattattgaagcatttatcagggttattgtctcatgagcggatacatatttgaatgtatttagaaaaataaacaaataggggttccgcgcacatttccccgaaaagtgccacctgacgtcgacggatcgggagatcgatctcccgatcccctagggtcgactctcagtacaatctgctctgatgccgcatagttaagccagtatctgctccctgcttgtgtgttggaggtcgctgagtagtgcgcgagcaaaatttaagctacaacaaggcaaggcttgaccgacaattgcatgaagaatctgcttagggttaggcgttttgcgctgcttcgcgatgtacgggcc

SEQ ID NO: 476 - DNA, 9169 bp, synthetic construct
  source 1..9169: mol_type = other DNA
agatatacgcgttgacattgattattgactagttattaatagtaatcaattacggggtcattagttcatagcccatatatggagttccgcgttacataacttacggtaaatggcccgcctggctgaccgcccaacgacccccgcccattgacgtcaataatgacgtatgttcccatagtaacgccaatagggactttccattgacgtcaatgggtggagtatttacggtaaactgcccacttggcagtacatcaagtgtatcatatgccaagtacgccccctattgacgtcaatgacggtaaatggcccgcctggcattatgcccagtacatgaccttatgggactttcctacttggcagtacatctacgtattagtcatcgctattaccatggtgatgcggttttggcagtacatcaatgggcgtggatagcggtttgactcacggggatttccaagtctccaccccattgacgtcaatgggagtttgttttggcaccaaaatcaacgggactttccaaaatgtcgtaacaactccgccccattgacgcaaatgggcggtaggcgtgtacggtgggaggtctatataagcagagctggtttagtgaaccgtcagatccgctagagatccgcggccgctaatacgactcactatagggagagccgccaccatgaaacggacagccgacggaagcgagttcgagtcaccaaagaagaagcggaaagtcgaggcctcccccgcatcaggacctagacacctgatggatccccatattttcacatctaacttcaacaacggaatcggcagacacaagacctacctgtgctatgaggtggaaaggctggataacggaacctctgtgaagatggaccagcacaggtaagtatcaaggttacaagacaggtttaaggagaccaatagaaactgggcttgtcgagacagagaagactcttgcgtttctgataggcacctattggtcttactgacatccactttgcctttctctccacaggggcttcctgcataaccaggccaagaatctgctgtgcggtttctacgggagacatgcagaactgaggtttctggatctggtgccatccctgcagctggaccccgctcagatctacagagtgacttggttcatctcttggagcccttgcttttcatggggatgtgctggcgaggtgagggccttccttcaggaaaacacacacgtgagactgaggatttttgctgccagaatctacgattatgacccactgtacaaggaagctctgcagatgctgagggatgcaggcgctcaggtgagcattatgacctatgacgaattcaagcactgctgggatacttttgtggaccatcagggttgtccttttcagccatgggatgggctggacgagcattctcaggcactgagcggtagactgagggctatcctgcagaaccaggggaattctggtggttcttctggtggttctagcggcagcgagactcccgggacctcagagtccgccacacccgaaagttctggtggttcttctggtggttcttccgacgggatcttttacgactcccgcaactatgaggcgcaagagaatgcgatcctcccgaagaacgccgatgcgaacggggcctataatatcgccaggaaagtgctctgggccatcgggcagttcaaaaaggcggaggatgagaagctcgacaaggtgaaaattgccatttccaacaaggagtggctggagtacgcgcagacctccgtgaagcacggctcctctggcagctccggctctagcggctcctctggcagctccggctccaagctggagaagtttacaaactgttacagcctctccaaaaccctcaggtttaaagcgatcccggtgggcaagacccaggagaacatcgacaacaagaggctcctggtggaagacgagaagcgcgccgaagactacaagggcgtgaagaagctgctcgataggtactacctcagctttattaacgacgtgctgcacagcatcaaactcaagaatctcaacaactacatctccctcttccgcaaaaagacccgcaccgagaaggagaacaaggagctggagaacctggagatcaacctccgcaaggaaatcgccaaagcgttcaagggcaatgaagggtacaagagcctcttcaagaaagacatcatcgaaactatcctcccagagtttctcgatgacaaggacgagatcgcgctggtgaactcctttaacgggttcacaaccgcgtttaccggcttctttgataacagggaaaatatgttctccgaggaggccaagtccaccagcatcgccttcaggtgtatcaacgagaacctcacccgctacatttccaatatggacattttcgagaaggtggatgcgatcttcgataagcacgaggtgcaggagatcaaagagaagattctcaattccgattatgacgtcgaggatttcttcgaaggggagttctttaattttgtgctcacacaagagggcattgacgtgtacaacgcgattatcgggggcttcgtcacagagtccggggagaagattaaggggctgaatgagtacatcaatctgtacaatcagaagaccaagcagaaactgccgaaattcaagccgctctacaagcaagtcctgtccgatagggaaagcctctccttctacggcgagggctataccagcgacgaggaggtgctggaagtcttccgcaacacactgaataagaatagcgagattttctcctccatcaagaagctcgagaagctctttaagaactttgacgagtacagctccgccgggattttcgtgaagaacgggccggcgatcagcaccatctccaaggacatctttggcgagtggaacgtcatcagggacaagtggaacgccgagtacgacgacatccacctgaagaagaaggcggtggtgaccgagaagtatgaggacgatcgcaggaagtccttcaaaaaaatcggctccttcagcctcgaacagctccaggagtatgccgatgcggatctgtccgtcgtcgagaagctgaaggaaatcatcattcagaaggtcgacgagatctataaagtgtacgggtccagcgagaagctgttcgacgccgactttgtgctcgagaagtccctcaaaaagaatgacgccgtggtggccattatgaaagacctgctcgactccgtgaagtccttcgaaaattacattaaagcgttctttggggaggggaaggaaactaacagggatgagtccttctatggcgactttgtcctcgcgtacgacatcctgctgaaggtcgaccacatttacgacgcgatccgcaactacgtgacacagaagccgtactccaaagacaagttcaagctgtacttccagaacccgcaatttatggggggctgggacaaggataaagagacagactaccgcgcgacaattctccgctatggctccaaatactatctggccatcatggacaagaagtacgcgaagtgcctgcagaagatcgacaaagacgacgtcaatggcaactatgaaaagatcaactacaagctgctgccgggcccgaacaagatgctcccgaaggtgttcttcagcaagaagtggatggcctactacaatccaagcgaggatattcagaaaatctataaaaacgggaccttcaagaagggggacatgtttaacctcaacgactgccacaagctcattgatttcttcaaggatagcatttcccgctacccgaaatggtccaatgcgtacgattttaacttctccgagacagaaaagtacaaagacatcgcgggcttttacagggaggtggaggagcaagggtataaagtttcttttgaatccgcgagcaagaaggaagtcgacaagctcgtcgaggagggcaagctctacatgttccaaatttataacaaggacttttccgacaagagccatgggaccccaaacctccacaccatgtacttcaaactgctctttgacgagaacaaccacgggcaaatcaggctgagcggcggcgccgaattattcatgcgcagggcctccctcaagaaggaagagctggtcgtccatccagccaattccccgatcgcgaacaagaacccggacaatccgaaaaagaccaccaccctgtcctacgacgtctacaaggacaaacgcttcagcgaagaccagtacgaattacacatcccaattgcgattaataagtgcccaaagaatatcttcaaaattaatacagaggtcagggtgctgctcaaacacgacgacaatccgtatgtcatcggcattgccaggggcgagcgcaatctgctctatatcgtggtcgtggatgggaagggcaatattgtggagcagtactccctgaacgagattatcaacaacttcaatgggattaggattaagaccgactatcacagcctgctcgacaagaaagaaaaagagaggtttgaggcccgccaaaactggacctccattgagaatatcaaagaattaaaggccggctatatttcccaagtcgtccacaagatctgcgagctggtggagaaatatgacgccgtgattgcgctcgaagacttaaattctgggttcaagaactcccgcgtgaaggtggaaaaacaggtgtatcagaaattcgagaaaatgctgatcgacaaactcaattatatggtggataagaagtccaacccgtgtgccacagggggcgcgctgaagggctatcagatcaccaacaagttcgagagcttcaagagcatgagcacccagaacgggtttattttctacatcccggcgtggctcacctccaagattgacccgagcaccggcttcgtgaacctcctgaagacaaagtatacctccattgccgacagcaagaagtttatctcctccttcgaccgcattatgtatgtgccggaggaggacctcttcgagttcgccctcgactacaaaaacttcagccgcacagatgcggattacatcaagaagtggaagctgtactcctacgggaacaggatccgcatcttcaggaatccaaaaaaaaataacgtctttgactgggaggaagtgtgcctgacatccgcctacaaggaactgttcaataaatacggcatcaattaccagcagggcgacattcgcgccctcctctgtgagcagtccgacaaagcgttttactccagcttcatggccctcatgtccctgatgctccaaatgaggaatagcatcacagggcgcaccgacgtcgacttcctcatcagcccggtgaagaactcaggcggaagtggtggaagtggcggtagtaccaacctcagcgacattatcgagaaggaaaccggcaagcaactcgtgatccaggagagcatactgatgctccccgaggaggtcgaggaggtgattggcaataagcccgagtccgatatactggttcatactgcgtatgacgaaagcacagacgagaacgtcatgctacttaccagcgacgccccggagtacaagccctgggccctagtcatccaagacagcaacggtgagaacaagatcaagatgctttctggcggctcaaaaagaaccgccgacggcagcgaattcgagcccaagaagaagaggaaagtcggaagcggagctactaacttcagcctgctgaagcaggctggagacgtggaggagaaccctggacctatggtgagcaagggcgaggagctgttcaccggggtggtgcccatcctggtcgagctggacggcgacgtaaacggccacaagttcagcgtgtccggcgagggcgagggcgatgccacctacggcaagctgaccctgaagttcatctgcaccaccggcaagctgcccgtgccctggcccaccctcgtgaccaccctgacctatggagtgcagtgcttcagccgctaccccgaccacatgaagcagcacgacttcttcaagtccgccatgcccgaaggctacgtccaggagcgcaccatcttcttcaaggacgacggcaactacaagacccgcgccgaggtgaagttcgagggcgacaccctggtgaaccgcatcgagctgaagggcatcgacttcaaggaggacggcaacatcctggggcacaagctggagtacaactacaacagccacaacgtctatatcatggccgacaagcagaagaacggcatcaaggtgaacttcaagatccgccacaacatcgaggacggcagcgtgcagctcgccgaccactaccagcagaacacccccatcggcgacggccccgtgctgctgcccgacaaccactacctgagcacccagtccgccctgagcaaagaccccaacgagaagcgcgatcacatggtcctgctggagttcgtgaccgccgccgggatcactctcggcatggacgagctgtacaagtctggtggttctcccaagaagaagaggaaagtctaaccggtcatcatcaccatcaccattgagtttaaacccgctgatcagcctcgactgtgccttctagttgccagccatctgttgtttgcccctcccccgtgccttccttgaccctggaaggtgccactcccactgtcctttcctaataaaatgaggaaattgcatcgcattgtctgagtaggtgtcattctattctggggggtggggtggggcaggacagcaagggggaggattgggaagacaatagcaggcatgctggggatgcggtgggctctatggcttctgaggcgaaaagaaccagctggggctcgataccgtcgacctctagctagagcttggcgtaatcatggtcatagctgtttcctgtgtgaaattgttatccgctcacaattccacacaacatacgagccggaagcataaagtgtaaagcctagggtgcctaatgagtgagctaactcacattaattgcgttgcgctcactgcccgctttccagtcgggaaacctgtcgtgccagctgcattaatgaatcggccaacgcgcgggaagaggcggtttgcgtattgggcgctcttccgcttcctcgctcactgactcgctgcgctcggtcgttcggctgcggcgagcggtatcagctcactcaaaggcggtaatacggttatccacagaatcaggggataacgcaggaaagaacatgtgagcaaaaggccagcaaaaggccaggaaccgtaaaaaggccgcgttgctggcgtttttccataggctccgcccccctgacgagcatcacaaaaatcgacgctcaagtcagaggtggcgaaacccgacaggactataaagataccaggcgtttccccctggaagctccctcgtgcgctctcctgttccgaccctgccgcttaccggatacctgtccgcctttctcccttcgggaagcgtggcgctttctcatagctcacgctgtaggtatctcagttcggtgtaggtcgttcgctccaagctgggctgtgtgcacgaaccccccgttcagcccgaccgctgcgccttatccggtaactatcgtcttgagtccaacccggtaagacacgacttatcgccactggcagcagccactggtaacaggattagcagagcgaggtatgtaggcggtgctacagagttcttgaagtggtggcctaactacggctacactagaagaacagtatttggtatctgcgctctgctgaagccagttaccttcggaaaaagagttggtagctcttgatccggcaaacaaaccaccgctggtagcggtggtttttttgtttgcaagcagcagattacgcgcagaaaaaaaggatctcaagaagatcctttgatcttttctacggggtctgacactcagtggaacgaaaactcacgttaagggattttggtcatgagattatcaaaaaggatcttcacctagatccttttaaattaaaaatgaagttttaaatcaatctaaagtatatatgagtaaacttggtctgacagttaccaatgcttaatcagtgaggcacctatctcagcgatctgtctatttcgttcatccatagttgcctgactccccgtcgtgtagataactacgatacgggagggcttaccatctggccccagtgctgcaatgataccgcgagacccacgctcaccggctccagatttatcagcaataaaccagccagccggaagggccgagcgcagaagtggtcctgcaactttatccgcctccatccagtctattaattgttgccgggaagctagagtaagtagttcgccagttaatagtttgcgcaacgttgttgccattgctacaggcatcgtggtgtcacgctcgtcgtttggtatggcttcattcagctccggttcccaacgatcaaggcgagttacatgatcccccatgttgtgcaaaaaagcggttagctccttcggtcctccgatcgttgtcagaagtaagttggccgcagtgttatcactcatggttatggcagcactgcataattctcttactgtcatgccatccgtaagatgcttttctgtgactggtgagtactcaaccaagtcattctgagaatagtgtatgcggcgaccgagttgctcttgcccggcgtcaatacgggataataccgcgccacatagcagaactttaaaagtgctcatcattggaaaacgttcttcggggcgaaaactctcaaggatcttaccgctgttgagatccagttcgatgtaacccactcgtgcacccaactgatcttcagcatcttttactttcaccagcgtttctgggtgagcaaaaacaggaaggcaaaatgccgcaaaaaagggaataagggcgacacggaaatgttgaatactcatactcttcctttttcaatattattgaagcatttatcagggttattgtctcatgagcggatacatatttgaatgtatttagaaaaataaacaaataggggttccgcgcacatttccccgaaaagtgccacctgacgtcgacggatcgggagatcgatctcccgatcccctagggtcgactctcagtacaatctgctctgatgccgcatagttaagccagtatctgctccctgcttgtgtgttggaggtcgctgagtagtgcgcgagcaaaatttaagctacaacaaggcaaggcttgaccgacaattgcatgaagaatctgcttagggttaggcgttttgcgctgcttcgcgatgtacgggcc

SEQ ID NO: 477 - DNA, 9169 bp, synthetic construct
  source 1..9169: mol_type = other DNA
agatatacgcgttgacattgattattgactagttattaatagtaatcaattacggggtcattagttcatagcccatatatggagttccgcgttacataacttacggtaaatggcccgcctggctgaccgcccaacgacccccgcccattgacgtcaataatgacgtatgttcccatagtaacgccaatagggactttccattgacgtcaatgggtggagtatttacggtaaactgcccacttggcagtacatcaagtgtatcatatgccaagtacgccccctattgacgtcaatgacggtaaatggcccgcctggcattatgcccagtacatgaccttatgggactttcctacttggcagtacatctacgtattagtcatcgctattaccatggtgatgcggttttggcagtacatcaatgggcgtggatagcggtttgactcacggggatttccaagtctccaccccattgacgtcaatgggagtttgttttggcaccaaaatcaacgggactttccaaaatgtcgtaacaactccgccccattgacgcaaatgggcggtaggcgtgtacggtgggaggtctatataagcagagctggtttagtgaaccgtcagatccgctagagatccgcggccgctaatacgactcactatagggagagccgccaccatgaaacggacagccgacggaagcgagttcgagtcaccaaagaagaagcggaaagtcgaggcctcccccgcatcaggacctagacacctgatggatccccatattttcacatctaacttcaacaacggaatcggcagacacaagacctacctgtgctatgaggtggaaaggctggataacggaacctctgtgaagatggaccagcacaggtaagtatcaaggttacaagacaggtttaaggagaccaatagaaactgggcttgtcgagacagagaagactcttgcgtttctgataggcacctattggtcttactgacatccactttgcctttctctccacaggggcttcctgcataaccaggccaagaatctgctgtgcggtttctacgggagacatgcagaactgaggtttctggatctggtgccatccctgcagctggaccccgctcagatctacagagtgacttggttcatctcttggagcccttgcttttcatggggatgtgctggcgaggtgagggccttccttcaggaaaacacacacgtgagactgaggatttttgctgccagaatctacgattatgacccactgtacaaggaagctctgcagatgctgagggatgcaggcgctcaggtgagcattatgacctatgacgaattcaagcactgctgggatacttttgtggaccatcagggttgtccttttcagccatgggatgggctggacgagcattctcaggcactgagcggtagactgagggctatcctgcagaaccaggggaattctggtggttcttctggtggttctagcggcagcgagactcccgggacctcagagtccgccacacccgaaagttctggtggttcttctggtggttctaaagacaagttcaagctgtacttccagaacccgcaatttatggggggctgggacaaggataaagagacagactaccgcgcgacaattctccgctatggctccaaatactatctggccatcatggacaagaagtacgcgaagtgcctgcagaagatcgacaaagacgacgtcaatggcaactatgaaaagatcaactacaagctgctgccgggcccgaacaagatgctcccgaaggtgttcttcagcaagaagtggatggcctactacaatccaagcgaggatattcagaaaatctataaaaacgggaccttcaagaagggggacatgtttaacctcaacgactgccacaagctcattgatttcttcaaggatagcatttcccgctacccgaaatggtccaatgcgtacgattttaacttctccgagacagaaaagtacaaagacatcgcgggcttttacagggaggtggaggagcaagggtataaagtttcttttgaatccgcgagcaagaaggaagtcgacaagctcgtcgaggagggcaagctctacatgttccaaatttataacaaggacttttccgacaagagccatgggaccccaaacctccacaccatgtacttcaaactgctctttgacgagaacaaccacgggcaaatcaggctgagcggcggcgccgaattattcatgcgcagggcctccctcaagaaggaagagctggtcgtccatccagccaattccccgatcgcgaacaagaacccggacaatccgaaaaagaccaccaccctgtcctacgacgtctacaaggacaaacgcttcagcgaagaccagtacgaattacacatcccaattgcgattaataagtgcccaaagaatatcttcaaaattaatacagaggtcagggtgctgctcaaacacgacgacaatccgtatgtcatcggcattgccaggggcgagcgcaatctgctctatatcgtggtcgtggatgggaagggcaatattgtggagcagtactccctgaacgagattatcaacaacttcaatgggattaggattaagaccgactatcacagcctgctcgacaagaaagaaaaagagaggtttgaggcccgccaaaactggacctccattgagaatatcaaagaattaaaggccggctatatttcccaagtcgtccacaagatctgcgagctggtggagaaatatgacgccgtgattgcgctcgaagacttaaattctgggttcaagaactcccgcgtgaaggtggaaaaacaggtgtatcagaaattcgagaaaatgctgatcgacaaactcaattatatggtggataagaagtccaacccgtgtgccacagggggcgcgctgaagggctatcagatcaccaacaagttcgagagcttcaagagcatgagcacccagaacgggtttattttctacatcccggcgtggctcacctccaagattgacccgagcaccggcttcgtgaacctcctgaagacaaagtatacctccattgccgacagcaagaagtttatctcctccttcgaccgcattatgtatgtgccggaggaggacctcttcgagttcgccctcgactacaaaaacttcagccgcacagatgcggattacatcaagaagtggaagctgtactcctacgggaacaggatccgcatcttcaggaatccaaaaaaaaataacgtctttgactgggaggaagtgtgcctgacatccgcctacaaggaactgttcaataaatacggcatcaattaccagcagggcgacattcgcgccctcctctgtgagcagtccgacaaagcgttttactccagcttcatggccctcatgtccctgatgctccaaatgaggaatagcatcacagggcgcaccgacgtcgacttcctcatcagcccggtgaagaactccgacgggatcttttacgactcccgcaactatgaggcgcaagagaatgcgatcctcccgaagaacgccgatgcgaacggggcctataatatcgccaggaaagtgctctgggccatcgggcagttcaaaaaggcggaggatgagaagctcgacaaggtgaaaattgccatttccaacaaggagtggctggagtacgcgcagacctccgtgaagcacggctcctctggcagctccggctctagcggctcctctggcagctccggctccaagctggagaagtttacaaactgttacagcctctccaaaaccctcaggtttaaagcgatcccggtgggcaagacccaggagaacatcgacaacaagaggctcctggtggaagacgagaagcgcgccgaagactacaagggcgtgaagaagctgctcgataggtactacctcagctttattaacgacgtgctgcacagcatcaaactcaagaatctcaacaactacatctccctcttccgcaaaaagacccgcaccgagaaggagaacaaggagctggagaacctggagatcaacctccgcaaggaaatcgccaaagcgttcaagggcaatgaagggtacaagagcctcttcaagaaagacatcatcgaaactatcctcccagagtttctcgatgacaaggacgagatcgcgctggtgaactcctttaacgggttcacaaccgcgtttaccggcttctttgataacagggaaaatatgttctccgaggaggccaagtccaccagcatcgccttcaggtgtatcaacgagaacctcacccgctacatttccaatatggacattttcgagaaggtggatgcgatcttcgataagcacgaggtgcaggagatcaaagagaagattctcaattccgattatgacgtcgaggatttcttcgaaggggagttctttaattttgtgctcacacaagagggcattgacgtgtacaacgcgattatcgggggcttcgtcacagagtccggggagaagattaaggggctgaatgagtacatcaatctgtacaatcagaagaccaagcagaaactgccgaaattcaagccgctctacaagcaagtcctgtccgatagggaaagcctctccttctacggcgagggctataccagcgacgaggaggtgctggaagtcttccgcaacacactgaataagaatagcgagattttctcctccatcaagaagctcgagaagctctttaagaactttgacgagtacagctccgccgggattttcgtgaagaacgggccggcgatcagcaccatctccaaggacatctttggcgagtggaacgtcatcagggacaagtggaacgccgagtacgacgacatccacctgaagaagaaggcggtggtgaccgagaagtatgaggacgatcgcaggaagtccttcaaaaaaatcggctccttcagcctcgaacagctccaggagtatgccgatgcggatctgtccgtcgtcgagaagctgaaggaaatcatcattcagaaggtcgacgagatctataaagtgtacgggtccagcgagaagctgttcgacgccgactttgtgctcgagaagtccctcaaaaagaatgacgccgtggtggccattatgaaagacctgctcgactccgtgaagtccttcgaaaattacattaaagcgttctttggggaggggaaggaaactaacagggatgagtccttctatggcgactttgtcctcgcgtacgacatcctgctgaaggtcgaccacatttacgacgcgatccgcaactacgtgacacagaagccgtactcctcaggcggaagtggtggaagtggcggtagtaccaacctcagcgacattatcgagaaggaaaccggcaagcaactcgtgatccaggagagcatactgatgctccccgaggaggtcgaggaggtgattggcaataagcccgagtccgatatactggttcatactgcgtatgacgaaagcacagacgagaacgtcatgctacttaccagcgacgccccggagtacaagccctgggccctagtcatccaagacagcaacggtgagaacaagatcaagatgctttctggcggctcaaaaagaaccgccgacggcagcgaattcgagcccaagaagaagaggaaagtcggaagcggagctactaacttcagcctgctgaagcaggctggagacgtggaggagaaccctggacctatggtgagcaagggcgaggagctgttcaccggggtggtgcccatcctggtcgagctggacggcgacgtaaacggccacaagttcagcgtgtccggcgagggcgagggcgatgccacctacggcaagctgaccctgaagttcatctgcaccaccggcaagctgcccgtgccctggcccaccctcgtgaccaccctgacctatggagtgcagtgcttcagccgctaccccgaccacatgaagcagcacgacttcttcaagtccgccatgcccgaaggctacgtccaggagcgcaccatcttcttcaaggacgacggcaactacaagacccgcgccgaggtgaagttcgagggcgacaccctggtgaaccgcatcgagctgaagggcatcgacttcaaggaggacggcaacatcctggggcacaagctggagtacaactacaacagccacaacgtctatatcatggccgacaagcagaagaacggcatcaaggtgaacttcaagatccgccacaacatcgaggacggcagcgtgcagctcgccgaccactaccagcagaacacccccatcggcgacggccccgtgctgctgcccgacaaccactacctgagcacccagtccgccctgagcaaagaccccaacgagaagcgcgatcacatggtcctgctggagttcgtgaccgccgccgggatcactctcggcatggacgagctgtacaagtctggtggttctcccaagaagaagaggaaagtctaaccggtcatcatcaccatcaccattgagtttaaacccgctgatcagcctcgactgtgccttctagttgccagccatctgttgtttgcccctcccccgtgccttccttgaccctggaaggtgccactcccactgtcctttcctaataaaatgaggaaattgcatcgcattgtctgagtaggtgtcattctattctggggggtggggtggggcaggacagcaagggggaggattgggaagacaatagcaggcatgctggggatgcggtgggctctatggcttctgaggcgaaaagaaccagctggggctcgataccgtcgacctctagctagagcttggcgtaatcatggtcatagctgtttcctgtgtgaaattgttatccgctcacaattccacacaacatacgagccggaagcataaagtgtaaagcctagggtgcctaatgagtgagctaactcacattaattgcgttgcgctcactgcccgctttccagtcgggaaacctgtcgtgccagctgcattaatgaatcggccaacgcgcgggaagaggcggtttgcgtattgggcgctcttccgcttcctcgctcactgactcgctgcgctcggtcgttcggctgcggcgagcggtatcagctcactcaaaggcggtaatacggttatccacagaatcaggggataacgcaggaaagaacatgtgagcaaaaggccagcaaaaggccaggaaccgtaaaaaggccgcgttgctggcgtttttccataggctccgcccccctgacgagcatcacaaaaatcgacgctcaagtcagaggtggcgaaacccgacaggactataaagataccaggcgtttccccctggaagctccctcgtgcgctctcctgttccgaccctgccgcttaccggatacctgtccgcctttctcccttcgggaagcgtggcgctttctcatagctcacgctgtaggtatctcagttcggtgtaggtcgttcgctccaagctgggctgtgtgcacgaaccccccgttcagcccgaccgctgcgccttatccggtaactatcgtcttgagtccaacccggtaagacacgacttatcgccactggcagcagccactggtaacaggattagcagagcgaggtatgtaggcggtgctacagagttcttgaagtggtggcctaactacggctacactagaagaacagtatttggtatctgcgctctgctgaagccagttaccttcggaaaaagagttggtagctcttgatccggcaaacaaaccaccgctggtagcggtggtttttttgtttgcaagcagcagattacgcgcagaaaaaaaggatctcaagaagatcctttgatcttttctacggggtctgacactcagtggaacgaaaactcacgttaagggattttggtcatgagattatcaaaaaggatcttcacctagatccttttaaattaaaaatgaagttttaaatcaatctaaagtatatatgagtaaacttggtctgacagttaccaatgcttaatcagtgaggcacctatctcagcgatctgtctatttcgttcatccatagttgcctgactccccgtcgtgtagataactacgatacgggagggcttaccatctggccccagtgctgcaatgataccgcgagacccacgctcaccggctccagatttatcagcaataaaccagccagccggaagggccgagcgcagaagtggtcctgcaactttatccgcctccatccagtctattaattgttgccgggaagctagagtaagtagttcgccagttaatagtttgcgcaacgttgttgccattgctacaggcatcgtggtgtcacgctcgtcgtttggtatggcttcattcagctccggttcccaacgatcaaggcgagttacatgatcccccatgttgtgcaaaaaagcggttagctccttcggtcctccgatcgttgtcagaagtaagttggccgcagtgttatcactcatggttatggcagcactgcataattctcttactgtcatgccatccgtaagatgcttttctgtgactggtgagtactcaaccaagtcattctgagaatagtgtatgcggcgaccgagttgctcttgcccggcgtcaatacgggataataccgcgccacatagcagaactttaaaagtgctcatcattggaaaacgttcttcggggcgaaaactctcaaggatcttaccgctgttgagatccagttcgatgtaacccactcgtgcacccaactgatcttcagcatcttttactttcaccagcgtttctgggtgagcaaaaacaggaaggcaaaatgccgcaaaaaagggaataagggcgacacggaaatgttgaatactcatactcttcctttttcaatattattgaagcatttatcagggttattgtctcatgagcggatacatatttgaatgtatttagaaaaataaacaaataggggttccgcgcacatttccccgaaaagtgccacctgacgtcgacggatcgggagatcgatctcccgatcccctagggtcgactctcagtacaatctgctctgatgccgcatagttaagccagtatctgctccctgcttgtgtgttggaggtcgctgagtagtgcgcgagcaaaatttaagctacaacaaggcaaggcttgaccgacaattgcatgaagaatctgcttagggttaggcgttttgcgctgcttcgcgatgtacgggcc

SEQ ID NO: 478 - DNA, 9169 bp, synthetic construct
  source 1..9169: mol_type = other DNA
agatatacgcgttgacattgattattgactagttattaatagtaatcaattacggggtcattagttcatagcccatatatggagttccgcgttacataacttacggtaaatggcccgcctggctgaccgcccaacgacccccgcccattgacgtcaataatgacgtatgttcccatagtaacgccaatagggactttccattgacgtcaatgggtggagtatttacggtaaactgcccacttggcagtacatcaagtgtatcatatgccaagtacgccccctattgacgtcaatgacggtaaatggcccgcctggcattatgcccagtacatgaccttatgggactttcctacttggcagtacatctacgtattagtcatcgctattaccatggtgatgcggttttggcagtacatcaatgggcgtggatagcggtttgactcacggggatttccaagtctccaccccattgacgtcaatgggagtttgttttggcaccaaaatcaacgggactttccaaaatgtcgtaacaactccgccccattgacgcaaatgggcggtaggcgtgtacggtgggaggtctatataagcagagctggtttagtgaaccgtcagatccgctagagatccgcggccgctaatacgactcactatagggagagccgccaccatgaaacggacagccgacggaagcgagttcgagtcaccaaagaagaagcggaaagtcgaggcctcccccgcatcaggacctagacacctgatggatccccatattttcacatctaacttcaacaacggaatcggcagacacaagacctacctgtgctatgaggtggaaaggctggataacggaacctctgtgaagatggaccagcacaggtaagtatcaaggttacaagacaggtttaaggagaccaatagaaactgggcttgtcgagacagagaagactcttgcgtttctgataggcacctattggtcttactgacatccactttgcctttctctccacaggggcttcctgcataaccaggccaagaatctgctgtgcggtttctacgggagacatgcagaactgaggtttctggatctggtgccatccctgcagctggaccccgctcagatctacagagtgacttggttcatctcttggagcccttgcttttcatggggatgtgctggcgaggtgagggccttccttcaggaaaacacacacgtgagactgaggatttttgctgccagaatctacgattatgacccactgtacaaggaagctctgcagatgctgagggatgcaggcgctcaggtgagcattatgacctatgacgaattcaagcactgctgggatacttttgtggaccatcagggttgtccttttcagccatgggatgggctggacgagcattctcaggcactgagcggtagactgagggctatcctgcagaaccaggggaattctggtggttcttctggtggttctagcggcagcgagactcccgggacctcagagtccgccacacccgaaagttctggtggttcttctggtggttctaagtccctcaaaaagaatgacgccgtggtggccattatgaaagacctgctcgactccgtgaagtccttcgaaaattacattaaagcgttctttggggaggggaaggaaactaacagggatgagtccttctatggcgactttgtcctcgcgtacgacatcctgctgaaggtcgaccacatttacgacgcgatccgcaactacgtgacacagaagccgtactccaaagacaagttcaagctgtacttccagaacccgcaatttatggggggctgggacaaggataaagagacagactaccgcgcgacaattctccgctatggctccaaatactatctggccatcatggacaagaagtacgcgaagtgcctgcagaagatcgacaaagacgacgtcaatggcaactatgaaaagatcaactacaagctgctgccgggcccgaacaagatgctcccgaaggtgttcttcagcaagaagtggatggcctactacaatccaagcgaggatattcagaaaatctataaaaacgggaccttcaagaagggggacatgtttaacctcaacgactgccacaagctcattgatttcttcaaggatagcatttcccgctacccgaaatggtccaatgcgtacgattttaacttctccgagacagaaaagtacaaagacatcgcgggcttttacagggaggtggaggagcaagggtataaagtttcttttgaatccgcgagcaagaaggaagtcgacaagctcgtcgaggagggcaagctctacatgttccaaatttataacaaggacttttccgacaagagccatgggaccccaaacctccacaccatgtacttcaaactgctctttgacgagaacaaccacgggcaaatcaggctgagcggcggcgccgaattattcatgcgcagggcctccctcaagaaggaagagctggtcgtccatccagccaattccccgatcgcgaacaagaacccggacaatccgaaaaagaccaccaccctgtcctacgacgtctacaaggacaaacgcttcagcgaagaccagtacgaattacacatcccaattgcgattaataagtgcccaaagaatatcttcaaaattaatacagaggtcagggtgctgctcaaacacgacgacaatccgtatgtcatcggcattgccaggggcgagcgcaatctgctctatatcgtggtcgtggatgggaagggcaatattgtggagcagtactccctgaacgagattatcaacaacttcaatgggattaggattaagaccgactatcacagcctgctcgacaagaaagaaaaagagaggtttgaggcccgccaaaactggacctccattgagaatatcaaagaattaaaggccggctatatttcccaagtcgtccacaagatctgcgagctggtggagaaatatgacgccgtgattgcgctcgaagacttaaattctgggttcaagaactcccgcgtgaaggtggaaaaacaggtgtatcagaaattcgagaaaatgctgatcgacaaactcaattatatggtggataagaagtccaacccgtgtgccacagggggcgcgctgaagggctatcagatcaccaacaagttcgagagcttcaagagcatgagcacccagaacgggtttattttctacatcccggcgtggctcacctccaagattgacccgagcaccggcttcgtgaacctcctgaagacaaagtatacctccattgccgacagcaagaagtttatctcctccttcgaccgcattatgtatgtgccggaggaggacctcttcgagttcgccctcgactacaaaaacttcagccgcacagatgcggattacatcaagaagtggaagctgtactcctacgggaacaggatccgcatcttcaggaatccaaaaaaaaataacgtctttgactgggaggaagtgtgcctgacatccgcctacaaggaactgttcaataaatacggcatcaattaccagcagggcgacattcgcgccctcctctgtgagcagtccgacaaagcgttttactccagcttcatggccctcatgtccctgatgctccaaatgaggaatagcatcacagggcgcaccgacgtcgacttcctcatcagcccggtgaagaactccgacgggatcttttacgactcccgcaactatgaggcgcaagagaatgcgatcctcccgaagaacgccgatgcgaacggggcctataatatcgccaggaaagtgctctgggccatcgggcagttcaaaaaggcggaggatgagaagctcgacaaggtgaaaattgccatttccaacaaggagtggctggagtacgcgcagacctccgtgaagcacggctcctctggcagctccggctctagcggctcctctggcagctccggctccaagctggagaagtttacaaactgttacagcctctccaaaaccctcaggtttaaagcgatcccggtgggcaagacccaggagaacatcgacaacaagaggctcctggtggaagacgagaagcgcgccgaagactacaagggcgtgaagaagctgctcgataggtactacctcagctttattaacgacgtgctgcacagcatcaaactcaagaatctcaacaactacatctccctcttccgcaaaaagacccgcaccgagaaggagaacaaggagctggagaacctggagatcaacctccgcaaggaaatcgccaaagcgttcaagggcaatgaagggtacaagagcctcttcaagaaagacatcatcgaaactatcctcccagagtttctcgatgacaaggacgagatcgcgctggtgaactcctttaacgggttcacaaccgcgtttaccggcttctttgataacagggaaaatatgttctccgaggaggccaagtccaccagcatcgccttcaggtgtatcaacgagaacctcacccgctacatttccaatatggacattttcgagaaggtggatgcgatcttcgataagcacgaggtgcaggagatcaaagagaagattctcaattccgattatgacgtcgaggatttcttcgaaggggagttctttaattttgtgctcacacaagagggcattgacgtgtacaacgcgattatcgggggcttcgtcacagagtccggggagaagattaaggggctgaatgagtacatcaatctgtacaatcagaagaccaagcagaaactgccgaaattcaagccgctctacaagcaagtcctgtccgatagggaaagcctctccttctacggcgagggctataccagcgacgaggaggtgctggaagtcttccgcaacacactgaataagaatagcgagattttctcctccatcaagaagctcgagaagctctttaagaactttgacgagtacagctccgccgggattttcgtgaagaacgggccggcgatcagcaccatctccaaggacatctttggcgagtggaacgtcatcagggacaagtggaacgccgagtacgacgacatccacctgaagaagaaggcggtggtgaccgagaagtatgaggacgatcgcaggaagtccttcaaaaaaatcggctccttcagcctcgaacagctccaggagtatgccgatgcggatctgtccgtcgtcgagaagctgaaggaaatcatcattcagaaggtcgacgagatctataaagtgtacgggtccagcgagaagctgttcgacgccgactttgtgctcgagtcaggcggaagtggtggaagtggcggtagtaccaacctcagcgacattatcgagaaggaaaccggcaagcaactcgtgatccaggagagcatactgatgctccccgaggaggtcgaggaggtgattggcaataagcccgagtccgatatactggttcatactgcgtatgacgaaagcacagacgagaacgtcatgctacttaccagcgacgccccggagtacaagccctgggccctagtcatccaagacagcaacggtgagaacaagatcaagatgctttctggcggctcaaaaagaaccgccgacggcagcgaattcgagcccaagaagaagaggaaagtcggaagcggagctactaacttcagcctgctgaagcaggctggagacgtggaggagaaccctggacctatggtgagcaagggcgaggagctgttcaccggggtggtgcccatcctggtcgagctggacggcgacgtaaacggccacaagttcagcgtgtccggcgagggcgagggcgatgccacctacggcaagctgaccctgaagttcatctgcaccaccggcaagctgcccgtgccctggcccaccctcgtgaccaccctgacctatggagtgcagtgcttcagccgctaccccgaccacatgaagcagcacgacttcttcaagtccgccatgcccgaaggctacgtccaggagcgcaccatcttcttcaaggacgacggcaactacaagacccgcgccgaggtgaagttcgagggcgacaccctggtgaaccgcatcgagctgaagggcatcgacttcaaggaggacggcaacatcctggggcacaagctggagtacaactacaacagccacaacgtctatatcatggccgacaagcagaagaacggcatcaaggtgaacttcaagatccgccacaacatcgaggacggcagcgtgcagctcgccgaccactaccagcagaacacccccatcggcgacggccccgtgctgctgcccgacaaccactacctgagcacccagtccgccctgagcaaagaccccaacgagaagcgcgatcacatggtcctgctggagttcgtgaccgccgccgggatcactctcggcatggacgagctgtacaagtctggtggttctcccaagaagaagaggaaagtctaaccggtcatcatcaccatcaccattgagtttaaacccgctgatcagcctcgactgtgccttctagttgccagccatctgttgtttgcccctcccccgtgccttccttgaccctggaaggtgccactcccactgtcctttcctaataaaatgaggaaattgcatcgcattgtctgagtaggtgtcattctattctggggggtggggtggggcaggacagcaagggggaggattgggaagacaatagcaggcatgctggggatgcggtgggctctatggcttctgaggcgaaaagaaccagctggggctcgataccgtcgacctctagctagagcttggcgtaatcatggtcatagctgtttcctgtgtgaaattgttatccgctcacaattccacacaacatacgagccggaagcataaagtgtaaagcctagggtgcctaatgagtgagctaactcacattaattgcgttgcgctcactgcccgctttccagtcgggaaacctgtcgtgccagctgcattaatgaatcggccaacgcgcgggaagaggcggtttgcgtattgggcgctcttccgcttcctcgctcactgactcgctgcgctcggtcgttcggctgcggcgagcggtatcagctcactcaaaggcggtaatacggttatccacagaatcaggggataacgcaggaaagaacatgtgagcaaaaggccagcaaaaggccaggaaccgtaaaaaggccgcgttgctggcgtttttccataggctccgcccccctgacgagcatcacaaaaatcgacgctcaagtcagaggtggcgaaacccgacaggactataaagataccaggcgtttccccctggaagctccctcgtgcgctctcctgttccgaccctgccgcttaccggatacctgtccgcctttctcccttcgggaagcgtggcgctttctcatagctcacgctgtaggtatctcagttcggtgtaggtcgttcgctccaagctgggctgtgtgcacgaaccccccgttcagcccgaccgctgcgccttatccggtaactatcgtcttgagtccaacccggtaagacacgacttatcgccactggcagcagccactggtaacaggattagcagagcgaggtatgtaggcggtgctacagagttcttgaagtggtggcctaactacggctacactagaagaacagtatttggtatctgcgctctgctgaagccagttaccttcggaaaaagagttggtagctcttgatccggcaaacaaaccaccgctggtagcggtggtttttttgtttgcaagcagcagattacgcgcagaaaaaaaggatctcaagaagatcctttgatcttttctacggggtctgacactcagtggaacgaaaactcacgttaagggattttggtcatgagattatcaaaaaggatcttcacctagatccttttaaattaaaaatgaagttttaaatcaatctaaagtatatatgagtaaacttggtctgacagttaccaatgcttaatcagtgaggcacctatctcagcgatctgtctatttcgttcatccatagttgcctgactccccgtcgtgtagataactacgatacgggagggcttaccatctggccccagtgctgcaatgataccgcgagacccacgctcaccggctccagatttatcagcaataaaccagccagccggaagggccgagcgcagaagtggtcctgcaactttatccgcctccatccagtctattaattgttgccgggaagctagagtaagtagttcgccagttaatagtttgcgcaacgttgttgccattgctacaggcatcgtggtgtcacgctcgtcgtttggtatggcttcattcagctccggttcccaacgatcaaggcgagttacatgatcccccatgttgtgcaaaaaagcggttagctccttcggtcctccgatcgttgtcagaagtaagttggccgcagtgttatcactcatggttatggcagcactgcataattctcttactgtcatgccatccgtaagatgcttttctgtgactggtgagtactcaaccaagtcattctgagaatagtgtatgcggcgaccgagttgctcttgcccggcgtcaatacgggataataccgcgccacatagcagaactttaaaagtgctcatcattggaaaacgttcttcggggcgaaaactctcaaggatcttaccgctgttgagatccagttcgatgtaacccactcgtgcacccaactgatcttcagcatcttttactttcaccagcgtttctgggtgagcaaaaacaggaaggcaaaatgccgcaaaaaagggaataagggcgacacggaaatgttgaatactcatactcttcctttttcaatattattgaagcatttatcagggttattgtctcatgagcggatacatatttgaatgtatttagaaaaataaacaaataggggttccgcgcacatttccccgaaaagtgccacctgacgtcgacggatcgggagatcgatctcccgatcccctagggtcgactctcagtacaatctgctctgatgccgcatagttaagccagtatctgctccctgcttgtgtgttggaggtcgctgagtagtgcgcgagcaaaatttaagctacaacaaggcaaggcttgaccgacaattgcatgaagaatctgcttagggttaggcgttttgcgctgcttcgcgatgtacgggcc

SEQ ID NO: 479 - DNA, 9169 bp, synthetic construct
  source 1..9169: mol_type = other DNA
agatatacgcgttgacattgattattgactagttattaatagtaatcaattacggggtcattagttcatagcccatatatggagttccgcgttacataacttacggtaaatggcccgcctggctgaccgcccaacgacccccgcccattgacgtcaataatgacgtatgttcccatagtaacgccaatagggactttccattgacgtcaatgggtggagtatttacggtaaactgcccacttggcagtacatcaagtgtatcatatgccaagtacgccccctattgacgtcaatgacggtaaatggcccgcctggcattatgcccagtacatgaccttatgggactttcctacttggcagtacatctacgtattagtcatcgctattaccatggtgatgcggttttggcagtacatcaatgggcgtggatagcggtttgactcacggggatttccaagtctccaccccattgacgtcaatgggagtttgttttggcaccaaaatcaacgggactttccaaaatgtcgtaacaactccgccccattgacgcaaatgggcggtaggcgtgtacggtgggaggtctatataagcagagctggtttagtgaaccgtcagatccgctagagatccgcggccgctaatacgactcactatagggagagccgccaccatgaaacggacagccgacggaagcgagttcgagtcaccaaagaagaagcggaaagtcgaggcctcccccgcatcaggacctagacacctgatggatccccatattttcacatctaacttcaacaacggaatcggcagacacaagacctacctgtgctatgaggtggaaaggctggataacggaacctctgtgaagatggaccagcacaggtaagtatcaaggttacaagacaggtttaaggagaccaatagaaactgggcttgtcgagacagagaagactcttgcgtttctgataggcacctattggtcttactgacatccactttgcctttctctccacaggggcttcctgcataaccaggccaagaatctgctgtgcggtttctacgggagacatgcagaactgaggtttctggatctggtgccatccctgcagctggaccccgctcagatctacagagtgacttggttcatctcttggagcccttgcttttcatggggatgtgctggcgaggtgagggccttccttcaggaaaacacacacgtgagactgaggatttttgctgccagaatctacgattatgacccactgtacaaggaagctctgcagatgctgagggatgcaggcgctcaggtgagcattatgacctatgacgaattcaagcactgctgggatacttttgtggaccatcagggttgtccttttcagccatgggatgggctggacgagcattctcaggcactgagcggtagactgagggctatcctgcagaaccaggggaattctggtggttcttctggtggttctagcggcagcgagactcccgggacctcagagtccgccacacccgaaagttctggtggttcttctggtggttcttccgacaaagcgttttactccagcttcatggccctcatgtccctgatgctccaaatgaggaatagcatcacagggcgcaccgacgtcgacttcctcatcagcccggtgaagaactccgacgggatcttttacgactcccgcaactatgaggcgcaagagaatgcgatcctcccgaagaacgccgatgcgaacggggcctataatatcgccaggaaagtgctctgggccatcgggcagttcaaaaaggcggaggatgagaagctcgacaaggtgaaaattgccatttccaacaaggagtggctggagtacgcgcagacctccgtgaagcacggctcctctggcagctccggctctagcggctcctctggcagctccggctccaagctggagaagtttacaaactgttacagcctctccaaaaccctcaggtttaaagcgatcccggtgggcaagacccaggagaacatcgacaacaagaggctcctggtggaagacgagaagcgcgccgaagactacaagggcgtgaagaagctgctcgataggtactacctcagctttattaacgacgtgctgcacagcatcaaactcaagaatctcaacaactacatctccctcttccgcaaaaagacccgcaccgagaaggagaacaaggagctggagaacctggagatcaacctccgcaaggaaatcgccaaagcgttcaagggcaatgaagggtacaagagcctcttcaagaaagacatcatcgaaactatcctcccagagtttctcgatgacaaggacgagatcgcgctggtgaactcctttaacgggttcacaaccgcgtttaccggcttctttgataacagggaaaatatgttctccgaggaggccaagtccaccagcatcgccttcaggtgtatcaacgagaacctcacccgctacatttccaatatggacattttcgagaaggtggatgcgatcttcgataagcacgaggtgcaggagatcaaagagaagattctcaattccgattatgacgtcgaggatttcttcgaaggggagttctttaattttgtgctcacacaagagggcattgacgtgtacaacgcgattatcgggggcttcgtcacagagtccggggagaagattaaggggctgaatgagtacatcaatctgtacaatcagaagaccaagcagaaactgccgaaattcaagccgctctacaagcaagtcctgtccgatagggaaagcctctccttctacggcgagggctataccagcgacgaggaggtgctggaagtcttccgcaacacactgaataagaatagcgagattttctcctccatcaagaagctcgagaagctctttaagaactttgacgagtacagctccgccgggattttcgtgaagaacgggccggcgatcagcaccatctccaaggacatctttggcgagtggaacgtcatcagggacaagtggaacgccgagtacgacgacatccacctgaagaagaaggcggtggtgaccgagaagtatgaggacgatcgcaggaagtccttcaaaaaaatcggctccttcagcctcgaacagctccaggagtatgccgatgcggatctgtccgtcgtcgagaagctgaaggaaatcatcattcagaaggtcgacgagatctataaagtgtacgggtccagcgagaagctgttcgacgccgactttgtgctcgagaagtccctcaaaaagaatgacgccgtggtggccattatgaaagacctgctcgactccgtgaagtccttcgaaaattacattaaagcgttctttggggaggggaaggaaactaacagggatgagtccttctatggcgactttgtcctcgcgtacgacatcctgctgaaggtcgaccacatttacgacgcgatccgcaactacgtgacacagaagccgtactccaaagacaagttcaagctgtacttccagaacccgcaatttatggggggctgggacaaggataaagagacagactaccgcgcgacaattctccgctatggctccaaatactatctggccatcatggacaagaagtacgcgaagtgcctgcagaagatcgacaaagacgacgtcaatggcaactatgaaaagatcaactacaagctgctgccgggcccgaacaagatgctcccgaaggtgttcttcagcaagaagtggatggcctactacaatccaagcgaggatattcagaaaatctataaaaacgggaccttcaagaagggggacatgtttaacctcaacgactgccacaagctcattgatttcttcaaggatagcatttcccgctacccgaaatggtccaatgcgtacgattttaacttctccgagacagaaaagtacaaagacatcgcgggcttttacagggaggtggaggagcaagggtataaagtttcttttgaatccgcgagcaagaaggaagtcgacaagctcgtcgaggagggcaagctctacatgttccaaatttataacaaggacttttccgacaagagccatgggaccccaaacctccacaccatgtacttcaaactgctctttgacgagaacaaccacgggcaaatcaggctgagcggcggcgccgaattattcatgcgcagggcctccctcaagaaggaagagctggtcgtccatccagccaattccccgatcgcgaacaagaacccggacaatccgaaaaagaccaccaccctgtcctacgacgtctacaaggacaaacgcttcagcgaagaccagtacgaattacacatcccaattgcgattaataagtgcccaaagaatatcttcaaaattaatacagaggtcagggtgctgctcaaacacgacgacaatccgtatgtcatcggcattgccaggggcgagcgcaatctgctctatatcgtggtcgtggatgggaagggcaatattgtggagcagtactccctgaacgagattatcaacaacttcaatgggattaggattaagaccgactatcacagcctgctcgacaagaaagaaaaagagaggtttgaggcccgccaaaactggacctccattgagaatatcaaagaattaaaggccggctatatttcccaagtcgtccacaagatctgcgagctggtggagaaatatgacgccgtgattgcgctcgaagacttaaattctgggttcaagaactcccgcgtgaaggtggaaaaacaggtgtatcagaaattcgagaaaatgctgatcgacaaactcaattatatggtggataagaagtccaacccgtgtgccacagggggcgcgctgaagggctatcagatcaccaacaagttcgagagcttcaagagcatgagcacccagaacgggtttattttctacatcccggcgtggctcacctccaagattgacccgagcaccggcttcgtgaacctcctgaagacaaagtatacctccattgccgacagcaagaagtttatctcctccttcgaccgcattatgtatgtgccggaggaggacctcttcgagttcgccctcgactacaaaaacttcagccgcacagatgcggattacatcaagaagtggaagctgtactcctacgggaacaggatccgcatcttcaggaatccaaaaaaaaataacgtctttgactgggaggaagtgtgcctgacatccgcctacaaggaactgttcaataaatacggcatcaattaccagcagggcgacattcgcgccctcctctgtgagcagtcaggcggaagtggtggaagtggcggtagtaccaacctcagcgacattatcgagaaggaaaccggcaagcaactcgtgatccaggagagcatactgatgctccccgaggaggtcgaggaggtgattggcaataagcccgagtccgatatactggttcatactgcgtatgacgaaagcacagacgagaacgtcatgctacttaccagcgacgccccggagtacaagccctgggccctagtcatccaagacagcaacggtgagaacaagatcaagatgctttctggcggctcaaaaagaaccgccgacggcagcgaattcgagcccaagaagaagaggaaagtcggaagcggagctactaacttcagcctgctgaagcaggctggagacgtggaggagaaccctggacctatggtgagcaagggcgaggagctgttcaccggggtggtgcccatcctggtcgagctggacggcgacgtaaacggccacaagttcagcgtgtccggcgagggcgagggcgatgccacctacggcaagctgaccctgaagttcatctgcaccaccggcaagctgcccgtgccctggcccaccctcgtgaccaccctgacctatggagtgcagtgcttcagccgctaccccgaccacatgaagcagcacgacttcttcaagtccgccatgcccgaaggctacgtccaggagcgcaccatcttcttcaaggacgacggcaactacaagacccgcgccgaggtgaagttcgagggcgacaccctggtgaaccgcatcgagctgaagggcatcgacttcaaggaggacggcaacatcctggggcacaagctggagtacaactacaacagccacaacgtctatatcatggccgacaagcagaagaacggcatcaaggtgaacttcaagatccgccacaacatcgaggacggcagcgtgcagctcgccgaccactaccagcagaacacccccatcggcgacggccccgtgctgctgcccgacaaccactacctgagcacccagtccgccctgagcaaagaccccaacgagaagcgcgatcacatggtcctgctggagttcgtgaccgccgccgggatcactctcggcatggacgagctgtacaagtctggtggttctcccaagaagaagaggaaagtctaaccggtcatcatcaccatcaccattgagtttaaacccgctgatcagcctcgactgtgccttctagttgccagccatctgttgtttgcccctcccccgtgccttccttgaccctggaaggtgccactcccactgtcctttcctaataaaatgaggaaattgcatcgcattgtctgagtaggtgtcattctattctggggggtggggtggggcaggacagcaagggggaggattgggaagacaatagcaggcatgctggggatgcggtgggctctatggcttctgaggcgaaaagaaccagctggggctcgataccgtcgacctctagctagagcttggcgtaatcatggtcatagctgtttcctgtgtgaaattgttatccgctcacaattccacacaacatacgagccggaagcataaagtgtaaagcctagggtgcctaatgagtgagctaactcacattaattgcgttgcgctcactgcccgctttccagtcgggaaacctgtcgtgccagctgcattaatgaatcggccaacgcgcgggaagaggcggtttgcgtattgggcgctcttccgcttcctcgctcactgactcgctgcgctcggtcgttcggctgcggcgagcggtatcagctcactcaaaggcggtaatacggttatccacagaatcaggggataacgcaggaaagaacatgtgagcaaaaggccagcaaaaggccaggaaccgtaaaaaggccgcgttgctggcgtttttccataggctccgcccccctgacgagcatcacaaaaatcgacgctcaagtcagaggtggcgaaacccgacaggactataaagataccaggcgtttccccctggaagctccctcgtgcgctctcctgttccgaccctgccgcttaccggatacctgtccgcctttctcccttcgggaagcgtggcgctttctcatagctcacgctgtaggtatctcagttcggtgtaggtcgttcgctccaagctgggctgtgtgcacgaaccccccgttcagcccgaccgctgcgccttatccggtaactatcgtcttgagtccaacccggtaagacacgacttatcgccactggcagcagccactggtaacaggattagcagagcgaggtatgtaggcggtgctacagagttcttgaagtggtggcctaactacggctacactagaagaacagtatttggtatctgcgctctgctgaagccagttaccttcggaaaaagagttggtagctcttgatccggcaaacaaaccaccgctggtagcggtggtttttttgtttgcaagcagcagattacgcgcagaaaaaaaggatctcaagaagatcctttgatcttttctacggggtctgacactcagtggaacgaaaactcacgttaagggattttggtcatgagattatcaaaaaggatcttcacctagatccttttaaattaaaaatgaagttttaaatcaatctaaagtatatatgagtaaacttggtctgacagttaccaatgcttaatcagtgaggcacctatctcagcgatctgtctatttcgttcatccatagttgcctgactccccgtcgtgtagataactacgatacgggagggcttaccatctggccccagtgctgcaatgataccgcgagacccacgctcaccggctccagatttatcagcaataaaccagccagccggaagggccgagcgcagaagtggtcctgcaactttatccgcctccatccagtctattaattgttgccgggaagctagagtaagtagttcgccagttaatagtttgcgcaacgttgttgccattgctacaggcatcgtggtgtcacgctcgtcgtttggtatggcttcattcagctccggttcccaacgatcaaggcgagttacatgatcccccatgttgtgcaaaaaagcggttagctccttcggtcctccgatcgttgtcagaagtaagttggccgcagtgttatcactcatggttatggcagcactgcataattctcttactgtcatgccatccgtaagatgcttttctgtgactggtgagtactcaaccaagtcattctgagaatagtgtatgcggcgaccgagttgctcttgcccggcgtcaatacgggataataccgcgccacatagcagaactttaaaagtgctcatcattggaaaacgttcttcggggcgaaaactctcaaggatcttaccgctgttgagatccagttcgatgtaacccactcgtgcacccaactgatcttcagcatcttttactttcaccagcgtttctgggtgagcaaaaacaggaaggcaaaatgccgcaaaaaagggaataagggcgacacggaaatgttgaatactcatactcttcctttttcaatattattgaagcatttatcagggttattgtctcatgagcggatacatatttgaatgtatttagaaaaataaacaaataggggttccgcgcacatttccccgaaaagtgccacctgacgtcgacggatcgggagatcgatctcccgatcccctagggtcgactctcagtacaatctgctctgatgccgcatagttaagccagtatctgctccctgcttgtgtgttggaggtcgctgagtagtgcgcgagcaaaatttaagctacaacaaggcaaggcttgaccgacaattgcatgaagaatctgcttagggttaggcgttttgcgctgcttcgcgatgtacgggcc

SEQ ID NO: 480 - DNA, 9169 bp, synthetic construct
  source 1..9169: mol_type = other DNA
agatatacgcgttgacattgattattgactagttattaatagtaatcaattacggggtcattagttcatagcccatatatggagttccgcgttacataacttacggtaaatggcccgcctggctgaccgcccaacgacccccgcccattgacgtcaataatgacgtatgttcccatagtaacgccaatagggactttccattgacgtcaatgggtggagtatttacggtaaactgcccacttggcagtacatcaagtgtatcatatgccaagtacgccccctattgacgtcaatgacggtaaatggcccgcctggcattatgcccagtacatgaccttatgggactttcctacttggcagtacatctacgtattagtcatcgctattaccatggtgatgcggttttggcagtacatcaatgggcgtggatagcggtttgactcacggggatttccaagtctccaccccattgacgtcaatgggagtttgttttggcaccaaaatcaacgggactttccaaaatgtcgtaacaactccgccccattgacgcaaatgggcggtaggcgtgtacggtgggaggtctatataagcagagctggtttagtgaaccgtcagatccgctagagatccgcggccgctaatacgactcactatagggagagccgccaccatgaaacggacagccgacggaagcgagttcgagtcaccaaagaagaagcggaaagtcaccaacctcagcgacattatcgagaaggaaaccggcaagcaactcgtgatccaggagagcatactgatgctccccgaggaggtcgaggaggtgattggcaataagcccgagtccgatatactggttcatactgcgtatgacgaaagcacagacgagaacgtcatgctacttaccagcgacgccccggagtacaagccctgggccctagtcatccaagacagcaacggtgagaacaagatcaagatgctttcaggcggaagtggtggaagtggcggtagtcgcaccgagaaggagaacaaggagctggagaacctggagatcaacctccgcaaggaaatcgccaaagcgttcaagggcaatgaagggtacaagagcctcttcaagaaagacatcatcgaaactatcctcccagagtttctcgatgacaaggacgagatcgcgctggtgaactcctttaacgggttcacaaccgcgtttaccggcttctttgataacagggaaaatatgttctccgaggaggccaagtccaccagcatcgccttcaggtgtatcaacgagaacctcacccgctacatttccaatatggacattttcgagaaggtggatgcgatcttcgataagcacgaggtgcaggagatcaaagagaagattctcaattccgattatgacgtcgaggatttcttcgaaggggagttctttaattttgtgctcacacaagagggcattgacgtgtacaacgcgattatcgggggcttcgtcacagagtccggggagaagattaaggggctgaatgagtacatcaatctgtacaatcagaagaccaagcagaaactgccgaaattcaagccgctctacaagcaagtcctgtccgatagggaaagcctctccttctacggcgagggctataccagcgacgaggaggtgctggaagtcttccgcaacacactgaataagaatagcgagattttctcctccatcaagaagctcgagaagctctttaagaactttgacgagtacagctccgccgggattttcgtgaagaacgggccggcgatcagcaccatctccaaggacatctttggcgagtggaacgtcatcagggacaagtggaacgccgagtacgacgacatccacctgaagaagaaggcggtggtgaccgagaagtatgaggacgatcgcaggaagtccttcaaaaaaatcggctccttcagcctcgaacagctccaggagtatgccgatgcggatctgtccgtcgtcgagaagctgaaggaaatcatcattcagaaggtcgacgagatctataaagtgtacgggtccagcgagaagctgttcgacgccgactttgtgctcgagaagtccctcaaaaagaatgacgccgtggtggccattatgaaagacctgctcgactccgtgaagtccttcgaaaattacattaaagcgttctttggggaggggaaggaaactaacagggatgagtccttctatggcgactttgtcctcgcgtacgacatcctgctgaaggtcgaccacatttacgacgcgatccgcaactacgtgacacagaagccgtactccaaagacaagttcaagctgtacttccagaacccgcaatttatggggggctgggacaaggataaagagacagactaccgcgcgacaattctccgctatggctccaaatactatctggccatcatggacaagaagtacgcgaagtgcctgcagaagatcgacaaagacgacgtcaatggcaactatgaaaagatcaactacaagctgctgccgggcccgaacaagatgctcccgaaggtgttcttcagcaagaagtggatggcctactacaatccaagcgaggatattcagaaaatctataaaaacgggaccttcaagaagggggacatgtttaacctcaacgactgccacaagctcattgatttcttcaaggatagcatttcccgctacccgaaatggtccaatgcgtacgattttaacttctccgagacagaaaagtacaaagacatcgcgggcttttacagggaggtggaggagcaagggtataaagtttcttttgaatccgcgagcaagaaggaagtcgacaagctcgtcgaggagggcaagctctacatgttccaaatttataacaaggacttttccgacaagagccatgggaccccaaacctccacaccatgtacttcaaactgctctttgacgagaacaaccacgggcaaatcaggctgagcggcggcgccgaattattcatgcgcagggcctccctcaagaaggaagagctggtcgtccatccagccaattccccgatcgcgaacaagaacccggacaatccgaaaaagaccaccaccctgtcctacgacgtctacaaggacaaacgcttcagcgaagaccagtacgaattacacatcccaattgcgattaataagtgcccaaagaatatcttcaaaattaatacagaggtcagggtgctgctcaaacacgacgacaatccgtatgtcatcggcattgccaggggcgagcgcaatctgctctatatcgtggtcgtggatgggaagggcaatattgtggagcagtactccctgaacgagattatcaacaacttcaatgggattaggattaagaccgactatcacagcctgctcgacaagaaagaaaaagagaggtttgaggcccgccaaaactggacctccattgagaatatcaaagaattaaaggccggctatatttcccaagtcgtccacaagatctgcgagctggtggagaaatatgacgccgtgattgcgctcgaagacttaaattctgggttcaagaactcccgcgtgaaggtggaaaaacaggtgtatcagaaattcgagaaaatgctgatcgacaaactcaattatatggtggataagaagtccaacccgtgtgccacagggggcgcgctgaagggctatcagatcaccaacaagttcgagagcttcaagagcatgagcacccagaacgggtttattttctacatcccggcgtggctcacctccaagattgacccgagcaccggcttcgtgaacctcctgaagacaaagtatacctccattgccgacagcaagaagtttatctcctccttcgaccgcattatgtatgtgccggaggaggacctcttcgagttcgccctcgactacaaaaacttcagccgcacagatgcggattacatcaagaagtggaagctgtactcctacgggaacaggatccgcatcttcaggaatccaaaaaaaaataacgtctttgactgggaggaagtgtgcctgacatccgcctacaaggaactgttcaataaatacggcatcaattaccagcagggcgacattcgcgccctcctctgtgagcagtccgacaaagcgttttactccagcttcatggccctcatgtccctgatgctccaaatgaggaatagcatcacagggcgcaccgacgtcgacttcctcatcagcccggtgaagaactccgacgggatcttttacgactcccgcaactatgaggcgcaagagaatgcgatcctcccgaagaacgccgatgcgaacggggcctataatatcgccaggaaagtgctctgggccatcgggcagttcaaaaaggcggaggatgagaagctcgacaaggtgaaaattgccatttccaacaaggagtggctggagtacgcgcagacctccgtgaagcacggctcctctggcagctccggctctagcggctcctctggcagctccggctccaagctggagaagtttacaaactgttacagcctctccaaaaccctcaggtttaaagcgatcccggtgggcaagacccaggagaacatcgacaacaagaggctcctggtggaagacgagaagcgcgccgaagactacaagggcgtgaagaagctgctcgataggtactacctcagctttattaacgacgtgctgcacagcatcaaactcaagaatctcaacaactacatctccctcttccgcaaaaagacctctggtggttcttctggtggttctagcggcagcgagactcccgggacctcagagtccgccacacccgaaagttctggtggttcttctggtggttctgaggcctcccccgcatcaggacctagacacctgatggatccccatattttcacatctaacttcaacaacggaatcggcagacacaagacctacctgtgctatgaggtggaaaggctggataacggaacctctgtgaagatggaccagcacaggtaagtatcaaggttacaagacaggtttaaggagaccaatagaaactgggcttgtcgagacagagaagactcttgcgtttctgataggcacctattggtcttactgacatccactttgcctttctctccacaggggcttcctgcataaccaggccaagaatctgctgtgcggtttctacgggagacatgcagaactgaggtttctggatctggtgccatccctgcagctggaccccgctcagatctacagagtgacttggttcatctcttggagcccttgcttttcatggggatgtgctggcgaggtgagggccttccttcaggaaaacacacacgtgagactgaggatttttgctgccagaatctacgattatgacccactgtacaaggaagctctgcagatgctgagggatgcaggcgctcaggtgagcattatgacctatgacgaattcaagcactgctgggatacttttgtggaccatcagggttgtccttttcagccatgggatgggctggacgagcattctcaggcactgagcggtagactgagggctatcctgcagaaccaggggaattctggcggctcaaaaagaaccgccgacggcagcgaattcgagcccaagaagaagaggaaagtcggaagcggagctactaacttcagcctgctgaagcaggctggagacgtggaggagaaccctggacctatggtgagcaagggcgaggagctgttcaccggggtggtgcccatcctggtcgagctggacggcgacgtaaacggccacaagttcagcgtgtccggcgagggcgagggcgatgccacctacggcaagctgaccctgaagttcatctgcaccaccggcaagctgcccgtgccctggcccaccctcgtgaccaccctgacctatggagtgcagtgcttcagccgctaccccgaccacatgaagcagcacgacttcttcaagtccgccatgcccgaaggctacgtccaggagcgcaccatcttcttcaaggacgacggcaactacaagacccgcgccgaggtgaagttcgagggcgacaccctggtgaaccgcatcgagctgaagggcatcgacttcaaggaggacggcaacatcctggggcacaagctggagtacaactacaacagccacaacgtctatatcatggccgacaagcagaagaacggcatcaaggtgaacttcaagatccgccacaacatcgaggacggcagcgtgcagctcgccgaccactaccagcagaacacccccatcggcgacggccccgtgctgctgcccgacaaccactacctgagcacccagtccgccctgagcaaagaccccaacgagaagcgcgatcacatggtcctgctggagttcgtgaccgccgccgggatcactctcggcatggacgagctgtacaagtctggtggttctcccaagaagaagaggaaagtctaaccggtcatcatcaccatcaccattgagtttaaacccgctgatcagcctcgactgtgccttctagttgccagccatctgttgtttgcccctcccccgtgccttccttgaccctggaaggtgccactcccactgtcctttcctaataaaatgaggaaattgcatcgcattgtctgagtaggtgtcattctattctggggggtggggtggggcaggacagcaagggggaggattgggaagacaatagcaggcatgctggggatgcggtgggctctatggcttctgaggcgaaaagaaccagctggggctcgataccgtcgacctctagctagagcttggcgtaatcatggtcatagctgtttcctgtgtgaaattgttatccgctcacaattccacacaacatacgagccggaagcataaagtgtaaagcctagggtgcctaatgagtgagctaactcacattaattgcgttgcgctcactgcccgctttccagtcgggaaacctgtcgtgccagctgcattaatgaatcggccaacgcgcgggaagaggcggtttgcgtattgggcgctcttccgcttcctcgctcactgactcgctgcgctcggtcgttcggctgcggcgagcggtatcagctcactcaaaggcggtaatacggttatccacagaatcaggggataacgcaggaaagaacatgtgagcaaaaggccagcaaaaggccaggaaccgtaaaaaggccgcgttgctggcgtttttccataggctccgcccccctgacgagcatcacaaaaatcgacgctcaagtcagaggtggcgaaacccgacaggactataaagataccaggcgtttccccctggaagctccctcgtgcgctctcctgttccgaccctgccgcttaccggatacctgtccgcctttctcccttcgggaagcgtggcgctttctcatagctcacgctgtaggtatctcagttcggtgtaggtcgttcgctccaagctgggctgtgtgcacgaaccccccgttcagcccgaccgctgcgccttatccggtaactatcgtcttgagtccaacccggtaagacacgacttatcgccactggcagcagccactggtaacaggattagcagagcgaggtatgtaggcggtgctacagagttcttgaagtggtggcctaactacggctacactagaagaacagtatttggtatctgcgctctgctgaagccagttaccttcggaaaaagagttggtagctcttgatccggcaaacaaaccaccgctggtagcggtggtttttttgtttgcaagcagcagattacgcgcagaaaaaaaggatctcaagaagatcctttgatcttttctacggggtctgacactcagtggaacgaaaactcacgttaagggattttggtcatgagattatcaaaaaggatcttcacctagatccttttaaattaaaaatgaagttttaaatcaatctaaagtatatatgagtaaacttggtctgacagttaccaatgcttaatcagtgaggcacctatctcagcgatctgtctatttcgttcatccatagttgcctgactccccgtcgtgtagataactacgatacgggagggcttaccatctggccccagtgctgcaatgataccgcgagacccacgctcaccggctccagatttatcagcaataaaccagccagccggaagggccgagcgcagaagtggtcctgcaactttatccgcctccatccagtctattaattgttgccgggaagctagagtaagtagttcgccagttaatagtttgcgcaacgttgttgccattgctacaggcatcgtggtgtcacgctcgtcgtttggtatggcttcattcagctccggttcccaacgatcaaggcgagttacatgatcccccatgttgtgcaaaaaagcggttagctccttcggtcctccgatcgttgtcagaagtaagttggccgcagtgttatcactcatggttatggcagcactgcataattctcttactgtcatgccatccgtaagatgcttttctgtgactggtgagtactcaaccaagtcattctgagaatagtgtatgcggcgaccgagttgctcttgcccggcgtcaatacgggataataccgcgccacatagcagaactttaaaagtgctcatcattggaaaacgttcttcggggcgaaaactctcaaggatcttaccgctgttgagatccagttcgatgtaacccactcgtgcacccaactgatcttcagcatcttttactttcaccagcgtttctgggtgagcaaaaacaggaaggcaaaatgccgcaaaaaagggaataagggcgacacggaaatgttgaatactcatactcttcctttttcaatattattgaagcatttatcagggttattgtctcatgagcggatacatatttgaatgtatttagaaaaataaacaaataggggttccgcgcacatttccccgaaaagtgccacctgacgtcgacggatcgggagatcgatctcccgatcccctagggtcgactctcagtacaatctgctctgatgccgcatagttaagccagtatctgctccctgcttgtgtgttggaggtcgctgagtagtgcgcgagcaaaatttaagctacaacaaggcaaggcttgaccgacaattgcatgaagaatctgcttagggttaggcgttttgcgctgcttcgcgatgtacgggcc

SEQ ID NO: 481 - DNA, 9169 bp, synthetic construct
  source 1..9169: mol_type = other DNA
agatatacgcgttgacattgattattgactagttattaatagtaatcaattacggggtcattagttcatagcccatatatggagttccgcgttacataacttacggtaaatggcccgcctggctgaccgcccaacgacccccgcccattgacgtcaataatgacgtatgttcccatagtaacgccaatagggactttccattgacgtcaatgggtggagtatttacggtaaactgcccacttggcagtacatcaagtgtatcatatgccaagtacgccccctattgacgtcaatgacggtaaatggcccgcctggcattatgcccagtacatgaccttatgggactttcctacttggcagtacatctacgtattagtcatcgctattaccatggtgatgcggttttggcagtacatcaatgggcgtggatagcggtttgactcacggggatttccaagtctccaccccattgacgtcaatgggagtttgttttggcaccaaaatcaacgggactttccaaaatgtcgtaacaactccgccccattgacgcaaatgggcggtaggcgtgtacggtgggaggtctatataagcagagctggtttagtgaaccgtcagatccgctagagatccgcggccgctaatacgactcactatagggagagccgccaccatgaaacggacagccgacggaagcgagttcgagtcaccaaagaagaagcggaaagtcaccaacctcagcgacattatcgagaaggaaaccggcaagcaactcgtgatccaggagagcatactgatgctccccgaggaggtcgaggaggtgattggcaataagcccgagtccgatatactggttcatactgcgtatgacgaaagcacagacgagaacgtcatgctacttaccagcgacgccccggagtacaagccctgggccctagtcatccaagacagcaacggtgagaacaagatcaagatgctttcaggcggaagtggtggaagtggcggtagtggctataccagcgacgaggaggtgctggaagtcttccgcaacacactgaataagaatagcgagattttctcctccatcaagaagctcgagaagctctttaagaactttgacgagtacagctccgccgggattttcgtgaagaacgggccggcgatcagcaccatctccaaggacatctttggcgagtggaacgtcatcagggacaagtggaacgccgagtacgacgacatccacctgaagaagaaggcggtggtgaccgagaagtatgaggacgatcgcaggaagtccttcaaaaaaatcggctccttcagcctcgaacagctccaggagtatgccgatgcggatctgtccgtcgtcgagaagctgaaggaaatcatcattcagaaggtcgacgagatctataaagtgtacgggtccagcgagaagctgttcgacgccgactttgtgctcgagaagtccctcaaaaagaatgacgccgtggtggccattatgaaagacctgctcgactccgtgaagtccttcgaaaattacattaaagcgttctttggggaggggaaggaaactaacagggatgagtccttctatggcgactttgtcctcgcgtacgacatcctgctgaaggtcgaccacatttacgacgcgatccgcaactacgtgacacagaagccgtactccaaagacaagttcaagctgtacttccagaacccgcaatttatggggggctgggacaaggataaagagacagactaccgcgcgacaattctccgctatggctccaaatactatctggccatcatggacaagaagtacgcgaagtgcctgcagaagatcgacaaagacgacgtcaatggcaactatgaaaagatcaactacaagctgctgccgggcccgaacaagatgctcccgaaggtgttcttcagcaagaagtggatggcctactacaatccaagcgaggatattcagaaaatctataaaaacgggaccttcaagaagggggacatgtttaacctcaacgactgccacaagctcattgatttcttcaaggatagcatttcccgctacccgaaatggtccaatgcgtacgattttaacttctccgagacagaaaagtacaaagacatcgcgggcttttacagggaggtggaggagcaagggtataaagtttcttttgaatccgcgagcaagaaggaagtcgacaagctcgtcgaggagggcaagctctacatgttccaaatttataacaaggacttttccgacaagagccatgggaccccaaacctccacaccatgtacttcaaactgctctttgacgagaacaaccacgggcaaatcaggctgagcggcggcgccgaattattcatgcgcagggcctccctcaagaaggaagagctggtcgtccatccagccaattccccgatcgcgaacaagaacccggacaatccgaaaaagaccaccaccctgtcctacgacgtctacaaggacaaacgcttcagcgaagaccagtacgaattacacatcccaattgcgattaataagtgcccaaagaatatcttcaaaattaatacagaggtcagggtgctgctcaaacacgacgacaatccgtatgtcatcggcattgccaggggcgagcgcaatctgctctatatcgtggtcgtggatgggaagggcaatattgtggagcagtactccctgaacgagattatcaacaacttcaatgggattaggattaagaccgactatcacagcctgctcgacaagaaagaaaaagagaggtttgaggcccgccaaaactggacctccattgagaatatcaaagaattaaaggccggctatatttcccaagtcgtccacaagatctgcgagctggtggagaaatatgacgccgtgattgcgctcgaagacttaaattctgggttcaagaactcccgcgtgaaggtggaaaaacaggtgtatcagaaattcgagaaaatgctgatcgacaaactcaattatatggtggataagaagtccaacccgtgtgccacagggggcgcgctgaagggctatcagatcaccaacaagttcgagagcttcaagagcatgagcacccagaacgggtttattttctacatcccggcgtggctcacctccaagattgacccgagcaccggcttcgtgaacctcctgaagacaaagtatacctccattgccgacagcaagaagtttatctcctccttcgaccgcattatgtatgtgccggaggaggacctcttcgagttcgccctcgactacaaaaacttcagccgcacagatgcggattacatcaagaagtggaagctgtactcctacgggaacaggatccgcatcttcaggaatccaaaaaaaaataacgtctttgactgggaggaagtgtgcctgacatccgcctacaaggaactgttcaataaatacggcatcaattaccagcagggcgacattcgcgccctcctctgtgagcagtccgacaaagcgttttactccagcttcatggccctcatgtccctgatgctccaaatgaggaatagcatcacagggcgcaccgacgtcgacttcctcatcagcccggtgaagaactccgacgggatcttttacgactcccgcaactatgaggcgcaagagaatgcgatcctcccgaagaacgccgatgcgaacggggcctataatatcgccaggaaagtgctctgggccatcgggcagttcaaaaaggcggaggatgagaagctcgacaaggtgaaaattgccatttccaacaaggagtggctggagtacgcgcagacctccgtgaagcacggctcctctggcagctccggctctagcggctcctctggcagctccggctccaagctggagaagtttacaaactgttacagcctctccaaaaccctcaggtttaaagcgatcccggtgggcaagacccaggagaacatcgacaacaagaggctcctggtggaagacgagaagcgcgccgaagactacaagggcgtgaagaagctgctcgataggtactacctcagctttattaacgacgtgctgcacagcatcaaactcaagaatctcaacaactacatctccctcttccgcaaaaagacccgcaccgagaaggagaacaaggagctggagaacctggagatcaacctccgcaaggaaatcgccaaagcgttcaagggcaatgaagggtacaagagcctcttcaagaaagacatcatcgaaactatcctcccagagtttctcgatgacaaggacgagatcgcgctggtgaactcctttaacgggttcacaaccgcgtttaccggcttctttgataacagggaaaatatgttctccgaggaggccaagtccaccagcatcgccttcaggtgtatcaacgagaacctcacccgctacatttccaatatggacattttcgagaaggtggatgcgatcttcgataagcacgaggtgcaggagatcaaagagaagattctcaattccgattatgacgtcgaggatttcttcgaaggggagttctttaattttgtgctcacacaagagggcattgacgtgtacaacgcgattatcgggggcttcgtcacagagtccggggagaagattaaggggctgaatgagtacatcaatctgtacaatcagaagaccaagcagaaactgccgaaattcaagccgctctacaagcaagtcctgtccgatagggaaagcctctccttctacggcgagtctggtggttcttctggtggttctagcggcagcgagactcccgggacctcagagtccgccacacccgaaagttctggtggttcttctggtggttctgaggcctcccccgcatcaggacctagacacctgatggatccccatattttcacatctaacttcaacaacggaatcggcagacacaagacctacctgtgctatgaggtggaaaggctggataacggaacctctgtgaagatggaccagcacaggtaagtatcaaggttacaagacaggtttaaggagaccaatagaaactgggcttgtcgagacagagaagactcttgcgtttctgataggcacctattggtcttactgacatccactttgcctttctctccacaggggcttcctgcataaccaggccaagaatctgctgtgcggtttctacgggagacatgcagaactgaggtttctggatctggtgccatccctgcagctggaccccgctcagatctacagagtgacttggttcatctcttggagcccttgcttttcatggggatgtgctggcgaggtgagggccttccttcaggaaaacacacacgtgagactgaggatttttgctgccagaatctacgattatgacccactgtacaaggaagctctgcagatgctgagggatgcaggcgctcaggtgagcattatgacctatgacgaattcaagcactgctgggatacttttgtggaccatcagggttgtccttttcagccatgggatgggctggacgagcattctcaggcactgagcggtagactgagggctatcctgcagaaccaggggaattctggcggctcaaaaagaaccgccgacggcagcgaattcgagcccaagaagaagaggaaagtcggaagcggagctactaacttcagcctgctgaagcaggctggagacgtggaggagaaccctggacctatggtgagcaagggcgaggagctgttcaccggggtggtgcccatcctggtcgagctggacggcgacgtaaacggccacaagttcagcgtgtccggcgagggcgagggcgatgccacctacggcaagctgaccctgaagttcatctgcaccaccggcaagctgcccgtgccctggcccaccctcgtgaccaccctgacctatggagtgcagtgcttcagccgctaccccgaccacatgaagcagcacgacttcttcaagtccgccatgcccgaaggctacgtccaggagcgcaccatcttcttcaaggacgacggcaactacaagacccgcgccgaggtgaagttcgagggcgacaccctggtgaaccgcatcgagctgaagggcatcgacttcaaggaggacggcaacatcctggggcacaagctggagtacaactacaacagccacaacgtctatatcatggccgacaagcagaagaacggcatcaaggtgaacttcaagatccgccacaacatcgaggacggcagcgtgcagctcgccgaccactaccagcagaacacccccatcggcgacggccccgtgctgctgcccgacaaccactacctgagcacccagtccgccctgagcaaagaccccaacgagaagcgcgatcacatggtcctgctggagttcgtgaccgccgccgggatcactctcggcatggacgagctgtacaagtctggtggttctcccaagaagaagaggaaagtctaaccggtcatcatcaccatcaccattgagtttaaacccgctgatcagcctcgactgtgccttctagttgccagccatctgttgtttgcccctcccccgtgccttccttgaccctggaaggtgccactcccactgtcctttcctaataaaatgaggaaattgcatcgcattgtctgagtaggtgtcattctattctggggggtggggtggggcaggacagcaagggggaggattgggaagacaatagcaggcatgctggggatgcggtgggctctatggcttctgaggcgaaaagaaccagctggggctcgataccgtcgacctctagctagagcttggcgtaatcatggtcatagctgtttcctgtgtgaaattgttatccgctcacaattccacacaacatacgagccggaagcataaagtgtaaagcctagggtgcctaatgagtgagctaactcacattaattgcgttgcgctcactgcccgctttccagtcgggaaacctgtcgtgccagctgcattaatgaatcggccaacgcgcgggaagaggcggtttgcgtattgggcgctcttccgcttcctcgctcactgactcgctgcgctcggtcgttcggctgcggcgagcggtatcagctcactcaaaggcggtaatacggttatccacagaatcaggggataacgcaggaaagaacatgtgagcaaaaggccagcaaaaggccaggaaccgtaaaaaggccgcgttgctggcgtttttccataggctccgcccccctgacgagcatcacaaaaatcgacgctcaagtcagaggtggcgaaacccgacaggactataaagataccaggcgtttccccctggaagctccctcgtgcgctctcctgttccgaccctgccgcttaccggatacctgtccgcctttctcccttcgggaagcgtggcgctttctcatagctcacgctgtaggtatctcagttcggtgtaggtcgttcgctccaagctgggctgtgtgcacgaaccccccgttcagcccgaccgctgcgccttatccggtaactatcgtcttgagtccaacccggtaagacacgacttatcgccactggcagcagccactggtaacaggattagcagagcgaggtatgtaggcggtgctacagagttcttgaagtggtggcctaactacggctacactagaagaacagtatttggtatctgcgctctgctgaagccagttaccttcggaaaaagagttggtagctcttgatccggcaaacaaaccaccgctggtagcggtggtttttttgtttgcaagcagcagattacgcgcagaaaaaaaggatctcaagaagatcctttgatcttttctacggggtctgacactcagtggaacgaaaactcacgttaagggattttggtcatgagattatcaaaaaggatcttcacctagatccttttaaattaaaaatgaagttttaaatcaatctaaagtatatatgagtaaacttggtctgacagttaccaatgcttaatcagtgaggcacctatctcagcgatctgtctatttcgttcatccatagttgcctgactccccgtcgtgtagataactacgatacgggagggcttaccatctggccccagtgctgcaatgataccgcgagacccacgctcaccggctccagatttatcagcaataaaccagccagccggaagggccgagcgcagaagtggtcctgcaactttatccgcctccatccagtctattaattgttgccgggaagctagagtaagtagttcgccagttaatagtttgcgcaacgttgttgccattgctacaggcatcgtggtgtcacgctcgtcgtttggtatggcttcattcagctccggttcccaacgatcaaggcgagttacatgatcccccatgttgtgcaaaaaagcggttagctccttcggtcctccgatcgttgtcagaagtaagttggccgcagtgttatcactcatggttatggcagcactgcataattctcttactgtcatgccatccgtaagatgcttttctgtgactggtgagtactcaaccaagtcattctgagaatagtgtatgcggcgaccgagttgctcttgcccggcgtcaatacgggataataccgcgccacatagcagaactttaaaagtgctcatcattggaaaacgttcttcggggcgaaaactctcaaggatcttaccgctgttgagatccagttcgatgtaacccactcgtgcacccaactgatcttcagcatcttttactttcaccagcgtttctgggtgagcaaaaacaggaaggcaaaatgccgcaaaaaagggaataagggcgacacggaaatgttgaatactcatactcttcctttttcaatattattgaagcatttatcagggttattgtctcatgagcggatacatatttgaatgtatttagaaaaataaacaaataggggttccgcgcacatttccccgaaaagtgccacctgacgtcgacggatcgggagatcgatctcccgatcccctagggtcgactctcagtacaatctgctctgatgccgcatagttaagccagtatctgctccctgcttgtgtgttggaggtcgctgagtagtgcgcgagcaaaatttaagctacaacaaggcaaggcttgaccgacaattgcatgaagaatctgcttagggttaggcgttttgcgctgcttcgcgatgtacgggcc

SEQ ID NO: 482 - DNA, 9169 bp, synthetic construct
  source 1..9169: mol_type = other DNA
agatatacgcgttgacattgattattgactagttattaatagtaatcaattacggggtcattagttcatagcccatatatggagttccgcgttacataacttacggtaaatggcccgcctggctgaccgcccaacgacccccgcccattgacgtcaataatgacgtatgttcccatagtaacgccaatagggactttccattgacgtcaatgggtggagtatttacggtaaactgcccacttggcagtacatcaagtgtatcatatgccaagtacgccccctattgacgtcaatgacggtaaatggcccgcctggcattatgcccagtacatgaccttatgggactttcctacttggcagtacatctacgtattagtcatcgctattaccatggtgatgcggttttggcagtacatcaatgggcgtggatagcggtttgactcacggggatttccaagtctccaccccattgacgtcaatgggagtttgttttggcaccaaaatcaacgggactttccaaaatgtcgtaacaactccgccccattgacgcaaatgggcggtaggcgtgtacggtgggaggtctatataagcagagctggtttagtgaaccgtcagatccgctagagatccgcggccgctaatacgactcactatagggagagccgccaccatgaaacggacagccgacggaagcgagttcgagtcaccaaagaagaagcggaaagtcaccaacctcagcgacattatcgagaaggaaaccggcaagcaactcgtgatccaggagagcatactgatgctccccgaggaggtcgaggaggtgattggcaataagcccgagtccgatatactggttcatactgcgtatgacgaaagcacagacgagaacgtcatgctacttaccagcgacgccccggagtacaagccctgggccctagtcatccaagacagcaacggtgagaacaagatcaagatgctttcaggcggaagtggtggaagtggcggtagttccgacgggatcttttacgactcccgcaactatgaggcgcaagagaatgcgatcctcccgaagaacgccgatgcgaacggggcctataatatcgccaggaaagtgctctgggccatcgggcagttcaaaaaggcggaggatgagaagctcgacaaggtgaaaattgccatttccaacaaggagtggctggagtacgcgcagacctccgtgaagcacggctcctctggcagctccggctctagcggctcctctggcagctccggctccaagctggagaagtttacaaactgttacagcctctccaaaaccctcaggtttaaagcgatcccggtgggcaagacccaggagaacatcgacaacaagaggctcctggtggaagacgagaagcgcgccgaagactacaagggcgtgaagaagctgctcgataggtactacctcagctttattaacgacgtgctgcacagcatcaaactcaagaatctcaacaactacatctccctcttccgcaaaaagacccgcaccgagaaggagaacaaggagctggagaacctggagatcaacctccgcaaggaaatcgccaaagcgttcaagggcaatgaagggtacaagagcctcttcaagaaagacatcatcgaaactatcctcccagagtttctcgatgacaaggacgagatcgcgctggtgaactcctttaacgggttcacaaccgcgtttaccggcttctttgataacagggaaaatatgttctccgaggaggccaagtccaccagcatcgccttcaggtgtatcaacgagaacctcacccgctacatttccaatatggacattttcgagaaggtggatgcgatcttcgataagcacgaggtgcaggagatcaaagagaagattctcaattccgattatgacgtcgaggatttcttcgaaggggagttctttaattttgtgctcacacaagagggcattgacgtgtacaacgcgattatcgggggcttcgtcacagagtccggggagaagattaaggggctgaatgagtacatcaatctgtacaatcagaagaccaagcagaaactgccgaaattcaagccgctctacaagcaagtcctgtccgatagggaaagcctctccttctacggcgagggctataccagcgacgaggaggtgctggaagtcttccgcaacacactgaataagaatagcgagattttctcctccatcaagaagctcgagaagctctttaagaactttgacgagtacagctccgccgggattttcgtgaagaacgggccggcgatcagcaccatctccaaggacatctttggcgagtggaacgtcatcagggacaagtggaacgccgagtacgacgacatccacctgaagaagaaggcggtggtgaccgagaagtatgaggacgatcgcaggaagtccttcaaaaaaatcggctccttcagcctcgaacagctccaggagtatgccgatgcggatctgtccgtcgtcgagaagctgaaggaaatcatcattcagaaggtcgacgagatctataaagtgtacgggtccagcgagaagctgttcgacgccgactttgtgctcgagaagtccctcaaaaagaatgacgccgtggtggccattatgaaagacctgctcgactccgtgaagtccttcgaaaattacattaaagcgttctttggggaggggaaggaaactaacagggatgagtccttctatggcgactttgtcctcgcgtacgacatcctgctgaaggtcgaccacatttacgacgcgatccgcaactacgtgacacagaagccgtactccaaagacaagttcaagctgtacttccagaacccgcaatttatggggggctgggacaaggataaagagacagactaccgcgcgacaattctccgctatggctccaaatactatctggccatcatggacaagaagtacgcgaagtgcctgcagaagatcgacaaagacgacgtcaatggcaactatgaaaagatcaactacaagctgctgccgggcccgaacaagatgctcccgaaggtgttcttcagcaagaagtggatggcctactacaatccaagcgaggatattcagaaaatctataaaaacgggaccttcaagaagggggacatgtttaacctcaacgactgccacaagctcattgatttcttcaaggatagcatttcccgctacccgaaatggtccaatgcgtacgattttaacttctccgagacagaaaagtacaaagacatcgcgggcttttacagggaggtggaggagcaagggtataaagtttcttttgaatccgcgagcaagaaggaagtcgacaagctcgtcgaggagggcaagctctacatgttccaaatttataacaaggacttttccgacaagagccatgggaccccaaacctccacaccatgtacttcaaactgctctttgacgagaacaaccacgggcaaatcaggctgagcggcggcgccgaattattcatgcgcagggcctccctcaagaaggaagagctggtcgtccatccagccaattccccgatcgcgaacaagaacccggacaatccgaaaaagaccaccaccctgtcctacgacgtctacaaggacaaacgcttcagcgaagaccagtacgaattacacatcccaattgcgattaataagtgcccaaagaatatcttcaaaattaatacagaggtcagggtgctgctcaaacacgacgacaatccgtatgtcatcggcattgccaggggcgagcgcaatctgctctatatcgtggtcgtggatgggaagggcaatattgtggagcagtactccctgaacgagattatcaacaacttcaatgggattaggattaagaccgactatcacagcctgctcgacaagaaagaaaaagagaggtttgaggcccgccaaaactggacctccattgagaatatcaaagaattaaaggccggctatatttcccaagtcgtccacaagatctgcgagctggtggagaaatatgacgccgtgattgcgctcgaagacttaaattctgggttcaagaactcccgcgtgaaggtggaaaaacaggtgtatcagaaattcgagaaaatgctgatcgacaaactcaattatatggtggataagaagtccaacccgtgtgccacagggggcgcgctgaagggctatcagatcaccaacaagttcgagagcttcaagagcatgagcacccagaacgggtttattttctacatcccggcgtggctcacctccaagattgacccgagcaccggcttcgtgaacctcctgaagacaaagtatacctccattgccgacagcaagaagtttatctcctccttcgaccgcattatgtatgtgccggaggaggacctcttcgagttcgccctcgactacaaaaacttcagccgcacagatgcggattacatcaagaagtggaagctgtactcctacgggaacaggatccgcatcttcaggaatccaaaaaaaaataacgtctttgactgggaggaagtgtgcctgacatccgcctacaaggaactgttcaataaatacggcatcaattaccagcagggcgacattcgcgccctcctctgtgagcagtccgacaaagcgttttactccagcttcatggccctcatgtccctgatgctccaaatgaggaatagcatcacagggcgcaccgacgtcgacttcctcatcagcccggtgaagaactctggtggttcttctggtggttctagcggcagcgagactcccgggacctcagagtccgccacacccgaaagttctggtggttcttctggtggttctgaggcctcccccgcatcaggacctagacacctgatggatccccatattttcacatctaacttcaacaacggaatcggcagacacaagacctacctgtgctatgaggtggaaaggctggataacggaacctctgtgaagatggaccagcacaggtaagtatcaaggttacaagacaggtttaaggagaccaatagaaactgggcttgtcgagacagagaagactcttgcgtttctgataggcacctattggtcttactgacatccactttgcctttctctccacaggggcttcctgcataaccaggccaagaatctgctgtgcggtttctacgggagacatgcagaactgaggtttctggatctggtgccatccctgcagctggaccccgctcagatctacagagtgacttggttcatctcttggagcccttgcttttcatggggatgtgctggcgaggtgagggccttccttcaggaaaacacacacgtgagactgaggatttttgctgccagaatctacgattatgacccactgtacaaggaagctctgcagatgctgagggatgcaggcgctcaggtgagcattatgacctatgacgaattcaagcactgctgggatacttttgtggaccatcagggttgtccttttcagccatgggatgggctggacgagcattctcaggcactgagcggtagactgagggctatcctgcagaaccaggggaattctggcggctcaaaaagaaccgccgacggcagcgaattcgagcccaagaagaagaggaaagtcggaagcggagctactaacttcagcctgctgaagcaggctggagacgtggaggagaaccctggacctatggtgagcaagggcgaggagctgttcaccggggtggtgcccatcctggtcgagctggacggcgacgtaaacggccacaagttcagcgtgtccggcgagggcgagggcgatgccacctacggcaagctgaccctgaagttcatctgcaccaccggcaagctgcccgtgccctggcccaccctcgtgaccaccctgacctatggagtgcagtgcttcagccgctaccccgaccacatgaagcagcacgacttcttcaagtccgccatgcccgaaggctacgtccaggagcgcaccatcttcttcaaggacgacggcaactacaagacccgcgccgaggtgaagttcgagggcgacaccctggtgaaccgcatcgagctgaagggcatcgacttcaaggaggacggcaacatcctggggcacaagctggagtacaactacaacagccacaacgtctatatcatggccgacaagcagaagaacggcatcaaggtgaacttcaagatccgccacaacatcgaggacggcagcgtgcagctcgccgaccactaccagcagaacacccccatcggcgacggccccgtgctgctgcccgacaaccactacctgagcacccagtccgccctgagcaaagaccccaacgagaagcgcgatcacatggtcctgctggagttcgtgaccgccgccgggatcactctcggcatggacgagctgtacaagtctggtggttctcccaagaagaagaggaaagtctaaccggtcatcatcaccatcaccattgagtttaaacccgctgatcagcctcgactgtgccttctagttgccagccatctgttgtttgcccctcccccgtgccttccttgaccctggaaggtgccactcccactgtcctttcctaataaaatgaggaaattgcatcgcattgtctgagtaggtgtcattctattctggggggtggggtggggcaggacagcaagggggaggattgggaagacaatagcaggcatgctggggatgcggtgggctctatggcttctgaggcgaaaagaaccagctggggctcgataccgtcgacctctagctagagcttggcgtaatcatggtcatagctgtttcctgtgtgaaattgttatccgctcacaattccacacaacatacgagccggaagcataaagtgtaaagcctagggtgcctaatgagtgagctaactcacattaattgcgttgcgctcactgcccgctttccagtcgggaaacctgtcgtgccagctgcattaatgaatcggccaacgcgcgggaagaggcggtttgcgtattgggcgctcttccgcttcctcgctcactgactcgctgcgctcggtcgttcggctgcggcgagcggtatcagctcactcaaaggcggtaatacggttatccacagaatcaggggataacgcaggaaagaacatgtgagcaaaaggccagcaaaaggccaggaaccgtaaaaaggccgcgttgctggcgtttttccataggctccgcccccctgacgagcatcacaaaaatcgacgctcaagtcagaggtggcgaaacccgacaggactataaagataccaggcgtttccccctggaagctccctcgtgcgctctcctgttccgaccctgccgcttaccggatacctgtccgcctttctcccttcgggaagcgtggcgctttctcatagctcacgctgtaggtatctcagttcggtgtaggtcgttcgctccaagctgggctgtgtgcacgaaccccccgttcagcccgaccgctgcgccttatccggtaactatcgtcttgagtccaacccggtaagacacgacttatcgccactggcagcagccactggtaacaggattagcagagcgaggtatgtaggcggtgctacagagttcttgaagtggtggcctaactacggctacactagaagaacagtatttggtatctgcgctctgctgaagccagttaccttcggaaaaagagttggtagctcttgatccggcaaacaaaccaccgctggtagcggtggtttttttgtttgcaagcagcagattacgcgcagaaaaaaaggatctcaagaagatcctttgatcttttctacggggtctgacactcagtggaacgaaaactcacgttaagggattttggtcatgagattatcaaaaaggatcttcacctagatccttttaaattaaaaatgaagttttaaatcaatctaaagtatatatgagtaaacttggtctgacagttaccaatgcttaatcagtgaggcacctatctcagcgatctgtctatttcgttcatccatagttgcctgactccccgtcgtgtagataactacgatacgggagggcttaccatctggccccagtgctgcaatgataccgcgagacccacgctcaccggctccagatttatcagcaataaaccagccagccggaagggccgagcgcagaagtggtcctgcaactttatccgcctccatccagtctattaattgttgccgggaagctagagtaagtagttcgccagttaatagtttgcgcaacgttgttgccattgctacaggcatcgtggtgtcacgctcgtcgtttggtatggcttcattcagctccggttcccaacgatcaaggcgagttacatgatcccccatgttgtgcaaaaaagcggttagctccttcggtcctccgatcgttgtcagaagtaagttggccgcagtgttatcactcatggttatggcagcactgcataattctcttactgtcatgccatccgtaagatgcttttctgtgactggtgagtactcaaccaagtcattctgagaatagtgtatgcggcgaccgagttgctcttgcccggcgtcaatacgggataataccgcgccacatagcagaactttaaaagtgctcatcattggaaaacgttcttcggggcgaaaactctcaaggatcttaccgctgttgagatccagttcgatgtaacccactcgtgcacccaactgatcttcagcatcttttactttcaccagcgtttctgggtgagcaaaaacaggaaggcaaaatgccgcaaaaaagggaataagggcgacacggaaatgttgaatactcatactcttcctttttcaatattattgaagcatttatcagggttattgtctcatgagcggatacatatttgaatgtatttagaaaaataaacaaataggggttccgcgcacatttccccgaaaagtgccacctgacgtcgacggatcgggagatcgatctcccgatcccctagggtcgactctcagtacaatctgctctgatgccgcatagttaagccagtatctgctccctgcttgtgtgttggaggtcgctgagtagtgcgcgagcaaaatttaagctacaacaaggcaaggcttgaccgacaattgcatgaagaatctgcttagggttaggcgttttgcgctgcttcgcgatgtacgggcc

SEQ ID NO: 483 - DNA, 9169 bp, synthetic construct
  source 1..9169: mol_type = other DNA
agatatacgcgttgacattgattattgactagttattaatagtaatcaattacggggtcattagttcatagcccatatatggagttccgcgttacataacttacggtaaatggcccgcctggctgaccgcccaacgacccccgcccattgacgtcaataatgacgtatgttcccatagtaacgccaatagggactttccattgacgtcaatgggtggagtatttacggtaaactgcccacttggcagtacatcaagtgtatcatatgccaagtacgccccctattgacgtcaatgacggtaaatggcccgcctggcattatgcccagtacatgaccttatgggactttcctacttggcagtacatctacgtattagtcatcgctattaccatggtgatgcggttttggcagtacatcaatgggcgtggatagcggtttgactcacggggatttccaagtctccaccccattgacgtcaatgggagtttgttttggcaccaaaatcaacgggactttccaaaatgtcgtaacaactccgccccattgacgcaaatgggcggtaggcgtgtacggtgggaggtctatataagcagagctggtttagtgaaccgtcagatccgctagagatccgcggccgctaatacgactcactatagggagagccgccaccatgaaacggacagccgacggaagcgagttcgagtcaccaaagaagaagcggaaagtcaccaacctcagcgacattatcgagaaggaaaccggcaagcaactcgtgatccaggagagcatactgatgctccccgaggaggtcgaggaggtgattggcaataagcccgagtccgatatactggttcatactgcgtatgacgaaagcacagacgagaacgtcatgctacttaccagcgacgccccggagtacaagccctgggccctagtcatccaagacagcaacggtgagaacaagatcaagatgctttcaggcggaagtggtggaagtggcggtagtaaagacaagttcaagctgtacttccagaacccgcaatttatggggggctgggacaaggataaagagacagactaccgcgcgacaattctccgctatggctccaaatactatctggccatcatggacaagaagtacgcgaagtgcctgcagaagatcgacaaagacgacgtcaatggcaactatgaaaagatcaactacaagctgctgccgggcccgaacaagatgctcccgaaggtgttcttcagcaagaagtggatggcctactacaatccaagcgaggatattcagaaaatctataaaaacgggaccttcaagaagggggacatgtttaacctcaacgactgccacaagctcattgatttcttcaaggatagcatttcccgctacccgaaatggtccaatgcgtacgattttaacttctccgagacagaaaagtacaaagacatcgcgggcttttacagggaggtggaggagcaagggtataaagtttcttttgaatccgcgagcaagaaggaagtcgacaagctcgtcgaggagggcaagctctacatgttccaaatttataacaaggacttttccgacaagagccatgggaccccaaacctccacaccatgtacttcaaactgctctttgacgagaacaaccacgggcaaatcaggctgagcggcggcgccgaattattcatgcgcagggcctccctcaagaaggaagagctggtcgtccatccagccaattccccgatcgcgaacaagaacccggacaatccgaaaaagaccaccaccctgtcctacgacgtctacaaggacaaacgcttcagcgaagaccagtacgaattacacatcccaattgcgattaataagtgcccaaagaatatcttcaaaattaatacagaggtcagggtgctgctcaaacacgacgacaatccgtatgtcatcggcattgccaggggcgagcgcaatctgctctatatcgtggtcgtggatgggaagggcaatattgtggagcagtactccctgaacgagattatcaacaacttcaatgggattaggattaagaccgactatcacagcctgctcgacaagaaagaaaaagagaggtttgaggcccgccaaaactggacctccattgagaatatcaaagaattaaaggccggctatatttcccaagtcgtccacaagatctgcgagctggtggagaaatatgacgccgtgattgcgctcgaagacttaaattctgggttcaagaactcccgcgtgaaggtggaaaaacaggtgtatcagaaattcgagaaaatgctgatcgacaaactcaattatatggtggataagaagtccaacccgtgtgccacagggggcgcgctgaagggctatcagatcaccaacaagttcgagagcttcaagagcatgagcacccagaacgggtttattttctacatcccggcgtggctcacctccaagattgacccgagcaccggcttcgtgaacctcctgaagacaaagtatacctccattgccgacagcaagaagtttatctcctccttcgaccgcattatgtatgtgccggaggaggacctcttcgagttcgccctcgactacaaaaacttcagccgcacagatgcggattacatcaagaagtggaagctgtactcctacgggaacaggatccgcatcttcaggaatccaaaaaaaaataacgtctttgactgggaggaagtgtgcctgacatccgcctacaaggaactgttcaataaatacggcatcaattaccagcagggcgacattcgcgccctcctctgtgagcagtccgacaaagcgttttactccagcttcatggccctcatgtccctgatgctccaaatgaggaatagcatcacagggcgcaccgacgtcgacttcctcatcagcccggtgaagaactccgacgggatcttttacgactcccgcaactatgaggcgcaagagaatgcgatcctcccgaagaacgccgatgcgaacggggcctataatatcgccaggaaagtgctctgggccatcgggcagttcaaaaaggcggaggatgagaagctcgacaaggtgaaaattgccatttccaacaaggagtggctggagtacgcgcagacctccgtgaagcacggctcctctggcagctccggctctagcggctcctctggcagctccggctccaagctggagaagtttacaaactgttacagcctctccaaaaccctcaggtttaaagcgatcccggtgggcaagacccaggagaacatcgacaacaagaggctcctggtggaagacgagaagcgcgccgaagactacaagggcgtgaagaagctgctcgataggtactacctcagctttattaacgacgtgctgcacagcatcaaactcaagaatctcaacaactacatctccctcttccgcaaaaagacccgcaccgagaaggagaacaaggagctggagaacctggagatcaacctccgcaaggaaatcgccaaagcgttcaagggcaatgaagggtacaagagcctcttcaagaaagacatcatcgaaactatcctcccagagtttctcgatgacaaggacgagatcgcgctggtgaactcctttaacgggttcacaaccgcgtttaccggcttctttgataacagggaaaatatgttctccgaggaggccaagtccaccagcatcgccttcaggtgtatcaacgagaacctcacccgctacatttccaatatggacattttcgagaaggtggatgcgatcttcgataagcacgaggtgcaggagatcaaagagaagattctcaattccgattatgacgtcgaggatttcttcgaaggggagttctttaattttgtgctcacacaagagggcattgacgtgtacaacgcgattatcgggggcttcgtcacagagtccggggagaagattaaggggctgaatgagtacatcaatctgtacaatcagaagaccaagcagaaactgccgaaattcaagccgctctacaagcaagtcctgtccgatagggaaagcctctccttctacggcgagggctataccagcgacgaggaggtgctggaagtcttccgcaacacactgaataagaatagcgagattttctcctccatcaagaagctcgagaagctctttaagaactttgacgagtacagctccgccgggattttcgtgaagaacgggccggcgatcagcaccatctccaaggacatctttggcgagtggaacgtcatcagggacaagtggaacgccgagtacgacgacatccacctgaagaagaaggcggtggtgaccgagaagtatgaggacgatcgcaggaagtccttcaaaaaaatcggctccttcagcctcgaacagctccaggagtatgccgatgcggatctgtccgtcgtcgagaagctgaaggaaatcatcattcagaaggtcgacgagatctataaagtgtacgggtccagcgagaagctgttcgacgccgactttgtgctcgagaagtccctcaaaaagaatgacgccgtggtggccattatgaaagacctgctcgactccgtgaagtccttcgaaaattacattaaagcgttctttggggaggggaaggaaactaacagggatgagtccttctatggcgactttgtcctcgcgtacgacatcctgctgaaggtcgaccacatttacgacgcgatccgcaactacgtgacacagaagccgtactcctctggtggttcttctggtggttctagcggcagcgagactcccgggacctcagagtccgccacacccgaaagttctggtggttcttctggtggttctgaggcctcccccgcatcaggacctagacacctgatggatccccatattttcacatctaacttcaacaacggaatcggcagacacaagacctacctgtgctatgaggtggaaaggctggataacggaacctctgtgaagatggaccagcacaggtaagtatcaaggttacaagacaggtttaaggagaccaatagaaactgggcttgtcgagacagagaagactcttgcgtttctgataggcacctattggtcttactgacatccactttgcctttctctccacaggggcttcctgcataaccaggccaagaatctgctgtgcggtttctacgggagacatgcagaactgaggtttctggatctggtgccatccctgcagctggaccccgctcagatctacagagtgacttggttcatctcttggagcccttgcttttcatggggatgtgctggcgaggtgagggccttccttcaggaaaacacacacgtgagactgaggatttttgctgccagaatctacgattatgacccactgtacaaggaagctctgcagatgctgagggatgcaggcgctcaggtgagcattatgacctatgacgaattcaagcactgctgggatacttttgtggaccatcagggttgtccttttcagccatgggatgggctggacgagcattctcaggcactgagcggtagactgagggctatcctgcagaaccaggggaattctggcggctcaaaaagaaccgccgacggcagcgaattcgagcccaagaagaagaggaaagtcggaagcggagctactaacttcagcctgctgaagcaggctggagacgtggaggagaaccctggacctatggtgagcaagggcgaggagctgttcaccggggtggtgcccatcctggtcgagctggacggcgacgtaaacggccacaagttcagcgtgtccggcgagggcgagggcgatgccacctacggcaagctgaccctgaagttcatctgcaccaccggcaagctgcccgtgccctggcccaccctcgtgaccaccctgacctatggagtgcagtgcttcagccgctaccccgaccacatgaagcagcacgacttcttcaagtccgccatgcccgaaggctacgtccaggagcgcaccatcttcttcaaggacgacggcaactacaagacccgcgccgaggtgaagttcgagggcgacaccctggtgaaccgcatcgagctgaagggcatcgacttcaaggaggacggcaacatcctggggcacaagctggagtacaactacaacagccacaacgtctatatcatggccgacaagcagaagaacggcatcaaggtgaacttcaagatccgccacaacatcgaggacggcagcgtgcagctcgccgaccactaccagcagaacacccccatcggcgacggccccgtgctgctgcccgacaaccactacctgagcacccagtccgccctgagcaaagaccccaacgagaagcgcgatcacatggtcctgctggagttcgtgaccgccgccgggatcactctcggcatggacgagctgtacaagtctggtggttctcccaagaagaagaggaaagtctaaccggtcatcatcaccatcaccattgagtttaaacccgctgatcagcctcgactgtgccttctagttgccagccatctgttgtttgcccctcccccgtgccttccttgaccctggaaggtgccactcccactgtcctttcctaataaaatgaggaaattgcatcgcattgtctgagtaggtgtcattctattctggggggtggggtggggcaggacagcaagggggaggattgggaagacaatagcaggcatgctggggatgcggtgggctctatggcttctgaggcgaaaagaaccagctggggctcgataccgtcgacctctagctagagcttggcgtaatcatggtcatagctgtttcctgtgtgaaattgttatccgctcacaattccacacaacatacgagccggaagcataaagtgtaaagcctagggtgcctaatgagtgagctaactcacattaattgcgttgcgctcactgcccgctttccagtcgggaaacctgtcgtgccagctgcattaatgaatcggccaacgcgcgggaagaggcggtttgcgtattgggcgctcttccgcttcctcgctcactgactcgctgcgctcggtcgttcggctgcggcgagcggtatcagctcactcaaaggcggtaatacggttatccacagaatcaggggataacgcaggaaagaacatgtgagcaaaaggccagcaaaaggccaggaaccgtaaaaaggccgcgttgctggcgtttttccataggctccgcccccctgacgagcatcacaaaaatcgacgctcaagtcagaggtggcgaaacccgacaggactataaagataccaggcgtttccccctggaagctccctcgtgcgctctcctgttccgaccctgccgcttaccggatacctgtccgcctttctcccttcgggaagcgtggcgctttctcatagctcacgctgtaggtatctcagttcggtgtaggtcgttcgctccaagctgggctgtgtgcacgaaccccccgttcagcccgaccgctgcgccttatccggtaactatcgtcttgagtccaacccggtaagacacgacttatcgccactggcagcagccactggtaacaggattagcagagcgaggtatgtaggcggtgctacagagttcttgaagtggtggcctaactacggctacactagaagaacagtatttggtatctgcgctctgctgaagccagttaccttcggaaaaagagttggtagctcttgatccggcaaacaaaccaccgctggtagcggtggtttttttgtttgcaagcagcagattacgcgcagaaaaaaaggatctcaagaagatcctttgatcttttctacggggtctgacactcagtggaacgaaaactcacgttaagggattttggtcatgagattatcaaaaaggatcttcacctagatccttttaaattaaaaatgaagttttaaatcaatctaaagtatatatgagtaaacttggtctgacagttaccaatgcttaatcagtgaggcacctatctcagcgatctgtctatttcgttcatccatagttgcctgactccccgtcgtgtagataactacgatacgggagggcttaccatctggccccagtgctgcaatgataccgcgagacccacgctcaccggctccagatttatcagcaataaaccagccagccggaagggccgagcgcagaagtggtcctgcaactttatccgcctccatccagtctattaattgttgccgggaagctagagtaagtagttcgccagttaatagtttgcgcaacgttgttgccattgctacaggcatcgtggtgtcacgctcgtcgtttggtatggcttcattcagctccggttcccaacgatcaaggcgagttacatgatcccccatgttgtgcaaaaaagcggttagctccttcggtcctccgatcgttgtcagaagtaagttggccgcagtgttatcactcatggttatggcagcactgcataattctcttactgtcatgccatccgtaagatgcttttctgtgactggtgagtactcaaccaagtcattctgagaatagtgtatgcggcgaccgagttgctcttgcccggcgtcaatacgggataataccgcgccacatagcagaactttaaaagtgctcatcattggaaaacgttcttcggggcgaaaactctcaaggatcttaccgctgttgagatccagttcgatgtaacccactcgtgcacccaactgatcttcagcatcttttactttcaccagcgtttctgggtgagcaaaaacaggaaggcaaaatgccgcaaaaaagggaataagggcgacacggaaatgttgaatactcatactcttcctttttcaatattattgaagcatttatcagggttattgtctcatgagcggatacatatttgaatgtatttagaaaaataaacaaataggggttccgcgcacatttccccgaaaagtgccacctgacgtcgacggatcgggagatcgatctcccgatcccctagggtcgactctcagtacaatctgctctgatgccgcatagttaagccagtatctgctccctgcttgtgtgttggaggtcgctgagtagtgcgcgagcaaaatttaagctacaacaaggcaaggcttgaccgacaattgcatgaagaatctgcttagggttaggcgttttgcgctgcttcgcgatgtacgggcc

SEQ ID NO: 484 - DNA, 9169 bp, synthetic construct
  source 1..9169: mol_type = other DNA
agatatacgcgttgacattgattattgactagttattaatagtaatcaattacggggtcattagttcatagcccatatatggagttccgcgttacataacttacggtaaatggcccgcctggctgaccgcccaacgacccccgcccattgacgtcaataatgacgtatgttcccatagtaacgccaatagggactttccattgacgtcaatgggtggagtatttacggtaaactgcccacttggcagtacatcaagtgtatcatatgccaagtacgccccctattgacgtcaatgacggtaaatggcccgcctggcattatgcccagtacatgaccttatgggactttcctacttggcagtacatctacgtattagtcatcgctattaccatggtgatgcggttttggcagtacatcaatgggcgtggatagcggtttgactcacggggatttccaagtctccaccccattgacgtcaatgggagtttgttttggcaccaaaatcaacgggactttccaaaatgtcgtaacaactccgccccattgacgcaaatgggcggtaggcgtgtacggtgggaggtctatataagcagagctggtttagtgaaccgtcagatccgctagagatccgcggccgctaatacgactcactatagggagagccgccaccatgaaacggacagccgacggaagcgagttcgagtcaccaaagaagaagcggaaagtcaccaacctcagcgacattatcgagaaggaaaccggcaagcaactcgtgatccaggagagcatactgatgctccccgaggaggtcgaggaggtgattggcaataagcccgagtccgatatactggttcatactgcgtatgacgaaagcacagacgagaacgtcatgctacttaccagcgacgccccggagtacaagccctgggccctagtcatccaagacagcaacggtgagaacaagatcaagatgctttcaggcggaagtggtggaagtggcggtagtaagtccctcaaaaagaatgacgccgtggtggccattatgaaagacctgctcgactccgtgaagtccttcgaaaattacattaaagcgttctttggggaggggaaggaaactaacagggatgagtccttctatggcgactttgtcctcgcgtacgacatcctgctgaaggtcgaccacatttacgacgcgatccgcaactacgtgacacagaagccgtactccaaagacaagttcaagctgtacttccagaacccgcaatttatggggggctgggacaaggataaagagacagactaccgcgcgacaattctccgctatggctccaaatactatctggccatcatggacaagaagtacgcgaagtgcctgcagaagatcgacaaagacgacgtcaatggcaactatgaaaagatcaactacaagctgctgccgggcccgaacaagatgctcccgaaggtgttcttcagcaagaagtggatggcctactacaatccaagcgaggatattcagaaaatctataaaaacgggaccttcaagaagggggacatgtttaacctcaacgactgccacaagctcattgatttcttcaaggatagcatttcccgctacccgaaatggtccaatgcgtacgattttaacttctccgagacagaaaagtacaaagacatcgcgggcttttacagggaggtggaggagcaagggtataaagtttcttttgaatccgcgagcaagaaggaagtcgacaagctcgtcgaggagggcaagctctacatgttccaaatttataacaaggacttttccgacaagagccatgggaccccaaacctccacaccatgtacttcaaactgctctttgacgagaacaaccacgggcaaatcaggctgagcggcggcgccgaattattcatgcgcagggcctccctcaagaaggaagagctggtcgtccatccagccaattccccgatcgcgaacaagaacccggacaatccgaaaaagaccaccaccctgtcctacgacgtctacaaggacaaacgcttcagcgaagaccagtacgaattacacatcccaattgcgattaataagtgcccaaagaatatcttcaaaattaatacagaggtcagggtgctgctcaaacacgacgacaatccgtatgtcatcggcattgccaggggcgagcgcaatctgctctatatcgtggtcgtggatgggaagggcaatattgtggagcagtactccctgaacgagattatcaacaacttcaatgggattaggattaagaccgactatcacagcctgctcgacaagaaagaaaaagagaggtttgaggcccgccaaaactggacctccattgagaatatcaaagaattaaaggccggctatatttcccaagtcgtccacaagatctgcgagctggtggagaaatatgacgccgtgattgcgctcgaagacttaaattctgggttcaagaactcccgcgtgaaggtggaaaaacaggtgtatcagaaattcgagaaaatgctgatcgacaaactcaattatatggtggataagaagtccaacccgtgtgccacagggggcgcgctgaagggctatcagatcaccaacaagttcgagagcttcaagagcatgagcacccagaacgggtttattttctacatcccggcgtggctcacctccaagattgacccgagcaccggcttcgtgaacctcctgaagacaaagtatacctccattgccgacagcaagaagtttatctcctccttcgaccgcattatgtatgtgccggaggaggacctcttcgagttcgccctcgactacaaaaacttcagccgcacagatgcggattacatcaagaagtggaagctgtactcctacgggaacaggatccgcatcttcaggaatccaaaaaaaaataacgtctttgactgggaggaagtgtgcctgacatccgcctacaaggaactgttcaataaatacggcatcaattaccagcagggcgacattcgcgccctcctctgtgagcagtccgacaaagcgttttactccagcttcatggccctcatgtccctgatgctccaaatgaggaatagcatcacagggcgcaccgacgtcgacttcctcatcagcccggtgaagaactccgacgggatcttttacgactcccgcaactatgaggcgcaagagaatgcgatcctcccgaagaacgccgatgcgaacggggcctataatatcgccaggaaagtgctctgggccatcgggcagttcaaaaaggcggaggatgagaagctcgacaaggtgaaaattgccatttccaacaaggagtggctggagtacgcgcagacctccgtgaagcacggctcctctggcagctccggctctagcggctcctctggcagctccggctccaagctggagaagtttacaaactgttacagcctctccaaaaccctcaggtttaaagcgatcccggtgggcaagacccaggagaacatcgacaacaagaggctcctggtggaagacgagaagcgcgccgaagactacaagggcgtgaagaagctgctcgataggtactacctcagctttattaacgacgtgctgcacagcatcaaactcaagaatctcaacaactacatctccctcttccgcaaaaagacccgcaccgagaaggagaacaaggagctggagaacctggagatcaacctccgcaaggaaatcgccaaagcgttcaagggcaatgaagggtacaagagcctcttcaagaaagacatcatcgaaactatcctcccagagtttctcgatgacaaggacgagatcgcgctggtgaactcctttaacgggttcacaaccgcgtttaccggcttctttgataacagggaaaatatgttctccgaggaggccaagtccaccagcatcgccttcaggtgtatcaacgagaacctcacccgctacatttccaatatggacattttcgagaaggtggatgcgatcttcgataagcacgaggtgcaggagatcaaagagaagattctcaattccgattatgacgtcgaggatttcttcgaaggggagttctttaattttgtgctcacacaagagggcattgacgtgtacaacgcgattatcgggggcttcgtcacagagtccggggagaagattaaggggctgaatgagtacatcaatctgtacaatcagaagaccaagcagaaactgccgaaattcaagccgctctacaagcaagtcctgtccgatagggaaagcctctccttctacggcgagggctataccagcgacgaggaggtgctggaagtcttccgcaacacactgaataagaatagcgagattttctcctccatcaagaagctcgagaagctctttaagaactttgacgagtacagctccgccgggattttcgtgaagaacgggccggcgatcagcaccatctccaaggacatctttggcgagtggaacgtcatcagggacaagtggaacgccgagtacgacgacatccacctgaagaagaaggcggtggtgaccgagaagtatgaggacgatcgcaggaagtccttcaaaaaaatcggctccttcagcctcgaacagctccaggagtatgccgatgcggatctgtccgtcgtcgagaagctgaaggaaatcatcattcagaaggtcgacgagatctataaagtgtacgggtccagcgagaagctgttcgacgccgactttgtgctcgagtctggtggttcttctggtggttctagcggcagcgagactcccgggacctcagagtccgccacacccgaaagttctggtggttcttctggtggttctgaggcctcccccgcatcaggacctagacacctgatggatccccatattttcacatctaacttcaacaacggaatcggcagacacaagacctacctgtgctatgaggtggaaaggctggataacggaacctctgtgaagatggaccagcacaggtaagtatcaaggttacaagacaggtttaaggagaccaatagaaactgggcttgtcgagacagagaagactcttgcgtttctgataggcacctattggtcttactgacatccactttgcctttctctccacaggggcttcctgcataaccaggccaagaatctgctgtgcggtttctacgggagacatgcagaactgaggtttctggatctggtgccatccctgcagctggaccccgctcagatctacagagtgacttggttcatctcttggagcccttgcttttcatggggatgtgctggcgaggtgagggccttccttcaggaaaacacacacgtgagactgaggatttttgctgccagaatctacgattatgacccactgtacaaggaagctctgcagatgctgagggatgcaggcgctcaggtgagcattatgacctatgacgaattcaagcactgctgggatacttttgtggaccatcagggttgtccttttcagccatgggatgggctggacgagcattctcaggcactgagcggtagactgagggctatcctgcagaaccaggggaattctggcggctcaaaaagaaccgccgacggcagcgaattcgagcccaagaagaagaggaaagtcggaagcggagctactaacttcagcctgctgaagcaggctggagacgtggaggagaaccctggacctatggtgagcaagggcgaggagctgttcaccggggtggtgcccatcctggtcgagctggacggcgacgtaaacggccacaagttcagcgtgtccggcgagggcgagggcgatgccacctacggcaagctgaccctgaagttcatctgcaccaccggcaagctgcccgtgccctggcccaccctcgtgaccaccctgacctatggagtgcagtgcttcagccgctaccccgaccacatgaagcagcacgacttcttcaagtccgccatgcccgaaggctacgtccaggagcgcaccatcttcttcaaggacgacggcaactacaagacccgcgccgaggtgaagttcgagggcgacaccctggtgaaccgcatcgagctgaagggcatcgacttcaaggaggacggcaacatcctggggcacaagctggagtacaactacaacagccacaacgtctatatcatggccgacaagcagaagaacggcatcaaggtgaacttcaagatccgccacaacatcgaggacggcagcgtgcagctcgccgaccactaccagcagaacacccccatcggcgacggccccgtgctgctgcccgacaaccactacctgagcacccagtccgccctgagcaaagaccccaacgagaagcgcgatcacatggtcctgctggagttcgtgaccgccgccgggatcactctcggcatggacgagctgtacaagtctggtggttctcccaagaagaagaggaaagtctaaccggtcatcatcaccatcaccattgagtttaaacccgctgatcagcctcgactgtgccttctagttgccagccatctgttgtttgcccctcccccgtgccttccttgaccctggaaggtgccactcccactgtcctttcctaataaaatgaggaaattgcatcgcattgtctgagtaggtgtcattctattctggggggtggggtggggcaggacagcaagggggaggattgggaagacaatagcaggcatgctggggatgcggtgggctctatggcttctgaggcgaaaagaaccagctggggctcgataccgtcgacctctagctagagcttggcgtaatcatggtcatagctgtttcctgtgtgaaattgttatccgctcacaattccacacaacatacgagccggaagcataaagtgtaaagcctagggtgcctaatgagtgagctaactcacattaattgcgttgcgctcactgcccgctttccagtcgggaaacctgtcgtgccagctgcattaatgaatcggccaacgcgcgggaagaggcggtttgcgtattgggcgctcttccgcttcctcgctcactgactcgctgcgctcggtcgttcggctgcggcgagcggtatcagctcactcaaaggcggtaatacggttatccacagaatcaggggataacgcaggaaagaacatgtgagcaaaaggccagcaaaaggccaggaaccgtaaaaaggccgcgttgctggcgtttttccataggctccgcccccctgacgagcatcacaaaaatcgacgctcaagtcagaggtggcgaaacccgacaggactataaagataccaggcgtttccccctggaagctccctcgtgcgctctcctgttccgaccctgccgcttaccggatacctgtccgcctttctcccttcgggaagcgtggcgctttctcatagctcacgctgtaggtatctcagttcggtgtaggtcgttcgctccaagctgggctgtgtgcacgaaccccccgttcagcccgaccgctgcgccttatccggtaactatcgtcttgagtccaacccggtaagacacgacttatcgccactggcagcagccactggtaacaggattagcagagcgaggtatgtaggcggtgctacagagttcttgaagtggtggcctaactacggctacactagaagaacagtatttggtatctgcgctctgctgaagccagttaccttcggaaaaagagttggtagctcttgatccggcaaacaaaccaccgctggtagcggtggtttttttgtttgcaagcagcagattacgcgcagaaaaaaaggatctcaagaagatcctttgatcttttctacggggtctgacactcagtggaacgaaaactcacgttaagggattttggtcatgagattatcaaaaaggatcttcacctagatccttttaaattaaaaatgaagttttaaatcaatctaaagtatatatgagtaaacttggtctgacagttaccaatgcttaatcagtgaggcacctatctcagcgatctgtctatttcgttcatccatagttgcctgactccccgtcgtgtagataactacgatacgggagggcttaccatctggccccagtgctgcaatgataccgcgagacccacgctcaccggctccagatttatcagcaataaaccagccagccggaagggccgagcgcagaagtggtcctgcaactttatccgcctccatccagtctattaattgttgccgggaagctagagtaagtagttcgccagttaatagtttgcgcaacgttgttgccattgctacaggcatcgtggtgtcacgctcgtcgtttggtatggcttcattcagctccggttcccaacgatcaaggcgagttacatgatcccccatgttgtgcaaaaaagcggttagctccttcggtcctccgatcgttgtcagaagtaagttggccgcagtgttatcactcatggttatggcagcactgcataattctcttactgtcatgccatccgtaagatgcttttctgtgactggtgagtactcaaccaagtcattctgagaatagtgtatgcggcgaccgagttgctcttgcccggcgtcaatacgggataataccgcgccacatagcagaactttaaaagtgctcatcattggaaaacgttcttcggggcgaaaactctcaaggatcttaccgctgttgagatccagttcgatgtaacccactcgtgcacccaactgatcttcagcatcttttactttcaccagcgtttctgggtgagcaaaaacaggaaggcaaaatgccgcaaaaaagggaataagggcgacacggaaatgttgaatactcatactcttcctttttcaatattattgaagcatttatcagggttattgtctcatgagcggatacatatttgaatgtatttagaaaaataaacaaataggggttccgcgcacatttccccgaaaagtgccacctgacgtcgacggatcgggagatcgatctcccgatcccctagggtcgactctcagtacaatctgctctgatgccgcatagttaagccagtatctgctccctgcttgtgtgttggaggtcgctgagtagtgcgcgagcaaaatttaagctacaacaaggcaaggcttgaccgacaattgcatgaagaatctgcttagggttaggcgttttgcgctgcttcgcgatgtacgggcc

SEQ ID NO: 485 - DNA, 9169 bp, synthetic construct
  source 1..9169: mol_type = other DNA
agatatacgcgttgacattgattattgactagttattaatagtaatcaattacggggtcattagttcatagcccatatatggagttccgcgttacataacttacggtaaatggcccgcctggctgaccgcccaacgacccccgcccattgacgtcaataatgacgtatgttcccatagtaacgccaatagggactttccattgacgtcaatgggtggagtatttacggtaaactgcccacttggcagtacatcaagtgtatcatatgccaagtacgccccctattgacgtcaatgacggtaaatggcccgcctggcattatgcccagtacatgaccttatgggactttcctacttggcagtacatctacgtattagtcatcgctattaccatggtgatgcggttttggcagtacatcaatgggcgtggatagcggtttgactcacggggatttccaagtctccaccccattgacgtcaatgggagtttgttttggcaccaaaatcaacgggactttccaaaatgtcgtaacaactccgccccattgacgcaaatgggcggtaggcgtgtacggtgggaggtctatataagcagagctggtttagtgaaccgtcagatccgctagagatccgcggccgctaatacgactcactatagggagagccgccaccatgaaacggacagccgacggaagcgagttcgagtcaccaaagaagaagcggaaagtcaccaacctcagcgacattatcgagaaggaaaccggcaagcaactcgtgatccaggagagcatactgatgctccccgaggaggtcgaggaggtgattggcaataagcccgagtccgatatactggttcatactgcgtatgacgaaagcacagacgagaacgtcatgctacttaccagcgacgccccggagtacaagccctgggccctagtcatccaagacagcaacggtgagaacaagatcaagatgctttcaggcggaagtggtggaagtggcggtagttccgacaaagcgttttactccagcttcatggccctcatgtccctgatgctccaaatgaggaatagcatcacagggcgcaccgacgtcgacttcctcatcagcccggtgaagaactccgacgggatcttttacgactcccgcaactatgaggcgcaagagaatgcgatcctcccgaagaacgccgatgcgaacggggcctataatatcgccaggaaagtgctctgggccatcgggcagttcaaaaaggcggaggatgagaagctcgacaaggtgaaaattgccatttccaacaaggagtggctggagtacgcgcagacctccgtgaagcacggctcctctggcagctccggctctagcggctcctctggcagctccggctccaagctggagaagtttacaaactgttacagcctctccaaaaccctcaggtttaaagcgatcccggtgggcaagacccaggagaacatcgacaacaagaggctcctggtggaagacgagaagcgcgccgaagactacaagggcgtgaagaagctgctcgataggtactacctcagctttattaacgacgtgctgcacagcatcaaactcaagaatctcaacaactacatctccctcttccgcaaaaagacccgcaccgagaaggagaacaaggagctggagaacctggagatcaacctccgcaaggaaatcgccaaagcgttcaagggcaatgaagggtacaagagcctcttcaagaaagacatcatcgaaactatcctcccagagtttctcgatgacaaggacgagatcgcgctggtgaactcctttaacgggttcacaaccgcgtttaccggcttctttgataacagggaaaatatgttctccgaggaggccaagtccaccagcatcgccttcaggtgtatcaacgagaacctcacccgctacatttccaatatggacattttcgagaaggtggatgcgatcttcgataagcacgaggtgcaggagatcaaagagaagattctcaattccgattatgacgtcgaggatttcttcgaaggggagttctttaattttgtgctcacacaagagggcattgacgtgtacaacgcgattatcgggggcttcgtcacagagtccggggagaagattaaggggctgaatgagtacatcaatctgtacaatcagaagaccaagcagaaactgccgaaattcaagccgctctacaagcaagtcctgtccgatagggaaagcctctccttctacggcgagggctataccagcgacgaggaggtgctggaagtcttccgcaacacactgaataagaatagcgagattttctcctccatcaagaagctcgagaagctctttaagaactttgacgagtacagctccgccgggattttcgtgaagaacgggccggcgatcagcaccatctccaaggacatctttggcgagtggaacgtcatcagggacaagtggaacgccgagtacgacgacatccacctgaagaagaaggcggtggtgaccgagaagtatgaggacgatcgcaggaagtccttcaaaaaaatcggctccttcagcctcgaacagctccaggagtatgccgatgcggatctgtccgtcgtcgagaagctgaaggaaatcatcattcagaaggtcgacgagatctataaagtgtacgggtccagcgagaagctgttcgacgccgactttgtgctcgagaagtccctcaaaaagaatgacgccgtggtggccattatgaaagacctgctcgactccgtgaagtccttcgaaaattacattaaagcgttctttggggaggggaaggaaactaacagggatgagtccttctatggcgactttgtcctcgcgtacgacatcctgctgaaggtcgaccacatttacgacgcgatccgcaactacgtgacacagaagccgtactccaaagacaagttcaagctgtacttccagaacccgcaatttatggggggctgggacaaggataaagagacagactaccgcgcgacaattctccgctatggctccaaatactatctggccatcatggacaagaagtacgcgaagtgcctgcagaagatcgacaaagacgacgtcaatggcaactatgaaaagatcaactacaagctgctgccgggcccgaacaagatgctcccgaaggtgttcttcagcaagaagtggatggcctactacaatccaagcgaggatattcagaaaatctataaaaacgggaccttcaagaagggggacatgtttaacctcaacgactgccacaagctcattgatttcttcaaggatagcatttcccgctacccgaaatggtccaatgcgtacgattttaacttctccgagacagaaaagtacaaagacatcgcgggcttttacagggaggtggaggagcaagggtataaagtttcttttgaatccgcgagcaagaaggaagtcgacaagctcgtcgaggagggcaagctctacatgttccaaatttataacaaggacttttccgacaagagccatgggaccccaaacctccacaccatgtacttcaaactgctctttgacgagaacaaccacgggcaaatcaggctgagcggcggcgccgaattattcatgcgcagggcctccctcaagaaggaagagctggtcgtccatccagccaattccccgatcgcgaacaagaacccggacaatccgaaaaagaccaccaccctgtcctacgacgtctacaaggacaaacgcttcagcgaagaccagtacgaattacacatcccaattgcgattaataagtgcccaaagaatatcttcaaaattaatacagaggtcagggtgctgctcaaacacgacgacaatccgtatgtcatcggcattgccaggggcgagcgcaatctgctctatatcgtggtcgtggatgggaagggcaatattgtggagcagtactccctgaacgagattatcaacaacttcaatgggattaggattaagaccgactatcacagcctgctcgacaagaaagaaaaagagaggtttgaggcccgccaaaactggacctccattgagaatatcaaagaattaaaggccggctatatttcccaagtcgtccacaagatctgcgagctggtggagaaatatgacgccgtgattgcgctcgaagacttaaattctgggttcaagaactcccgcgtgaaggtggaaaaacaggtgtatcagaaattcgagaaaatgctgatcgacaaactcaattatatggtggataagaagtccaacccgtgtgccacagggggcgcgctgaagggctatcagatcaccaacaagttcgagagcttcaagagcatgagcacccagaacgggtttattttctacatcccggcgtggctcacctccaagattgacccgagcaccggcttcgtgaacctcctgaagacaaagtatacctccattgccgacagcaagaagtttatctcctccttcgaccgcattatgtatgtgccggaggaggacctcttcgagttcgccctcgactacaaaaacttcagccgcacagatgcggattacatcaagaagtggaagctgtactcctacgggaacaggatccgcatcttcaggaatccaaaaaaaaataacgtctttgactgggaggaagtgtgcctgacatccgcctacaaggaactgttcaataaatacggcatcaattaccagcagggcgacattcgcgccctcctctgtgagcagtctggtggttcttctggtggttctagcggcagcgagactcccgggacctcagagtccgccacacccgaaagttctggtggttcttctggtggttctgaggcctcccccgcatcaggacctagacacctgatggatccccatattttcacatctaacttcaacaacggaatcggcagacacaagacctacctgtgctatgaggtggaaaggctggataacggaacctctgtgaagatggaccagcacaggtaagtatcaaggttacaagacaggtttaaggagaccaatagaaactgggcttgtcgagacagagaagactcttgcgtttctgataggcacctattggtcttactgacatccactttgcctttctctccacaggggcttcctgcataaccaggccaagaatctgctgtgcggtttctacgggagacatgcagaactgaggtttctggatctggtgccatccctgcagctggaccccgctcagatctacagagtgacttggttcatctcttggagcccttgcttttcatggggatgtgctggcgaggtgagggccttccttcaggaaaacacacacgtgagactgaggatttttgctgccagaatctacgattatgacccactgtacaaggaagctctgcagatgctgagggatgcaggcgctcaggtgagcattatgacctatgacgaattcaagcactgctgggatacttttgtggaccatcagggttgtccttttcagccatgggatgggctggacgagcattctcaggcactgagcggtagactgagggctatcctgcagaaccaggggaattctggcggctcaaaaagaaccgccgacggcagcgaattcgagcccaagaagaagaggaaagtcggaagcggagctactaacttcagcctgctgaagcaggctggagacgtggaggagaaccctggacctatggtgagcaagggcgaggagctgttcaccggggtggtgcccatcctggtcgagctggacggcgacgtaaacggccacaagttcagcgtgtccggcgagggcgagggcgatgccacctacggcaagctgaccctgaagttcatctgcaccaccggcaagctgcccgtgccctggcccaccctcgtgaccaccctgacctatggagtgcagtgcttcagccgctaccccgaccacatgaagcagcacgacttcttcaagtccgccatgcccgaaggctacgtccaggagcgcaccatcttcttcaaggacgacggcaactacaagacccgcgccgaggtgaagttcgagggcgacaccctggtgaaccgcatcgagctgaagggcatcgacttcaaggaggacggcaacatcctggggcacaagctggagtacaactacaacagccacaacgtctatatcatggccgacaagcagaagaacggcatcaaggtgaacttcaagatccgccacaacatcgaggacggcagcgtgcagctcgccgaccactaccagcagaacacccccatcggcgacggccccgtgctgctgcccgacaaccactacctgagcacccagtccgccctgagcaaagaccccaacgagaagcgcgatcacatggtcctgctggagttcgtgaccgccgccgggatcactctcggcatggacgagctgtacaagtctggtggttctcccaagaagaagaggaaagtctaaccggtcatcatcaccatcaccattgagtttaaacccgctgatcagcctcgactgtgccttctagttgccagccatctgttgtttgcccctcccccgtgccttccttgaccctggaaggtgccactcccactgtcctttcctaataaaatgaggaaattgcatcgcattgtctgagtaggtgtcattctattctggggggtggggtggggcaggacagcaagggggaggattgggaagacaatagcaggcatgctggggatgcggtgggctctatggcttctgaggcgaaaagaaccagctggggctcgataccgtcgacctctagctagagcttggcgtaatcatggtcatagctgtttcctgtgtgaaattgttatccgctcacaattccacacaacatacgagccggaagcataaagtgtaaagcctagggtgcctaatgagtgagctaactcacattaattgcgttgcgctcactgcccgctttccagtcgggaaacctgtcgtgccagctgcattaatgaatcggccaacgcgcgggaagaggcggtttgcgtattgggcgctcttccgcttcctcgctcactgactcgctgcgctcggtcgttcggctgcggcgagcggtatcagctcactcaaaggcggtaatacggttatccacagaatcaggggataacgcaggaaagaacatgtgagcaaaaggccagcaaaaggccaggaaccgtaaaaaggccgcgttgctggcgtttttccataggctccgcccccctgacgagcatcacaaaaatcgacgctcaagtcagaggtggcgaaacccgacaggactataaagataccaggcgtttccccctggaagctccctcgtgcgctctcctgttccgaccctgccgcttaccggatacctgtccgcctttctcccttcgggaagcgtggcgctttctcatagctcacgctgtaggtatctcagttcggtgtaggtcgttcgctccaagctgggctgtgtgcacgaaccccccgttcagcccgaccgctgcgccttatccggtaactatcgtcttgagtccaacccggtaagacacgacttatcgccactggcagcagccactggtaacaggattagcagagcgaggtatgtaggcggtgctacagagttcttgaagtggtggcctaactacggctacactagaagaacagtatttggtatctgcgctctgctgaagccagttaccttcggaaaaagagttggtagctcttgatccggcaaacaaaccaccgctggtagcggtggtttttttgtttgcaagcagcagattacgcgcagaaaaaaaggatctcaagaagatcctttgatcttttctacggggtctgacactcagtggaacgaaaactcacgttaagggattttggtcatgagattatcaaaaaggatcttcacctagatccttttaaattaaaaatgaagttttaaatcaatctaaagtatatatgagtaaacttggtctgacagttaccaatgcttaatcagtgaggcacctatctcagcgatctgtctatttcgttcatccatagttgcctgactccccgtcgtgtagataactacgatacgggagggcttaccatctggccccagtgctgcaatgataccgcgagacccacgctcaccggctccagatttatcagcaataaaccagccagccggaagggccgagcgcagaagtggtcctgcaactttatccgcctccatccagtctattaattgttgccgggaagctagagtaagtagttcgccagttaatagtttgcgcaacgttgttgccattgctacaggcatcgtggtgtcacgctcgtcgtttggtatggcttcattcagctccggttcccaacgatcaaggcgagttacatgatcccccatgttgtgcaaaaaagcggttagctccttcggtcctccgatcgttgtcagaagtaagttggccgcagtgttatcactcatggttatggcagcactgcataattctcttactgtcatgccatccgtaagatgcttttctgtgactggtgagtactcaaccaagtcattctgagaatagtgtatgcggcgaccgagttgctcttgcccggcgtcaatacgggataataccgcgccacatagcagaactttaaaagtgctcatcattggaaaacgttcttcggggcgaaaactctcaaggatcttaccgctgttgagatccagttcgatgtaacccactcgtgcacccaactgatcttcagcatcttttactttcaccagcgtttctgggtgagcaaaaacaggaaggcaaaatgccgcaaaaaagggaataagggcgacacggaaatgttgaatactcatactcttcctttttcaatattattgaagcatttatcagggttattgtctcatgagcggatacatatttgaatgtatttagaaaaataaacaaataggggttccgcgcacatttccccgaaaagtgccacctgacgtcgacggatcgggagatcgatctcccgatcccctagggtcgactctcagtacaatctgctctgatgccgcatagttaagccagtatctgctccctgcttgtgtgttggaggtcgctgagtagtgcgcgagcaaaatttaagctacaacaaggcaaggcttgaccgacaattgcatgaagaatctgcttagggttaggcgttttgcgctgcttcgcgatgtacgggcc

SEQ ID NO: 486 - protein, 1441 aa, synthetic construct
SEVEFSHEYWMRHALTLAKRARDEREVPVGAVLVLNNRVIGEGWNRAIGLHDPTAHAEIMALRQGGLVMQNYRLIDATLYVTFEPCVMCAGAMIHSRIGRVVFGVRNSKRGAAGSLMNVLNYPGMNHRVEITEGILADECAALLCDFYRMPRQVFNAQKKAQSSINSGGSSGGSSGSETPGTSESATPESSGGSSGGSRTEKENKELENLEINLRKEIAKAFKGNEGYKSLFKKDIIETILPEFLDDKDEIALVNSFNGFTTAFTGFFDNRENMFSEEAKSTSIAFRCINENLTRYISNMDIFEKVDAIFDKHEVQEIKEKILNSDYDVEDFFEGEFFNFVLTQEGIDVYNAIIGGFVTESGEKIKGLNEYINLYNQKTKQKLPKFKPLYKQVLSDRESLSFYGEGYTSDEEVLEVFRNTLNKNSEIFSSIKKLEKLFKNFDEYSSAGIFVKNGPAISTISKDIFGEWNVIRDKWNAEYDDIHLKKKAVVTEKYEDDRRKSFKKIGSFSLEQLQEYADADLSVVEKLKEIIIQKVDEIYKVYGSSEKLFDADFVLEKSLKKNDAVVAIMKDLLDSVKSFENYIKAFFGEGKETNRDESFYGDFVLAYDILLKVDHIYDAIRNYVTQKPYSKDKFKLYFQNPQFMGGWDKDKETDYRATILRYGSKYYLAIMDKKYAKCLQKIDKDDVNGNYEKINYKLLPGPNKMLPKVFFSKKWMAYYNPSEDIQKIYKNGTFKKGDMFNLNDCHKLIDFFKDSISRYPKWSNAYDFNFSETEKYKDIAGFYREVEEQGYKVSFESASKKEVDKLVEEGKLYMFQIYNKDFSDKSHGTPNLHTMYFKLLFDENNHGQIRLSGGAELFMRRASLKKEELVVHPANSPIANKNPDNPKKTTTLSYDVYKDKRFSEDQYELHIPIAINKCPKNIFKINTEVRVLLKHDDNPYVIGIARGERNLLYIVVVDGKGNIVEQYSLNEIINNFNGIRIKTDYHSLLDKKEKERFEARQNWTSIENIKELKAGYISQVVHKICELVEKYDAVIALEDLNSGFKNSRVKVEKQVYQKFEKMLIDKLNYMVDKKSNPCATGGALKGYQITNKFESFKSMSTQNGFIFYIPAWLTSKIDPSTGFVNLLKTKYTSIADSKKFISSFDRIMYVPEEDLFEFALDYKNFSRTDADYIKKWKLYSYGNRIRIFRNPKKNNVFDWEEVCLTSAYKELFNKYGINYQQGDIRALLCEQSDKAFYSSFMALMSLMLQMRNSITGRTDVDFLISPVKNSDGIFYDSRNYEAQENAILPKNADANGAYNIARKVLWAIGQFKKAEDEKLDKVKIAISNKEWLEYAQTSVKHGSSGSSGSSGSSGSSGSKLEKFTNCYSLSKTLRFKAIPVGKTQENIDNKRLLVEDEKRAEDYKGVKKLLDRYYLSFINDVLHSIKLKNLNNYISLFRKKT

SEQ ID NO: 487 - protein, 1441 aa, synthetic construct
SEVEFSHEYWMRHALTLAKRARDEREVPVGAVLVLNNRVIGEGWNRAIGLHDPTAHAEIMALRQGGLVMQNYRLIDATLYVTFEPCVMCAGAMIHSRIGRVVFGVRNSKRGAAGSLMNVLNYPGMNHRVEITEGILADECAALLCDFYRMPRQVFNAQKKAQSSINSGGSSGGSSGSETPGTSESATPESSGGSSGGSGYTSDEEVLEVFRNTLNKNSEIFSSIKKLEKLFKNFDEYSSAGIFVKNGPAISTISKDIFGEWNVIRDKWNAEYDDIHLKKKAVVTEKYEDDRRKSFKKIGSFSLEQLQEYADADLSVVEKLKEIIIQKVDEIYKVYGSSEKLFDADFVLEKSLKKNDAVVAIMKDLLDSVKSFENYIKAFFGEGKETNRDESFYGDFVLAYDILLKVDHIYDAIRNYVTQKPYSKDKFKLYFQNPQFMGGWDKDKETDYRATILRYGSKYYLAIMDKKYAKCLQKIDKDDVNGNYEKINYKLLPGPNKMLPKVFFSKKWMAYYNPSEDIQKIYKNGTFKKGDMFNLNDCHKLIDFFKDSISRYPKWSNAYDFNFSETEKYKDIAGFYREVEEQGYKVSFESASKKEVDKLVEEGKLYMFQIYNKDFSDKSHGTPNLHTMYFKLLFDENNHGQIRLSGGAELFMRRASLKKEELVVHPANSPIANKNPDNPKKTTTLSYDVYKDKRFSEDQYELHIPIAINKCPKNIFKINTEVRVLLKHDDNPYVIGIARGERNLLYIVVVDGKGNIVEQYSLNEIINNFNGIRIKTDYHSLLDKKEKERFEARQNWTSIENIKELKAGYISQVVHKICELVEKYDAVIALEDLNSGFKNSRVKVEKQVYQKFEKMLIDKLNYMVDKKSNPCATGGALKGYQITNKFESFKSMSTQNGFIFYIPAWLTSKIDPSTGFVNLLKTKYTSIADSKKFISSFDRIMYVPEEDLFEFALDYKNFSRTDADYIKKWKLYSYGNRIRIFRNPKKNNVFDWEEVCLTSAYKELFNKYGINYQQGDIRALLCEQSDKAFYSSFMALMSLMLQMRNSITGRTDVDFLISPVKNSDGIFYDSRNYEAQENAILPKNADANGAYNIARKVLWAIGQFKKAEDEKLDKVKIAISNKEWLEYAQTSVKHGSSGSSGSSGSSGSSGSKLEKFTNCYSLSKTLRFKAIPVGKTQENIDNKRLLVEDEKRAEDYKGVKKLLDRYYLSFINDVLHSIKLKNLNNYISLFRKKTRTEKENKELENLEINLRKEIAKAFKGNEGYKSLFKKDIIETILPEFLDDKDEIALVNSFNGFTTAFTGFFDNRENMFSEEAKSTSIAFRCINENLTRYISNMDIFEKVDAIFDKHEVQEIKEKILNSDYDVEDFFEGEFFNFVLTQEGIDVYNAIIGGFVTESGEKIKGLNEYINLYNQKTKQKLPKFKPLYKQVLSDRESLSFYGE

SEQ ID NO: 488 - protein, 1441 aa, synthetic construct
SEVEFSHEYWMRHALTLAKRARDEREVPVGAVLVLNNRVIGEGWNRAIGLHDPTAHAEIMALRQGGLVMQNYRLIDATLYVTFEPCVMCAGAMIHSRIGRVVFGVRNSKRGAAGSLMNVLNYPGMNHRVEITEGILADECAALLCDFYRMPRQVFNAQKKAQSSINSGGSSGGSSGSETPGTSESATPESSGGSSGGSSDGIFYDSRNYEAQENAILPKNADANGAYNIARKVLWAIGQFKKAEDEKLDKVKIAISNKEWLEYAQTSVKHGSSGSSGSSGSSGSSGSKLEKFTNCYSLSKTLRFKAIPVGKTQENIDNKRLLVEDEKRAEDYKGVKKLLDRYYLSFINDVLHSIKLKNLNNYISLFRKKTRTEKENKELENLEINLRKEIAKAFKGNEGYKSLFKKDIIETILPEFLDDKDEIALVNSFNGFTTAFTGFFDNRENMFSEEAKSTSIAFRCINENLTRYISNMDIFEKVDAIFDKHEVQEIKEKILNSDYDVEDFFEGEFFNFVLTQEGIDVYNAIIGGFVTESGEKIKGLNEYINLYNQKTKQKLPKFKPLYKQVLSDRESLSFYGEGYTSDEEVLEVFRNTLNKNSEIFSSIKKLEKLFKNFDEYSSAGIFVKNGPAISTISKDIFGEWNVIRDKWNAEYDDIHLKKKAVVTEKYEDDRRKSFKKIGSFSLEQLQEYADADLSVVEKLKEIIIQKVDEIYKVYGSSEKLFDADFVLEKSLKKNDAVVAIMKDLLDSVKSFENYIKAFFGEGKETNRDESFYGDFVLAYDILLKVDHIYDAIRNYVTQKPYSKDKFKLYFQNPQFMGGWDKDKETDYRATILRYGSKYYLAIMDKKYAKCLQKIDKDDVNGNYEKINYKLLPGPNKMLPKVFFSKKWMAYYNPSEDIQKIYKNGTFKKGDMFNLNDCHKLIDFFKDSISRYPKWSNAYDFNFSETEKYKDIAGFYREVEEQGYKVSFESASKKEVDKLVEEGKLYMFQIYNKDFSDKSHGTPNLHTMYFKLLFDENNHGQIRLSGGAELFMRRASLKKEELVVHPANSPIANKNPDNPKKTTTLSYDVYKDKRFSEDQYELHIPIAINKCPKNIFKINTEVRVLLKHDDNPYVIGIARGERNLLYIVVVDGKGNIVEQYSLNEIINNFNGIRIKTDYHSLLDKKEKERFEARQNWTSIENIKELKAGYISQVVHKICELVEKYDAVIALEDLNSGFKNSRVKVEKQVYQKFEKMLIDKLNYMVDKKSNPCATGGALKGYQITNKFESFKSMSTQNGFIFYIPAWLTSKIDPSTGFVNLLKTKYTSIADSKKFISSFDRIMYVPEEDLFEFALDYKNFSRTDADYIKKWKLYSYGNRIRIFRNPKKNNVFDWEEVCLTSAYKELFNKYGINYQQGDIRALLCEQSDKAFYSSFMALMSLMLQMRNSITGRTDVDFLISPVKN

SEQ ID NO: 489 - protein, 1441 aa, synthetic construct
SEVEFSHEYWMRHALTLAKRARDEREVPVGAVLVLNNRVIGEGWNRAIGLHDPTAHAEIMALRQGGLVMQNYRLIDATLYVTFEPCVMCAGAMIHSRIGRVVFGVRNSKRGAAGSLMNVLNYPGMNHRVEITEGILADECAALLCDFYRMPRQVFNAQKKAQSSINSGGSSGGSSGSETPGTSESATPESSGGSSGGSKDKFKLYFQNPQFMGGWDKDKETDYRATILRYGSKYYLAIMDKKYAKCLQKIDKDDVNGNYEKINYKLLPGPNKMLPKVFFSKKWMAYYNPSEDIQKIYKNGTFKKGDMFNLNDCHKLIDFFKDSISRYPKWSNAYDFNFSETEKYKDIAGFYREVEEQGYKVSFESASKKEVDKLVEEGKLYMFQIYNKDFSDKSHGTPNLHTMYFKLLFDENNHGQIRLSGGAELFMRRASLKKEELVVHPANSPIANKNPDNPKKTTTLSYDVYKDKRFSEDQYELHIPIAINKCPKNIFKINTEVRVLLKHDDNPYVIGIARGERNLLYIVVVDGKGNIVEQYSLNEIINNFNGIRIKTDYHSLLDKKEKERFEARQNWTSIENIKELKAGYISQVVHKICELVEKYDAVIALEDLNSGFKNSRVKVEKQVYQKFEKMLIDKLNYMVDKKSNPCATGGALKGYQITNKFESFKSMSTQNGFIFYIPAWLTSKIDPSTGFVNLLKTKYTSIADSKKFISSFDRIMYVPEEDLFEFALDYKNFSRTDADYIKKWKLYSYGNRIRIFRNPKKNNVFDWEEVCLTSAYKELFNKYGINYQQGDIRALLCEQSDKAFYSSFMALMSLMLQMRNSITGRTDVDFLISPVKNSDGIFYDSRNYEAQENAILPKNADANGAYNIARKVLWAIGQFKKAEDEKLDKVKIAISNKEWLEYAQTSVKHGSSGSSGSSGSSGSSGSKLEKFTNCYSLSKTLRFKAIPVGKTQENIDNKRLLVEDEKRAEDYKGVKKLLDRYYLSFINDVLHSIKLKNLNNYISLFRKKTRTEKENKELENLEINLRKEIAKAFKGNEGYKSLFKKDIIETILPEFLDDKDEIALVNSFNGFTTAFTGFFDNRENMFSEEAKSTSIAFRCINENLTRYISNMDIFEKVDAIFDKHEVQEIKEKILNSDYDVEDFFEGEFFNFVLTQEGIDVYNAIIGGFVTESGEKIKGLNEYINLYNQKTKQKLPKFKPLYKQVLSDRESLSFYGEGYTSDEEVLEVFRNTLNKNSEIFSSIKKLEKLFKNFDEYSSAGIFVKNGPAISTISKDIFGEWNVIRDKWNAEYDDIHLKKKAVVTEKYEDDRRKSFKKIGSFSLEQLQEYADADLSVVEKLKEIIIQKVDEIYKVYGSSEKLFDADFVLEKSLKKNDAVVAIMKDLLDSVKSFENYIKAFFGEGKETNRDESFYGDFVLAYDILLKVDHIYDAIRNYVTQKPYS

SEQ ID NO: 490 - protein, 1441 aa, synthetic construct
SEVEFSHEYWMRHALTLAKRARDEREVPVGAVLVLNNRVIGEGWNRAIGLHDPTAHAEIMALRQGGLVMQNYRLIDATLYVTFEPCVMCAGAMIHSRIGRVVFGVRNSKRGAAGSLMNVLNYPGMNHRVEITEGILADECAALLCDFYRMPRQVFNAQKKAQSSINSGGSSGGSSGSETPGTSESATPESSGGSSGGSKSLKKNDAVVAIMKDLLDSVKSFENYIKAFFGEGKETNRDESFYGDFVLAYDILLKVDHIYDAIRNYVTQKPYSKDKFKLYFQNPQFMGGWDKDKETDYRATILRYGSKYYLAIMDKKYAKCLQKIDKDDVNGNYEKINYKLLPGPNKMLPKVFFSKKWMAYYNPSEDIQKIYKNGTFKKGDMFNLNDCHKLIDFFKDSISRYPKWSNAYDFNFSETEKYKDIAGFYREVEEQGYKVSFESASKKEVDKLVEEGKLYMFQIYNKDFSDKSHGTPNLHTMYFKLLFDENNHGQIRLSGGAELFMRRASLKKEELVVHPANSPIANKNPDNPKKTTTLSYDVYKDKRFSEDQYELHIPIAINKCPKNIFKINTEVRVLLKHDDNPYVIGIARGERNLLYIVVVDGKGNIVEQYSLNEIINNFNGIRIKTDYHSLLDKKEKERFEARQNWTSIENIKELKAGYISQVVHKICELVEKYDAVIALEDLNSGFKNSRVKVEKQVYQKFEKMLIDKLNYMVDKKSNPCATGGALKGYQITNKFESFKSMSTQNGFIFYIPAWLTSKIDPSTGFVNLLKTKYTSIADSKKFISSFDRIMYVPEEDLFEFALDYKNFSRTDADYIKKWKLYSYGNRIRIFRNPKKNNVFDWEEVCLTSAYKELFNKYGINYQQGDIRALLCEQSDKAFYSSFMALMSLMLQMRNSITGRTDVDFLISPVKNSDGIFYDSRNYEAQENAILPKNADANGAYNIARKVLWAIGQFKKAEDEKLDKVKIAISNKEWLEYAQTSVKHGSSGSSGSSGSSGSSGSKLEKFTNCYSLSKTLRFKAIPVGKTQENIDNKRLLVEDEKRAEDYKGVKKLLDRYYLSFINDVLHSIKLKNLNNYISLFRKKTRTEKENKELENLEINLRKEIAKAFKGNEGYKSLFKKDIIETILPEFLDDKDEIALVNSFNGFTTAFTGFFDNRENMFSEEAKSTSIAFRCINENLTRYISNMDIFEKVDAIFDKHEVQEIKEKILNSDYDVEDFFEGEFFNFVLTQEGIDVYNAIIGGFVTESGEKIKGLNEYINLYNQKTKQKLPKFKPLYKQVLSDRESLSFYGEGYTSDEEVLEVFRNTLNKNSEIFSSIKKLEKLFKNFDEYSSAGIFVKNGPAISTISKDIFGEWNVIRDKWNAEYDDIHLKKKAVVTEKYEDDRRKSFKKIGSFSLEQLQEYADADLSVVEKLKEIIIQKVDEIYKVYGSSEKLFDADFVLE

SEQ ID NO: 491 - protein, 1441 aa, synthetic construct
SEVEFSHEYWMRHALTLAKRARDEREVPVGAVLVLNNRVIGEGWNRAIGLHDPTAHAEIMALRQGGLVMQNYRLIDATLYVTFEPCVMCAGAMIHSRIGRVVFGVRNSKRGAAGSLMNVLNYPGMNHRVEITEGILADECAALLCDFYRMPRQVFNAQKKAQSSINSGGSSGGSSGSETPGTSESATPESSGGSSGGSSDKAFYSSFMALMSLMLQMRNSITGRTDVDFLISPVKNSDGIFYDSRNYEAQENAILPKNADANGAYNIARKVLWAIGQFKKAEDEKLDKVKIAISNKEWLEYAQTSVKHGSSGSSGSSGSSGSSGSKLEKFTNCYSLSKTLRFKAIPVGKTQENIDNKRLLVEDEKRAEDYKGVKKLLDRYYLSFINDVLHSIKLKNLNNYISLFRKKTRTEKENKELENLEINLRKEIAKAFKGNEGYKSLFKKDIIETILPEFLDDKDEIALVNSFNGFTTAFTGFFDNRENMFSEEAKSTSIAFRCINENLTRYISNMDIFEKVDAIFDKHEVQEIKEKILNSDYDVEDFFEGEFFNFVLTQEGIDVYNAIIGGFVTESGEKIKGLNEYINLYNQKTKQKLPKFKPLYKQVLSDRESLSFYGEGYTSDEEVLEVFRNTLNKNSEIFSSIKKLEKLFKNFDEYSSAGIFVKNGPAISTISKDIFGEWNVIRDKWNAEYDDIHLKKKAVVTEKYEDDRRKSFKKIGSFSLEQLQEYADADLSVVEKLKEIIIQKVDEIYKVYGSSEKLFDADFVLEKSLKKNDAVVAIMKDLLDSVKSFENYIKAFFGEGKETNRDESFYGDFVLAYDILLKVDHIYDAIRNYVTQKPYSKDKFKLYFQNPQFMGGWDKDKETDYRATILRYGSKYYLAIMDKKYAKCLQKIDKDDVNGNYEKINYKLLPGPNKMLPKVFFSKKWMAYYNPSEDIQKIYKNGTFKKGDMFNLNDCHKLIDFFKDSISRYPKWSNAYDFNFSETEKYKDIAGFYREVEEQGYKVSFESASKKEVDKLVEEGKLYMFQIYNKDFSDKSHGTPNLHTMYFKLLFDENNHGQIRLSGGAELFMRRASLKKEELVVHPANSPIANKNPDNPKKTTTLSYDVYKDKRFSEDQYELHIPIAINKCPKNIFKINTEVRVLLKHDDNPYVIGIARGERNLLYIVVVDGKGNIVEQYSLNEIINNFNGIRIKTDYHSLLDKKEKERFEARQNWTSIENIKELKAGYISQVVHKICELVEKYDAVIALEDLNSGFKNSRVKVEKQVYQKFEKMLIDKLNYMVDKKSNPCATGGALKGYQITNKFESFKSMSTQNGFIFYIPAWLTSKIDPSTGFVNLLKTKYTSIADSKKFISSFDRIMYVPEEDLFEFALDYKNFSRTDADYIKKWKLYSYGNRIRIFRNPKKNNVFDWEEVCLTSAYKELFNKYGINYQQGDIRALLCEQ

SEQ ID NO: 492 - protein, 1441 aa, synthetic construct
RTEKENKELENLEINLRKEIAKAFKGNEGYKSLFKKDIIETILPEFLDDKDEIALVNSFNGFTTAFTGFFDNRENMFSEEAKSTSIAFRCINENLTRYISNMDIFEKVDAIFDKHEVQEIKEKILNSDYDVEDFFEGEFFNFVLTQEGIDVYNAIIGGFVTESGEKIKGLNEYINLYNQKTKQKLPKFKPLYKQVLSDRESLSFYGEGYTSDEEVLEVFRNTLNKNSEIFSSIKKLEKLFKNFDEYSSAGIFVKNGPAISTISKDIFGEWNVIRDKWNAEYDDIHLKKKAVVTEKYEDDRRKSFKKIGSFSLEQLQEYADADLSVVEKLKEIIIQKVDEIYKVYGSSEKLFDADFVLEKSLKKNDAVVAIMKDLLDSVKSFENYIKAFFGEGKETNRDESFYGDFVLAYDILLKVDHIYDAIRNYVTQKPYSKDKFKLYFQNPQFMGGWDKDKETDYRATILRYGSKYYLAIMDKKYAKCLQKIDKDDVNGNYEKINYKLLPGPNKMLPKVFFSKKWMAYYNPSEDIQKIYKNGTFKKGDMFNLNDCHKLIDFFKDSISRYPKWSNAYDFNFSETEKYKDIAGFYREVEEQGYKVSFESASKKEVDKLVEEGKLYMFQIYNKDFSDKSHGTPNLHTMYFKLLFDENNHGQIRLSGGAELFMRRASLKKEELVVHPANSPIANKNPDNPKKTTTLSYDVYKDKRFSEDQYELHIPIAINKCPKNIFKINTEVRVLLKHDDNPYVIGIARGERNLLYIVVVDGKGNIVEQYSLNEIINNFNGIRIKTDYHSLLDKKEKERFEARQNWTSIENIKELKAGYISQVVHKICELVEKYDAVIALEDLNSGFKNSRVKVEKQVYQKFEKMLIDKLNYMVDKKSNPCATGGALKGYQITNKFESFKSMSTQNGFIFYIPAWLTSKIDPSTGFVNLLKTKYTSIADSKKFISSFDRIMYVPEEDLFEFALDYKNFSRTDADYIKKWKLYSYGNRIRIFRNPKKNNVFDWEEVCLTSAYKELFNKYGINYQQGDIRALLCEQSDKAFYSSFMALMSLMLQMRNSITGRTDVDFLISPVKNSDGIFYDSRNYEAQENAILPKNADANGAYNIARKVLWAIGQFKKAEDEKLDKVKIAISNKEWLEYAQTSVKHGSSGSSGSSGSSGSSGSKLEKFTNCYSLSKTLRFKAIPVGKTQENIDNKRLLVEDEKRAEDYKGVKKLLDRYYLSFINDVLHSIKLKNLNNYISLFRKKTSGGSSGGSSGSETPGTSESATPESSGGSSGGSSEVEFSHEYWMRHALTLAKRARDEREVPVGAVLVLNNRVIGEGWNRAIGLHDPTAHAEIMALRQGGLVMQNYRLIDATLYVTFEPCVMCAGAMIHSRIGRVVFGVRNSKRGAAGSLMNVLNYPGMNHRVEITEGILADECAALLCDFYRMPRQVFNAQKKAQSSIN

SEQ ID NO: 493 - protein, 1441 aa, synthetic construct
GYTSDEEVLEVFRNTLNKNSEIFSSIKKLEKLFKNFDEYSSAGIFVKNGPAISTISKDIFGEWNVIRDKWNAEYDDIHLKKKAVVTEKYEDDRRKSFKKIGSFSLEQLQEYADADLSVVEKLKEIIIQKVDEIYKVYGSSEKLFDADFVLEKSLKKNDAVVAIMKDLLDSVKSFENYIKAFFGEGKETNRDESFYGDFVLAYDILLKVDHIYDAIRNYVTQKPYSKDKFKLYFQNPQFMGGWDKDKETDYRATILRYGSKYYLAIMDKKYAKCLQKIDKDDVNGNYEKINYKLLPGPNKMLPKVFFSKKWMAYYNPSEDIQKIYKNGTFKKGDMFNLNDCHKLIDFFKDSISRYPKWSNAYDFNFSETEKYKDIAGFYREVEEQGYKVSFESASKKEVDKLVEEGKLYMFQIYNKDFSDKSHGTPNLHTMYFKLLFDENNHGQIRLSGGAELFMRRASLKKEELVVHPANSPIANKNPDNPKKTTTLSYDVYKDKRFSEDQYELHIPIAINKCPKNIFKINTEVRVLLKHDDNPYVIGIARGERNLLYIVVVDGKGNIVEQYSLNEIINNFNGIRIKTDYHSLLDKKEKERFEARQNWTSIENIKELKAGYISQVVHKICELVEKYDAVIALEDLNSGFKNSRVKVEKQVYQKFEKMLIDKLNYMVDKKSNPCATGGALKGYQITNKFESFKSMSTQNGFIFYIPAWLTSKIDPSTGFVNLLKTKYTSIADSKKFISSFDRIMYVPEEDLFEFALDYKNFSRTDADYIKKWKLYSYGNRIRIFRNPKKNNVFDWEEVCLTSAYKELFNKYGINYQQGDIRALLCEQSDKAFYSSFMALMSLMLQMRNSITGRTDVDFLISPVKNSDGIFYDSRNYEAQENAILPKNADANGAYNIARKVLWAIGQFKKAEDEKLDKVKIAISNKEWLEYAQTSVKHGSSGSSGSSGSSGSSGSKLEKFTNCYSLSKTLRFKAIPVGKTQENIDNKRLLVEDEKRAEDYKGVKKLLDRYYLSFINDVLHSIKLKNLNNYISLFRKKTRTEKENKELENLEINLRKEIAKAFKGNEGYKSLFKKDIIETILPEFLDDKDEIALVNSFNGFTTAFTGFFDNRENMFSEEAKSTSIAFRCINENLTRYISNMDIFEKVDAIFDKHEVQEIKEKILNSDYDVEDFFEGEFFNFVLTQEGIDVYNAIIGGFVTESGEKIKGLNEYINLYNQKTKQKLPKFKPLYKQVLSDRESLSFYGESGGSSGGSSGSETPGTSESATPESSGGSSGGSSEVEFSHEYWMRHALTLAKRARDEREVPVGAVLVLNNRVIGEGWNRAIGLHDPTAHAEIMALRQGGLVMQNYRLIDATLYVTFEPCVMCAGAMIHSRIGRVVFGVRNSKRGAAGSLMNVLNYPGMNHRVEITEGILADECAALLCDFYRMPRQVFNAQKKAQSSIN

SEQ ID NO: 494 - protein, 1441 aa, synthetic construct
SDGIFYDSRNYEAQENAILPKNADANGAYNIARKVLWAIGQFKKAEDEKLDKVKIAISNKEWLEYAQTSVKHGSSGSSGSSGSSGSSGSKLEKFTNCYSLSKTLRFKAIPVGKTQENIDNKRLLVEDEKRAEDYKGVKKLLDRYYLSFINDVLHSIKLKNLNNYISLFRKKTRTEKENKELENLEINLRKEIAKAFKGNEGYKSLFKKDIIETILPEFLDDKDEIALVNSFNGFTTAFTGFFDNRENMFSEEAKSTSIAFRCINENLTRYISNMDIFEKVDAIFDKHEVQEIKEKILNSDYDVEDFFEGEFFNFVLTQEGIDVYNAIIGGFVTESGEKIKGLNEYINLYNQKTKQKLPKFKPLYKQVLSDRESLSFYGEGYTSDEEVLEVFRNTLNKNSEIFSSIKKLEKLFKNFDEYSSAGIFVKNGPAISTISKDIFGEWNVIRDKWNAEYDDIHLKKKAVVTEKYEDDRRKSFKKIGSFSLEQLQEYADADLSVVEKLKEIIIQKVDEIYKVYGSSEKLFDADFVLEKSLKKNDAVVAIMKDLLDSVKSFENYIKAFFGEGKETNRDESFYGDFVLAYDILLKVDHIYDAIRNYVTQKPYSKDKFKLYFQNPQFMGGWDKDKETDYRATILRYGSKYYLAIMDKKYAKCLQKIDKDDVNGNYEKINYKLLPGPNKMLPKVFFSKKWMAYYNPSEDIQKIYKNGTFKKGDMFNLNDCHKLIDFFKDSISRYPKWSNAYDFNFSETEKYKDIAGFYREVEEQGYKVSFESASKKEVDKLVEEGKLYMFQIYNKDFSDKSHGTPNLHTMYFKLLFDENNHGQIRLSGGAELFMRRASLKKEELVVHPANSPIANKNPDNPKKTTTLSYDVYKDKRFSEDQYELHIPIAINKCPKNIFKINTEVRVLLKHDDNPYVIGIARGERNLLYIVVVDGKGNIVEQYSLNEIINNFNGIRIKTDYHSLLDKKEKERFEARQNWTSIENIKELKAGYISQVVHKICELVEKYDAVIALEDLNSGFKNSRVKVEKQVYQKFEKMLIDKLNYMVDKKSNPCATGGALKGYQITNKFESFKSMSTQNGFIFYIPAWLTSKIDPSTGFVNLLKTKYTSIADSKKFISSFDRIMYVPEEDLFEFALDYKNFSRTDADYIKKWKLYSYGNRIRIFRNPKKNNVFDWEEVCLTSAYKELFNKYGINYQQGDIRALLCEQSDKAFYSSFMALMSLMLQMRNSITGRTDVDFLISPVKNSGGSSGGSSGSETPGTSESATPESSGGSSGGSSEVEFSHEYWMRHALTLAKRARDEREVPVGAVLVLNNRVIGEGWNRAIGLHDPTAHAEIMALRQGGLVMQNYRLIDATLYVTFEPCVMCAGAMIHSRIGRVVFGVRNSKRGAAGSLMNVLNYPGMNHRVEITEGILADECAALLCDFYRMPRQVFNAQKKAQSSIN

SEQ ID NO: 495 - protein, 1441 aa, synthetic construct
KDKFKLYFQNPQFMGGWDKDKETDYRATILRYGSKYYLAIMDKKYAKCLQKIDKDDVNGNYEKINYKLLPGPNKMLPKVFFSKKWMAYYNPSEDIQKIYKNGTFKKGDMFNLNDCHKLIDFFKDSISRYPKWSNAYDFNFSETEKYKDIAGFYREVEEQGYKVSFESASKKEVDKLVEEGKLYMFQIYNKDFSDKSHGTPNLHTMYFKLLFDENNHGQIRLSGGAELFMRRASLKKEELVVHPANSPIANKNPDNPKKTTTLSYDVYKDKRFSEDQYELHIPIAINKCPKNIFKINTEVRVLLKHDDNPYVIGIARGERNLLYIVVVDGKGNIVEQYSLNEIINNFNGIRIKTDYHSLLDKKEKERFEARQNWTSIENIKELKAGYISQVVHKICELVEKYDAVIALEDLNSGFKNSRVKVEKQVYQKFEKMLIDKLNYMVDKKSNPCATGGALKGYQITNKFESFKSMSTQNGFIFYIPAWLTSKIDPSTGFVNLLKTKYTSIADSKKFISSFDRIMYVPEEDLFEFALDYKNFSRTDADYIKKWKLYSYGNRIRIFRNPKKNNVFDWEEVCLTSAYKELFNKYGINYQQGDIRALLCEQSDKAFYSSFMALMSLMLQMRNSITGRTDVDFLISPVKNSDGIFYDSRNYEAQENAILPKNADANGAYNIARKVLWAIGQFKKAEDEKLDKVKIAISNKEWLEYAQTSVKHGSSGSSGSSGSSGSSGSKLEKFTNCYSLSKTLRFKAIPVGKTQENIDNKRLLVEDEKRAEDYKGVKKLLDRYYLSFINDVLHSIKLKNLNNYISLFRKKTRTEKENKELENLEINLRKEIAKAFKGNEGYKSLFKKDIIETILPEFLDDKDEIALVNSFNGFTTAFTGFFDNRENMFSEEAKSTSIAFRCINENLTRYISNMDIFEKVDAIFDKHEVQEIKEKILNSDYDVEDFFEGEFFNFVLTQEGIDVYNAIIGGFVTESGEKIKGLNEYINLYNQKTKQKLPKFKPLYKQVLSDRESLSFYGEGYTSDEEVLEVFRNTLNKNSEIFSSIKKLEKLFKNFDEYSSAGIFVKNGPAISTISKDIFGEWNVIRDKWNAEYDDIHLKKKAVVTEKYEDDRRKSFKKIGSFSLEQLQEYADADLSVVEKLKEIIIQKVDEIYKVYGSSEKLFDADFVLEKSLKKNDAVVAIMKDLLDSVKSFENYIKAFFGEGKETNRDESFYGDFVLAYDILLKVDHIYDAIRNYVTQKPYSSGGSSGGSSGSETPGTSESATPESSGGSSGGSSEVEFSHEYWMRHALTLAKRARDEREVPVGAVLVLNNRVIGEGWNRAIGLHDPTAHAEIMALRQGGLVMQNYRLIDATLYVTFEPCVMCAGAMIHSRIGRVVFGVRNSKRGAAGSLMNVLNYPGMNHRVEITEGILADECAALLCDFYRMPRQVFNAQKKAQSSIN

SEQ ID NO: 496 - protein, 1441 aa, synthetic construct
KSLKKNDAVVAIMKDLLDSVKSFENYIKAFFGEGKETNRDESFYGDFVLAYDILLKVDHIYDAIRNYVTQKPYSKDKFKLYFQNPQFMGGWDKDKETDYRATILRYGSKYYLAIMDKKYAKCLQKIDKDDVNGNYEKINYKLLPGPNKMLPKVFFSKKWMAYYNPSEDIQKIYKNGTFKKGDMFNLNDCHKLIDFFKDSISRYPKWSNAYDFNFSETEKYKDIAGFYREVEEQGYKVSFESASKKEVDKLVEEGKLYMFQIYNKDFSDKSHGTPNLHTMYFKLLFDENNHGQIRLSGGAELFMRRASLKKEELVVHPANSPIANKNPDNPKKTTTLSYDVYKDKRFSEDQYELHIPIAINKCPKNIFKINTEVRVLLKHDDNPYVIGIARGERNLLYIVVVDGKGNIVEQYSLNEIINNFNGIRIKTDYHSLLDKKEKERFEARQNWTSIENIKELKAGYISQVVHKICELVEKYDAVIALEDLNSGFKNSRVKVEKQVYQKFEKMLIDKLNYMVDKKSNPCATGGALKGYQITNKFESFKSMSTQNGFIFYIPAWLTSKIDPSTGFVNLLKTKYTSIADSKKFISSFDRIMYVPEEDLFEFALDYKNFSRTDADYIKKWKLYSYGNRIRIFRNPKKNNVFDWEEVCLTSAYKELFNKYGINYQQGDIRALLCEQSDKAFYSSFMALMSLMLQMRNSITGRTDVDFLISPVKNSDGIFYDSRNYEAQENAILPKNADANGAYNIARKVLWAIGQFKKAEDEKLDKVKIAISNKEWLEYAQTSVKHGSSGSSGSSGSSGSSGSKLEKFTNCYSLSKTLRFKAIPVGKTQENIDNKRLLVEDEKRAEDYKGVKKLLDRYYLSFINDVLHSIKLKNLNNYISLFRKKTRTEKENKELENLEINLRKEIAKAFKGNEGYKSLFKKDIIETILPEFLDDKDEIALVNSFNGFTTAFTGFFDNRENMFSEEAKSTSIAFRCINENLTRYISNMDIFEKVDAIFDKHEVQEIKEKILNSDYDVEDFFEGEFFNFVLTQEGIDVYNAIIGGFVTESGEKIKGLNEYINLYNQKTKQKLPKFKPLYKQVLSDRESLSFYGEGYTSDEEVLEVFRNTLNKNSEIFSSIKKLEKLFKNFDEYSSAGIFVKNGPAISTISKDIFGEWNVIRDKWNAEYDDIHLKKKAVVTEKYEDDRRKSFKKIGSFSLEQLQEYADADLSVVEKLKEIIIQKVDEIYKVYGSSEKLFDADFVLESGGSSGGSSGSETPGTSESATPESSGGSSGGSSEVEFSHEYWMRHALTLAKRARDEREVPVGAVLVLNNRVIGEGWNRAIGLHDPTAHAEIMALRQGGLVMQNYRLIDATLYVTFEPCVMCAGAMIHSRIGRVVFGVRNSKRGAAGSLMNVLNYPGMNHRVEITEGILADECAALLCDFYRMPRQVFNAQKKAQSSIN

SEQ ID NO: 497 - protein, 1441 aa, synthetic construct
SDKAFYSSFMALMSLMLQMRNSITGRTDVDFLISPVKNSDGIFYDSRNYEAQENAILPKNADANGAYNIARKVLWAIGQFKKAEDEKLDKVKIAISNKEWLEYAQTSVKHGSSGSSGSSGSSGSSGSKLEKFTNCYSLSKTLRFKAIPVGKTQENIDNKRLLVEDEKRAEDYKGVKKLLDRYYLSFINDVLHSIKLKNLNNYISLFRKKTRTEKENKELENLEINLRKEIAKAFKGNEGYKSLFKKDIIETILPEFLDDKDEIALVNSFNGFTTAFTGFFDNRENMFSEEAKSTSIAFRCINENLTRYISNMDIFEKVDAIFDKHEVQEIKEKILNSDYDVEDFFEGEFFNFVLTQEGIDVYNAIIGGFVTESGEKIKGLNEYINLYNQKTKQKLPKFKPLYKQVLSDRESLSFYGEGYTSDEEVLEVFRNTLNKNSEIFSSIKKLEKLFKNFDEYSSAGIFVKNGPAISTISKDIFGEWNVIRDKWNAEYDDIHLKKKAVVTEKYEDDRRKSFKKIGSFSLEQLQEYADADLSVVEKLKEIIIQKVDEIYKVYGSSEKLFDADFVLEKSLKKNDAVVAIMKDLLDSVKSFENYIKAFFGEGKETNRDESFYGDFVLAYDILLKVDHIYDAIRNYVTQKPYSKDKFKLYFQNPQFMGGWDKDKETDYRATILRYGSKYYLAIMDKKYAKCLQKIDKDDVNGNYEKINYKLLPGPNKMLPKVFFSKKWMAYYNPSEDIQKIYKNGTFKKGDMFNLNDCHKLIDFFKDSISRYPKWSNAYDFNFSETEKYKDIAGFYREVEEQGYKVSFESASKKEVDKLVEEGKLYMFQIYNKDFSDKSHGTPNLHTMYFKLLFDENNHGQIRLSGGAELFMRRASLKKEELVVHPANSPIANKNPDNPKKTTTLSYDVYKDKRFSEDQYELHIPIAINKCPKNIFKINTEVRVLLKHDDNPYVIGIARGERNLLYIVVVDGKGNIVEQYSLNEIINNFNGIRIKTDYHSLLDKKEKERFEARQNWTSIENIKELKAGYISQVVHKICELVEKYDAVIALEDLNSGFKNSRVKVEKQVYQKFEKMLIDKLNYMVDKKSNPCATGGALKGYQITNKFESFKSMSTQNGFIFYIPAWLTSKIDPSTGFVNLLKTKYTSIADSKKFISSFDRIMYVPEEDLFEFALDYKNFSRTDADYIKKWKLYSYGNRIRIFRNPKKNNVFDWEEVCLTSAYKELFNKYGINYQQGDIRALLCEQSGGSSGGSSGSETPGTSESATPESSGGSSGGSSEVEFSHEYWMRHALTLAKRARDEREVPVGAVLVLNNRVIGEGWNRAIGLHDPTAHAEIMALRQGGLVMQNYRLIDATLYVTFEPCVMCAGAMIHSRIGRVVFGVRNSKRGAAGSLMNVLNYPGMNHRVEITEGILADECAALLCDFYRMPRQVFNAQKKAQSSIN

SEQ ID NO: 498 - protein, 1425 aa, synthetic construct
SEVEFSHEYWMRHALTLAKRARDEREVPVGAVLVLNNRVIGEGWNRAIGLHDPTAHAEIMALRQGGLVMQNYRLIDATLYVTFEPCVMCAGAMIHSRIGRVVFGVRNSKRGAAGSLMNVLNYPGMNHRVEITEGILADECAALLCDFYRMPRQVFNAQKKAQSSINSGGSSGGSSGSETPGTSESATPESSGGSSGGSSKLEKFTNCYSLSKTLRFKAIPVGKTQENIDNKRLLVEDEKRAEDYKGVKKLLDRYYLSFINDVLHSIKLKNLNNYISLFRKKTRTEKENKELENLEINLRKEIAKAFKGNEGYKSLFKKDIIETILPEFLDDKDEIALVNSFNGFTTAFTGFFDNRENMFSEEAKSTSIAFRCINENLTRYISNMDIFEKVDAIFDKHEVQEIKEKILNSDYDVEDFFEGEFFNFVLTQEGIDVYNAIIGGFVTESGEKIKGLNEYINLYNQKTKQKLPKFKPLYKQVLSDRESLSFYGEGYTSDEEVLEVFRNTLNKNSEIFSSIKKLEKLFKNFDEYSSAGIFVKNGPAISTISKDIFGEWNVIRDKWNAEYDDIHLKKKAVVTEKYEDDRRKSFKKIGSFSLEQLQEYADADLSVVEKLKEIIIQKVDEIYKVYGSSEKLFDADFVLEKSLKKNDAVVAIMKDLLDSVKSFENYIKAFFGEGKETNRDESFYGDFVLAYDILLKVDHIYDAIRNYVTQKPYSKDKFKLYFQNPQFMGGWDKDKETDYRATILRYGSKYYLAIMDKKYAKCLQKIDKDDVNGNYEKINYKLLPGPNKMLPKVFFSKKWMAYYNPSEDIQKIYKNGTFKKGDMFNLNDCHKLIDFFKDSISRYPKWSNAYDFNFSETEKYKDIAGFYREVEEQGYKVSFESASKKEVDKLVEEGKLYMFQIYNKDFSDKSHGTPNLHTMYFKLLFDENNHGQIRLSGGAELFMRRASLKKEELVVHPANSPIANKNPDNPKKTTTLSYDVYKDKRFSEDQYELHIPIAINKCPKNIFKINTEVRVLLKHDDNPYVIGIARGERNLLYIVVVDGKGNIVEQYSLNEIINNFNGIRIKTDYHSLLDKKEKERFEARQNWTSIENIKELKAGYISQVVHKICELVEKYDAVIALEDLNSGFKNSRVKVEKQVYQKFEKMLIDKLNYMVDKKSNPCATGGALKGYQITNKFESFKSMSTQNGFIFYIPAWLTSKIDPSTGFVNLLKTKYTSIADSKKFISSFDRIMYVPEEDLFEFALDYKNFSRTDADYIKKWKLYSYGNRIRIFRNPKKNNVFDWEEVCLTSAYKELFNKYGINYQQGDIRALLCEQSDKAFYSSFMALMSLMLQMRNSITGRTDVDFLISPVKNSDGIFYDSRNYEAQENAILPKNADANGAYNIARKVLWAIGQFKKAEDEKLDKVKIAISNKEWLEYAQTSVKH

SEQ ID NO: 499 - protein, 1425 aa, synthetic construct
SKLEKFTNCYSLSKTLRFKAIPVGKTQENIDNKRLLVEDEKRAEDYKGVKKLLDRYYLSFINDVLHSIKLKNLNNYISLFRKKTRTEKENKELENLEINLRKEIAKAFKGNEGYKSLFKKDIIETILPEFLDDKDEIALVNSFNGFTTAFTGFFDNRENMFSEEAKSTSIAFRCINENLTRYISNMDIFEKVDAIFDKHEVQEIKEKILNSDYDVEDFFEGEFFNFVLTQEGIDVYNAIIGGFVTESGEKIKGLNEYINLYNQKTKQKLPKFKPLYKQVLSDRESLSFYGEGYTSDEEVLEVFRNTLNKNSEIFSSIKKLEKLFKNFDEYSSAGIFVKNGPAISTISKDIFGEWNVIRDKWNAEYDDIHLKKKAVVTEKYEDDRRKSFKKIGSFSLEQLQEYADADLSVVEKLKEIIIQKVDEIYKVYGSSEKLFDADFVLEKSLKKNDAVVAIMKDLLDSVKSFENYIKAFFGEGKETNRDESFYGDFVLAYDILLKVDHIYDAIRNYVTQKPYSKDKFKLYFQNPQFMGGWDKDKETDYRATILRYGSKYYLAIMDKKYAKCLQKIDKDDVNGNYEKINYKLLPGPNKMLPKVFFSKKWMAYYNPSEDIQKIYKNGTFKKGDMFNLNDCHKLIDFFKDSISRYPKWSNAYDFNFSETEKYKDIAGFYREVEEQGYKVSFESASKKEVDKLVEEGKLYMFQIYNKDFSDKSHGTPNLHTMYFKLLFDENNHGQIRLSGGAELFMRRASLKKEELVVHPANSPIANKNPDNPKKTTTLSYDVYKDKRFSEDQYELHIPIAINKCPKNIFKINTEVRVLLKHDDNPYVIGIARGERNLLYIVVVDGKGNIVEQYSLNEIINNFNGIRIKTDYHSLLDKKEKERFEARQNWTSIENIKELKAGYISQVVHKICELVEKYDAVIALEDLNSGFKNSRVKVEKQVYQKFEKMLIDKLNYMVDKKSNPCATGGALKGYQITNKFESFKSMSTQNGFIFYIPAWLTSKIDPSTGFVNLLKTKYTSIADSKKFISSFDRIMYVPEEDLFEFALDYKNFSRTDADYIKKWKLYSYGNRIRIFRNPKKNNVFDWEEVCLTSAYKELFNKYGINYQQGDIRALLCEQSDKAFYSSFMALMSLMLQMRNSITGRTDVDFLISPVKNSDGIFYDSRNYEAQENAILPKNADANGAYNIARKVLWAIGQFKKAEDEKLDKVKIAISNKEWLEYAQTSVKHSGGSSGGSSGSETPGTSESATPESSGGSSGGSSEVEFSHEYWMRHALTLAKRARDEREVPVGAVLVLNNRVIGEGWNRAIGLHDPTAHAEIMALRQGGLVMQNYRLIDATLYVTFEPCVMCAGAMIHSRIGRVVFGVRNSKRGAAGSLMNVLNYPGMNHRVEITEGILADECAALLCDFYRMPRQVFNAQKKAQSSIN

SEQ ID NO: 500 - skipped

SEQ ID NO: 501 - protein, 1424 aa, synthetic construct
SEVEFSHEYWMRHALTLAKRARDEREVPVGAVLVLNNRVIGEGWNRAIGLHDPTAHAEIMALRQGGLVMQNYRLIDATLYVTFEPCVMCAGAMIHSRIGRVVFGVRNSKRGAAGSLMNVLNYPGMNHRVEITEGILADECAALLCDFYRMPRQVFNAQKKAQSSINSGGSSGGSSGSETPGTSESATPESSGGSSGGSSKLEKFTNCYSLSKTLRFKAIPVGKTQENIDNKRLLVEDEKRAEDYKGVKKLLDRYYLSFINDVLHSIKLKNLNNYISLFRKKTRTEKENKELENLEINLRKEIAKAFKGNEGYKSLFKKDIIETILPEFLDDKDEIALVNSFNGFTTAFTGFFDNRENMFSEEAKSTSIAFRCINENLTRYISNMDIFEKVDAIFDKHEVQEIKEKILNSDYDVEDFFEGEFFNFVLTQEGIDVYNAIIGGFVTESGEKIKGLNEYINLYNQKTKQKLPKFKPLYKQVLSDRESLSFYGEGYTSDEEVLEVFRNTLNKNSEIFSSIKKLEKLFKNFDEYSSAGIFVKNGPAISTISKDIFGEWNVIRDKWNAEYDDIHLKKKAVVTEKYEDDRRKSFKKIGSFSLEQLQEYADADLSVVEKLKEIIIQKVDEIYKVYGSSEKLFDADFVLEKSLKKNDAVVAIMKDLLDSVKSFENYIKAFFGEGKETNRDESFYGDFVLAYDILLKVDHIYDAIRNYVTQKPYSKDKFKLYFQNPQFMGGWDKDKETDYRATILRYGSKYYLAIMDKKYAKCLQKIDKDDVNGNYEKINYKLLPGPNKMLPKVFFSKKWMAYYNPSEDIQKIYKNGTFKKGDMFNLNDCHKLIDFFKDSISRYPKWSNAYDFNFSETEKYKDIAGFYREVEEQGYKVSFESASKKEVDKLVEEGKLYMFQIYNKDFSDKSHGTPNLHTMYFKLLFDENNHGQIRLSGGAELFMRRASLKKEELVVHPANSPIANKNPDNPKKTTTLSYDVYKDKRFSEDQYELHIPIAINKCPKNIFKINTEVRVLLKHDDNPYVIGIARGERNLLYIVVVDGKGNIVEQYSLNEIINNFNGIRIKTDYHSLLDKKEKERFEARQNWTSIENIKELKAGYISQVVHKICELVEKYDAVIALEDLNSGFKNSRVKVEKQVYQKFEKMLIDKLNYMVDKKSNPCATGGALKGYQITNKFESFKSMSTQNGFIFYIPAWLTSKIDPSTGFVNLLKTKYTSIADSKKFISSFDRIMYVPEEDLFEFALDYKNFSRTDADYIKKWKLYSYGNRIRIFRNPKKNNVFDWEEVCLTSAYKELFNKYGINYQQGDIRALLCEQSDKAFYSSFMALMSLMLQMRNSITGRTDVDFLISPVKNSDGIFYDSRNYEAQENAILPKNADANGAYNIARKVLWAIGQFKKAEDEKLDKVKIAISNKEWLEYAQTSVK

SEQ ID NO: 502 - protein, 1569 aa, synthetic construct
SEVEFSHEYWMRHALTLAKRARDEREVPVGAVLVLNNRVIGEGWNRAIGLHDPTAHAEIMALRQGGLVMQNYRLIDATLYVTFEPCVMCAGAMIHSRIGRVVFGVRNSKRGAAGSLMNVLNYPGMNHRVEITEGILADECAALLCDFYRMPRQVFNAQKKAQSSINSGGSSGGSSGSETPGTSESATPESSGGSSGGSSKLEKFTNCYSLSKTLRFKAIPVGKTQENIDNKRLLVEDEKRAEDYKGVKKLLDRYYLSFINDVLHSIKLKNLNNYISLFRKKTRTEKENKELENLEINLRKEIAKAFKGNEGYKSLFKKDIIETILPEFLDDKDEIALVNSFNGFTTAFTGFFDNRENMFSEEAKSTSIAFRCINENLTRYISNMDIFEKVDAIFDKHEVQEIKEKILNSDYDVEDFFEGEFFNFVLTQEGIDVYNAIIGGFVTESGEKIKGLNEYINLYNQKTKQKLPKFKPLYKQVLSDRESLSFYGENQTTQKGQKNSRERMKRIEEGIKELGSQILKEHPVENTQLQNEKLYLYYLQNGRDMYVDQELDINRLSDYDVDHIVPQSFLKDDSIDNKVLTRSDKNRGKSDNVPSEEVVKKMKNYWRQLLNAKLITQRKFDNLTKAERGGLSEGYTSDEEVLEVFRNTLNKNSEIFSSIKKLEKLFKNFDEYSSAGIFVKNGPAISTISKDIFGEWNVIRDKWNAEYDDIHLKKKAVVTEKYEDDRRKSFKKIGSFSLEQLQEYADADLSVVEKLKEIIIQKVDEIYKVYGSSEKLFDADFVLEKSLKKNDAVVAIMKDLLDSVKSFENYIKAFFGEGKETNRDESFYGDFVLAYDILLKVDHIYDAIRNYVTQKPYSKDKFKLYFQNPQFMGGWDKDKETDYRATILRYGSKYYLAIMDKKYAKCLQKIDKDDVNGNYEKINYKLLPGPNKMLPKVFFSKKWMAYYNPSEDIQKIYKNGTFKKGDMFNLNDCHKLIDFFKDSISRYPKWSNAYDFNFSETEKYKDIAGFYREVEEQGYKVSFESASKKEVDKLVEEGKLYMFQIYNKDFSDKSHGTPNLHTMYFKLLFDENNHGQIRLSGGAELFMRRASLKKEELVVHPANSPIANKNPDNPKKTTTLSYDVYKDKRFSEDQYELHIPIAINKCPKNIFKINTEVRVLLKHDDNPYVIGIARGERNLLYIVVVDGKGNIVEQYSLNEIINNFNGIRIKTDYHSLLDKKEKERFEARQNWTSIENIKELKAGYISQVVHKICELVEKYDAVIALEDLNSGFKNSRVKVEKQVYQKFEKMLIDKLNYMVDKKSNPCATGGALKGYQITNKFESFKSMSTQNGFIFYIPAWLTSKIDPSTGFVNLLKTKYTSIADSKKFISSFDRIMYVPEEDLFEFALDYKNFSRTDADYIKKWKLYSYGNRIRIFRNPKKNNVFDWEEVCLTSAYKELFNKYGINYQQGDIRALLCEQSDKAFYSSFMALMSLMLQMRNSITGRTDVDFLISPVKNSDGIFYDSRNYEAQENAILPKNADANGAYNIARKVLWAIGQFKKAEDEKLDKVKIAISNKEWLEYAQTSVKH

SEQ ID NO: 503 - DNA, 4456 bp, synthetic construct
  source 1..4456: mol_type = other DNA
tctgaggttgaattttcacatgagtattggatgagacacgctcttaccttggctaagagagcaagggatgagagagaagttccagtgggagcagttcttgtgttgaacaatagagttattggagagggttggaacaggtaagtatcaaggttacaagacaggtttaaggagaccaatagaaactgggcttgtcgagacagagaagactcttgcgtttctgataggcacctattggtcttactgacatccactttgcctttctctccacagggctattggacttcatgatcctactgctcacgcagaaattatggcacttagacaaggtggacttgttatgcagaactacaggcttatcgatgctactctttatgttacattcgagccatgtgtgatgtgcgctggagcaatgattcattctaggattggaagggttgtgttcggtgttagaaactctaagaggggagctgcaggttcacttatgaacgttttgaattatcctggtatgaaccacagagtggagattactgaaggtattttggcagatgaatgtgctgcacttttgtgcgatttttacagaatgcctagacaagtgttcaacgctcaaaagaaggcacaatcttctattaactctggtggttcttctggtggttctagcggcagcgagactcccgggacctcagagtccgccacacccgaaagttctggtggttcttctggtggttctcgcaccgagaaggagaacaaggagctggagaacctggagatcaacctccgcaaggaaatcgccaaagcgttcaagggcaatgaagggtacaagagcctcttcaagaaagacatcatcgaaactatcctcccagagtttctcgatgacaaggacgagatcgcgctggtgaactcctttaacgggttcacaaccgcgtttaccggcttctttgataacagggaaaatatgttctccgaggaggccaagtccaccagcatcgccttcaggtgtatcaacgagaacctcacccgctacatttccaatatggacattttcgagaaggtggatgcgatcttcgataagcacgaggtgcaggagatcaaagagaagattctcaattccgattatgacgtcgaggatttcttcgaaggggagttctttaattttgtgctcacacaagagggcattgacgtgtacaacgcgattatcgggggcttcgtcacagagtccggggagaagattaaggggctgaatgagtacatcaatctgtacaatcagaagaccaagcagaaactgccgaaattcaagccgctctacaagcaagtcctgtccgatagggaaagcctctccttctacggcgagggctataccagcgacgaggaggtgctggaagtcttccgcaacacactgaataagaatagcgagattttctcctccatcaagaagctcgagaagctctttaagaactttgacgagtacagctccgccgggattttcgtgaagaacgggccggcgatcagcaccatctccaaggacatctttggcgagtggaacgtcatcagggacaagtggaacgccgagtacgacgacatccacctgaagaagaaggcggtggtgaccgagaagtatgaggacgatcgcaggaagtccttcaaaaaaatcggctccttcagcctcgaacagctccaggagtatgccgatgcggatctgtccgtcgtcgagaagctgaaggaaatcatcattcagaaggtcgacgagatctataaagtgtacgggtccagcgagaagctgttcgacgccgactttgtgctcgagaagtccctcaaaaagaatgacgccgtggtggccattatgaaagacctgctcgactccgtgaagtccttcgaaaattacattaaagcgttctttggggaggggaaggaaactaacagggatgagtccttctatggcgactttgtcctcgcgtacgacatcctgctgaaggtcgaccacatttacgacgcgatccgcaactacgtgacacagaagccgtactccaaagacaagttcaagctgtacttccagaacccgcaatttatggggggctgggacaaggataaagagacagactaccgcgcgacaattctccgctatggctccaaatactatctggccatcatggacaagaagtacgcgaagtgcctgcagaagatcgacaaagacgacgtcaatggcaactatgaaaagatcaactacaagctgctgccgggcccgaacaagatgctcccgaaggtgttcttcagcaagaagtggatggcctactacaatccaagcgaggatattcagaaaatctataaaaacgggaccttcaagaagggggacatgtttaacctcaacgactgccacaagctcattgatttcttcaaggatagcatttcccgctacccgaaatggtccaatgcgtacgattttaacttctccgagacagaaaagtacaaagacatcgcgggcttttacagggaggtggaggagcaagggtataaagtttcttttgaatccgcgagcaagaaggaagtcgacaagctcgtcgaggagggcaagctctacatgttccaaatttataacaaggacttttccgacaagagccatgggaccccaaacctccacaccatgtacttcaaactgctctttgacgagaacaaccacgggcaaatcaggctgagcggcggcgccgaattattcatgcgcagggcctccctcaagaaggaagagctggtcgtccatccagccaattccccgatcgcgaacaagaacccggacaatccgaaaaagaccaccaccctgtcctacgacgtctacaaggacaaacgcttcagcgaagaccagtacgaattacacatcccaattgcgattaataagtgcccaaagaatatcttcaaaattaatacagaggtcagggtgctgctcaaacacgacgacaatccgtatgtcatcggcattgccaggggcgagcgcaatctgctctatatcgtggtcgtggatgggaagggcaatattgtggagcagtactccctgaacgagattatcaacaacttcaatgggattaggattaagaccgactatcacagcctgctcgacaagaaagaaaaagagaggtttgaggcccgccaaaactggacctccattgagaatatcaaagaattaaaggccggctatatttcccaagtcgtccacaagatctgcgagctggtggagaaatatgacgccgtgattgcgctcgaagacttaaattctgggttcaagaactcccgcgtgaaggtggaaaaacaggtgtatcagaaattcgagaaaatgctgatcgacaaactcaattatatggtggataagaagtccaacccgtgtgccacagggggcgcgctgaagggctatcagatcaccaacaagttcgagagcttcaagagcatgagcacccagaacgggtttattttctacatcccggcgtggctcacctccaagattgacccgagcaccggcttcgtgaacctcctgaagacaaagtatacctccattgccgacagcaagaagtttatctcctccttcgaccgcattatgtatgtgccggaggaggacctcttcgagttcgccctcgactacaaaaacttcagccgcacagatgcggattacatcaagaagtggaagctgtactcctacgggaacaggatccgcatcttcaggaatccaaaaaaaaataacgtctttgactgggaggaagtgtgcctgacatccgcctacaaggaactgttcaataaatacggcatcaattaccagcagggcgacattcgcgccctcctctgtgagcagtccgacaaagcgttttactccagcttcatggccctcatgtccctgatgctccaaatgaggaatagcatcacagggcgcaccgacgtcgacttcctcatcagcccggtgaagaactccgacgggatcttttacgactcccgcaactatgaggcgcaagagaatgcgatcctcccgaagaacgccgatgcgaacggggcctataatatcgccaggaaagtgctctgggccatcgggcagttcaaaaaggcggaggatgagaagctcgacaaggtgaaaattgccatttccaacaaggagtggctggagtacgcgcagacctccgtgaagcacggctcctctggcagctccggctctagcggctcctctggcagctccggctccaagctggagaagtttacaaactgttacagcctctccaaaaccctcaggtttaaagcgatcccggtgggcaagacccaggagaacatcgacaacaagaggctcctggtggaagacgagaagcgcgccgaagactacaagggcgtgaagaagctgctcgataggtactacctcagctttattaacgacgtgctgcacagcatcaaactcaagaatctcaacaactacatctccctcttccgcaaaaagacc

SEQ ID NO: 504 - DNA, 4456 bp, synthetic construct
  source 1..4456: mol_type = other DNA
tctgaggttgaattttcacatgagtattggatgagacacgctcttaccttggctaagagagcaagggatgagagagaagttccagtgggagcagttcttgtgttgaacaatagagttattggagagggttggaacaggtaagtatcaaggttacaagacaggtttaaggagaccaatagaaactgggcttgtcgagacagagaagactcttgcgtttctgataggcacctattggtcttactgacatccactttgcctttctctccacagggctattggacttcatgatcctactgctcacgcagaaattatggcacttagacaaggtggacttgttatgcagaactacaggcttatcgatgctactctttatgttacattcgagccatgtgtgatgtgcgctggagcaatgattcattctaggattggaagggttgtgttcggtgttagaaactctaagaggggagctgcaggttcacttatgaacgttttgaattatcctggtatgaaccacagagtggagattactgaaggtattttggcagatgaatgtgctgcacttttgtgcgatttttacagaatgcctagacaagtgttcaacgctcaaaagaaggcacaatcttctattaactctggtggttcttctggtggttctagcggcagcgagactcccgggacctcagagtccgccacacccgaaagttctggtggttcttctggtggttctggctataccagcgacgaggaggtgctggaagtcttccgcaacacactgaataagaatagcgagattttctcctccatcaagaagctcgagaagctctttaagaactttgacgagtacagctccgccgggattttcgtgaagaacgggccggcgatcagcaccatctccaaggacatctttggcgagtggaacgtcatcagggacaagtggaacgccgagtacgacgacatccacctgaagaagaaggcggtggtgaccgagaagtatgaggacgatcgcaggaagtccttcaaaaaaatcggctccttcagcctcgaacagctccaggagtatgccgatgcggatctgtccgtcgtcgagaagctgaaggaaatcatcattcagaaggtcgacgagatctataaagtgtacgggtccagcgagaagctgttcgacgccgactttgtgctcgagaagtccctcaaaaagaatgacgccgtggtggccattatgaaagacctgctcgactccgtgaagtccttcgaaaattacattaaagcgttctttggggaggggaaggaaactaacagggatgagtccttctatggcgactttgtcctcgcgtacgacatcctgctgaaggtcgaccacatttacgacgcgatccgcaactacgtgacacagaagccgtactccaaagacaagttcaagctgtacttccagaacccgcaatttatggggggctgggacaaggataaagagacagactaccgcgcgacaattctccgctatggctccaaatactatctggccatcatggacaagaagtacgcgaagtgcctgcagaagatcgacaaagacgacgtcaatggcaactatgaaaagatcaactacaagctgctgccgggcccgaacaagatgctcccgaaggtgttcttcagcaagaagtggatggcctactacaatccaagcgaggatattcagaaaatctataaaaacgggaccttcaagaagggggacatgtttaacctcaacgactgccacaagctcattgatttcttcaaggatagcatttcccgctacccgaaatggtccaatgcgtacgattttaacttctccgagacagaaaagtacaaagacatcgcgggcttttacagggaggtggaggagcaagggtataaagtttcttttgaatccgcgagcaagaaggaagtcgacaagctcgtcgaggagggcaagctctacatgttccaaatttataacaaggacttttccgacaagagccatgggaccccaaacctccacaccatgtacttcaaactgctctttgacgagaacaaccacgggcaaatcaggctgagcggcggcgccgaattattcatgcgcagggcctccctcaagaaggaagagctggtcgtccatccagccaattccccgatcgcgaacaagaacccggacaatccgaaaaagaccaccaccctgtcctacgacgtctacaaggacaaacgcttcagcgaagaccagtacgaattacacatcccaattgcgattaataagtgcccaaagaatatcttcaaaattaatacagaggtcagggtgctgctcaaacacgacgacaatccgtatgtcatcggcattgccaggggcgagcgcaatctgctctatatcgtggtcgtggatgggaagggcaatattgtggagcagtactccctgaacgagattatcaacaacttcaatgggattaggattaagaccgactatcacagcctgctcgacaagaaagaaaaagagaggtttgaggcccgccaaaactggacctccattgagaatatcaaagaattaaaggccggctatatttcccaagtcgtccacaagatctgcgagctggtggagaaatatgacgccgtgattgcgctcgaagacttaaattctgggttcaagaactcccgcgtgaaggtggaaaaacaggtgtatcagaaattcgagaaaatgctgatcgacaaactcaattatatggtggataagaagtccaacccgtgtgccacagggggcgcgctgaagggctatcagatcaccaacaagttcgagagcttcaagagcatgagcacccagaacgggtttattttctacatcccggcgtggctcacctccaagattgacccgagcaccggcttcgtgaacctcctgaagacaaagtatacctccattgccgacagcaagaagtttatctcctccttcgaccgcattatgtatgtgccggaggaggacctcttcgagttcgccctcgactacaaaaacttcagccgcacagatgcggattacatcaagaagtggaagctgtactcctacgggaacaggatccgcatcttcaggaatccaaaaaaaaataacgtctttgactgggaggaagtgtgcctgacatccgcctacaaggaactgttcaataaatacggcatcaattaccagcagggcgacattcgcgccctcctctgtgagcagtccgacaaagcgttttactccagcttcatggccctcatgtccctgatgctccaaatgaggaatagcatcacagggcgcaccgacgtcgacttcctcatcagcccggtgaagaactccgacgggatcttttacgactcccgcaactatgaggcgcaagagaatgcgatcctcccgaagaacgccgatgcgaacggggcctataatatcgccaggaaagtgctctgggccatcgggcagttcaaaaaggcggaggatgagaagctcgacaaggtgaaaattgccatttccaacaaggagtggctggagtacgcgcagacctccgtgaagcacggctcctctggcagctccggctctagcggctcctctggcagctccggctccaagctggagaagtttacaaactgttacagcctctccaaaaccctcaggtttaaagcgatcccggtgggcaagacccaggagaacatcgacaacaagaggctcctggtggaagacgagaagcgcgccgaagactacaagggcgtgaagaagctgctcgataggtactacctcagctttattaacgacgtgctgcacagcatcaaactcaagaatctcaacaactacatctccctcttccgcaaaaagacccgcaccgagaaggagaacaaggagctggagaacctggagatcaacctccgcaaggaaatcgccaaagcgttcaagggcaatgaagggtacaagagcctcttcaagaaagacatcatcgaaactatcctcccagagtttctcgatgacaaggacgagatcgcgctggtgaactcctttaacgggttcacaaccgcgtttaccggcttctttgataacagggaaaatatgttctccgaggaggccaagtccaccagcatcgccttcaggtgtatcaacgagaacctcacccgctacatttccaatatggacattttcgagaaggtggatgcgatcttcgataagcacgaggtgcaggagatcaaagagaagattctcaattccgattatgacgtcgaggatttcttcgaaggggagttctttaattttgtgctcacacaagagggcattgacgtgtacaacgcgattatcgggggcttcgtcacagagtccggggagaagattaaggggctgaatgagtacatcaatctgtacaatcagaagaccaagcagaaactgccgaaattcaagccgctctacaagcaagtcctgtccgatagggaaagcctctccttctacggcgag

SEQ ID NO: 505 - DNA, 4456 bp, synthetic construct
  source 1..4456: mol_type = other DNA
tctgaggttgaattttcacatgagtattggatgagacacgctcttaccttggctaagagagcaagggatgagagagaagttccagtgggagcagttcttgtgttgaacaatagagttattggagagggttggaacaggtaagtatcaaggttacaagacaggtttaaggagaccaatagaaactgggcttgtcgagacagagaagactcttgcgtttctgataggcacctattggtcttactgacatccactttgcctttctctccacagggctattggacttcatgatcctactgctcacgcagaaattatggcacttagacaaggtggacttgttatgcagaactacaggcttatcgatgctactctttatgttacattcgagccatgtgtgatgtgcgctggagcaatgattcattctaggattggaagggttgtgttcggtgttagaaactctaagaggggagctgcaggttcacttatgaacgttttgaattatcctggtatgaaccacagagtggagattactgaaggtattttggcagatgaatgtgctgcacttttgtgcgatttttacagaatgcctagacaagtgttcaacgctcaaaagaaggcacaatcttctattaactctggtggttcttctggtggttctagcggcagcgagactcccgggacctcagagtccgccacacccgaaagttctggtggttcttctggtggttcttccgacgggatcttttacgactcccgcaactatgaggcgcaagagaatgcgatcctcccgaagaacgccgatgcgaacggggcctataatatcgccaggaaagtgctctgggccatcgggcagttcaaaaaggcggaggatgagaagctcgacaaggtgaaaattgccatttccaacaaggagtggctggagtacgcgcagacctccgtgaagcacggctcctctggcagctccggctctagcggctcctctggcagctccggctccaagctggagaagtttacaaactgttacagcctctccaaaaccctcaggtttaaagcgatcccggtgggcaagacccaggagaacatcgacaacaagaggctcctggtggaagacgagaagcgcgccgaagactacaagggcgtgaagaagctgctcgataggtactacctcagctttattaacgacgtgctgcacagcatcaaactcaagaatctcaacaactacatctccctcttccgcaaaaagacccgcaccgagaaggagaacaaggagctggagaacctggagatcaacctccgcaaggaaatcgccaaagcgttcaagggcaatgaagggtacaagagcctcttcaagaaagacatcatcgaaactatcctcccagagtttctcgatgacaaggacgagatcgcgctggtgaactcctttaacgggttcacaaccgcgtttaccggcttctttgataacagggaaaatatgttctccgaggaggccaagtccaccagcatcgccttcaggtgtatcaacgagaacctcacccgctacatttccaatatggacattttcgagaaggtggatgcgatcttcgataagcacgaggtgcaggagatcaaagagaagattctcaattccgattatgacgtcgaggatttcttcgaaggggagttctttaattttgtgctcacacaagagggcattgacgtgtacaacgcgattatcgggggcttcgtcacagagtccggggagaagattaaggggctgaatgagtacatcaatctgtacaatcagaagaccaagcagaaactgccgaaattcaagccgctctacaagcaagtcctgtccgatagggaaagcctctccttctacggcgagggctataccagcgacgaggaggtgctggaagtcttccgcaacacactgaataagaatagcgagattttctcctccatcaagaagctcgagaagctctttaagaactttgacgagtacagctccgccgggattttcgtgaagaacgggccggcgatcagcaccatctccaaggacatctttggcgagtggaacgtcatcagggacaagtggaacgccgagtacgacgacatccacctgaagaagaaggcggtggtgaccgagaagtatgaggacgatcgcaggaagtccttcaaaaaaatcggctccttcagcctcgaacagctccaggagtatgccgatgcggatctgtccgtcgtcgagaagctgaaggaaatcatcattcagaaggtcgacgagatctataaagtgtacgggtccagcgagaagctgttcgacgccgactttgtgctcgagaagtccctcaaaaagaatgacgccgtggtggccattatgaaagacctgctcgactccgtgaagtccttcgaaaattacattaaagcgttctttggggaggggaaggaaactaacagggatgagtccttctatggcgactttgtcctcgcgtacgacatcctgctgaaggtcgaccacatttacgacgcgatccgcaactacgtgacacagaagccgtactccaaagacaagttcaagctgtacttccagaacccgcaatttatggggggctgggacaaggataaagagacagactaccgcgcgacaattctccgctatggctccaaatactatctggccatcatggacaagaagtacgcgaagtgcctgcagaagatcgacaaagacgacgtcaatggcaactatgaaaagatcaactacaagctgctgccgggcccgaacaagatgctcccgaaggtgttcttcagcaagaagtggatggcctactacaatccaagcgaggatattcagaaaatctataaaaacgggaccttcaagaagggggacatgtttaacctcaacgactgccacaagctcattgatttcttcaaggatagcatttcccgctacccgaaatggtccaatgcgtacgattttaacttctccgagacagaaaagtacaaagacatcgcgggcttttacagggaggtggaggagcaagggtataaagtttcttttgaatccgcgagcaagaaggaagtcgacaagctcgtcgaggagggcaagctctacatgttccaaatttataacaaggacttttccgacaagagccatgggaccccaaacctccacaccatgtacttcaaactgctctttgacgagaacaaccacgggcaaatcaggctgagcggcggcgccgaattattcatgcgcagggcctccctcaagaaggaagagctggtcgtccatccagccaattccccgatcgcgaacaagaacccggacaatccgaaaaagaccaccaccctgtcctacgacgtctacaaggacaaacgcttcagcgaagaccagtacgaattacacatcccaattgcgattaataagtgcccaaagaatatcttcaaaattaatacagaggtcagggtgctgctcaaacacgacgacaatccgtatgtcatcggcattgccaggggcgagcgcaatctgctctatatcgtggtcgtggatgggaagggcaatattgtggagcagtactccctgaacgagattatcaacaacttcaatgggattaggattaagaccgactatcacagcctgctcgacaagaaagaaaaagagaggtttgaggcccgccaaaactggacctccattgagaatatcaaagaattaaaggccggctatatttcccaagtcgtccacaagatctgcgagctggtggagaaatatgacgccgtgattgcgctcgaagacttaaattctgggttcaagaactcccgcgtgaaggtggaaaaacaggtgtatcagaaattcgagaaaatgctgatcgacaaactcaattatatggtggataagaagtccaacccgtgtgccacagggggcgcgctgaagggctatcagatcaccaacaagttcgagagcttcaagagcatgagcacccagaacgggtttattttctacatcccggcgtggctcacctccaagattgacccgagcaccggcttcgtgaacctcctgaagacaaagtatacctccattgccgacagcaagaagtttatctcctccttcgaccgcattatgtatgtgccggaggaggacctcttcgagttcgccctcgactacaaaaacttcagccgcacagatgcggattacatcaagaagtggaagctgtactcctacgggaacaggatccgcatcttcaggaatccaaaaaaaaataacgtctttgactgggaggaagtgtgcctgacatccgcctacaaggaactgttcaataaatacggcatcaattaccagcagggcgacattcgcgccctcctctgtgagcagtccgacaaagcgttttactccagcttcatggccctcatgtccctgatgctccaaatgaggaatagcatcacagggcgcaccgacgtcgacttcctcatcagcccggtgaagaac

SEQ ID NO: 506 - DNA, 4456 bp, synthetic construct
  source 1..4456: mol_type = other DNA
tctgaggttgaattttcacatgagtattggatgagacacgctcttaccttggctaagagagcaagggatgagagagaagttccagtgggagcagttcttgtgttgaacaatagagttattggagagggttggaacaggtaagtatcaaggttacaagacaggtttaaggagaccaatagaaactgggcttgtcgagacagagaagactcttgcgtttctgataggcacctattggtcttactgacatccactttgcctttctctccacagggctattggacttcatgatcctactgctcacgcagaaattatggcacttagacaaggtggacttgttatgcagaactacaggcttatcgatgctactctttatgttacattcgagccatgtgtgatgtgcgctggagcaatgattcattctaggattggaagggttgtgttcggtgttagaaactctaagaggggagctgcaggttcacttatgaacgttttgaattatcctggtatgaaccacagagtggagattactgaaggtattttggcagatgaatgtgctgcacttttgtgcgatttttacagaatgcctagacaagtgttcaacgctcaaaagaaggcacaatcttctattaactctggtggttcttctggtggttctagcggcagcgagactcccgggacctcagagtccgccacacccgaaagttctggtggttcttctggtggttctaaagacaagttcaagctgtacttccagaacccgcaatttatggggggctgggacaaggataaagagacagactaccgcgcgacaattctccgctatggctccaaatactatctggccatcatggacaagaagtacgcgaagtgcctgcagaagatcgacaaagacgacgtcaatggcaactatgaaaagatcaactacaagctgctgccgggcccgaacaagatgctcccgaaggtgttcttcagcaagaagtggatggcctactacaatccaagcgaggatattcagaaaatctataaaaacgggaccttcaagaagggggacatgtttaacctcaacgactgccacaagctcattgatttcttcaaggatagcatttcccgctacccgaaatggtccaatgcgtacgattttaacttctccgagacagaaaagtacaaagacatcgcgggcttttacagggaggtggaggagcaagggtataaagtttcttttgaatccgcgagcaagaaggaagtcgacaagctcgtcgaggagggcaagctctacatgttccaaatttataacaaggacttttccgacaagagccatgggaccccaaacctccacaccatgtacttcaaactgctctttgacgagaacaaccacgggcaaatcaggctgagcggcggcgccgaattattcatgcgcagggcctccctcaagaaggaagagctggtcgtccatccagccaattccccgatcgcgaacaagaacccggacaatccgaaaaagaccaccaccctgtcctacgacgtctacaaggacaaacgcttcagcgaagaccagtacgaattacacatcccaattgcgattaataagtgcccaaagaatatcttcaaaattaatacagaggtcagggtgctgctcaaacacgacgacaatccgtatgtcatcggcattgccaggggcgagcgcaatctgctctatatcgtggtcgtggatgggaagggcaatattgtggagcagtactccctgaacgagattatcaacaacttcaatgggattaggattaagaccgactatcacagcctgctcgacaagaaagaaaaagagaggtttgaggcccgccaaaactggacctccattgagaatatcaaagaattaaaggccggctatatttcccaagtcgtccacaagatctgcgagctggtggagaaatatgacgccgtgattgcgctcgaagacttaaattctgggttcaagaactcccgcgtgaaggtggaaaaacaggtgtatcagaaattcgagaaaatgctgatcgacaaactcaattatatggtggataagaagtccaacccgtgtgccacagggggcgcgctgaagggctatcagatcaccaacaagttcgagagcttcaagagcatgagcacccagaacgggtttattttctacatcccggcgtggctcacctccaagattgacccgagcaccggcttcgtgaacctcctgaagacaaagtatacctccattgccgacagcaagaagtttatctcctccttcgaccgcattatgtatgtgccggaggaggacctcttcgagttcgccctcgactacaaaaacttcagccgcacagatgcggattacatcaagaagtggaagctgtactcctacgggaacaggatccgcatcttcaggaatccaaaaaaaaataacgtctttgactgggaggaagtgtgcctgacatccgcctacaaggaactgttcaataaatacggcatcaattaccagcagggcgacattcgcgccctcctctgtgagcagtccgacaaagcgttttactccagcttcatggccctcatgtccctgatgctccaaatgaggaatagcatcacagggcgcaccgacgtcgacttcctcatcagcccggtgaagaactccgacgggatcttttacgactcccgcaactatgaggcgcaagagaatgcgatcctcccgaagaacgccgatgcgaacggggcctataatatcgccaggaaagtgctctgggccatcgggcagttcaaaaaggcggaggatgagaagctcgacaaggtgaaaattgccatttccaacaaggagtggctggagtacgcgcagacctccgtgaagcacggctcctctggcagctccggctctagcggctcctctggcagctccggctccaagctggagaagtttacaaactgttacagcctctccaaaaccctcaggtttaaagcgatcccggtgggcaagacccaggagaacatcgacaacaagaggctcctggtggaagacgagaagcgcgccgaagactacaagggcgtgaagaagctgctcgataggtactacctcagctttattaacgacgtgctgcacagcatcaaactcaagaatctcaacaactacatctccctcttccgcaaaaagacccgcaccgagaaggagaacaaggagctggagaacctggagatcaacctccgcaaggaaatcgccaaagcgttcaagggcaatgaagggtacaagagcctcttcaagaaagacatcatcgaaactatcctcccagagtttctcgatgacaaggacgagatcgcgctggtgaactcctttaacgggttcacaaccgcgtttaccggcttctttgataacagggaaaatatgttctccgaggaggccaagtccaccagcatcgccttcaggtgtatcaacgagaacctcacccgctacatttccaatatggacattttcgagaaggtggatgcgatcttcgataagcacgaggtgcaggagatcaaagagaagattctcaattccgattatgacgtcgaggatttcttcgaaggggagttctttaattttgtgctcacacaagagggcattgacgtgtacaacgcgattatcgggggcttcgtcacagagtccggggagaagattaaggggctgaatgagtacatcaatctgtacaatcagaagaccaagcagaaactgccgaaattcaagccgctctacaagcaagtcctgtccgatagggaaagcctctccttctacggcgagggctataccagcgacgaggaggtgctggaagtcttccgcaacacactgaataagaatagcgagattttctcctccatcaagaagctcgagaagctctttaagaactttgacgagtacagctccgccgggattttcgtgaagaacgggccggcgatcagcaccatctccaaggacatctttggcgagtggaacgtcatcagggacaagtggaacgccgagtacgacgacatccacctgaagaagaaggcggtggtgaccgagaagtatgaggacgatcgcaggaagtccttcaaaaaaatcggctccttcagcctcgaacagctccaggagtatgccgatgcggatctgtccgtcgtcgagaagctgaaggaaatcatcattcagaaggtcgacgagatctataaagtgtacgggtccagcgagaagctgttcgacgccgactttgtgctcgagaagtccctcaaaaagaatgacgccgtggtggccattatgaaagacctgctcgactccgtgaagtccttcgaaaattacattaaagcgttctttggggaggggaaggaaactaacagggatgagtccttctatggcgactttgtcctcgcgtacgacatcctgctgaaggtcgaccacatttacgacgcgatccgcaactacgtgacacagaagccgtactcc

SEQ ID NO: 507 - DNA, 4456 bp, synthetic construct
  source 1..4456: mol_type = other DNA
tctgaggttgaattttcacatgagtattggatgagacacgctcttaccttggctaagagagcaagggatgagagagaagttccagtgggagcagttcttgtgttgaacaatagagttattggagagggttggaacaggtaagtatcaaggttacaagacaggtttaaggagaccaatagaaactgggcttgtcgagacagagaagactcttgcgtttctgataggcacctattggtcttactgacatccactttgcctttctctccacagggctattggacttcatgatcctactgctcacgcagaaattatggcacttagacaaggtggacttgttatgcagaactacaggcttatcgatgctactctttatgttacattcgagccatgtgtgatgtgcgctggagcaatgattcattctaggattggaagggttgtgttcggtgttagaaactctaagaggggagctgcaggttcacttatgaacgttttgaattatcctggtatgaaccacagagtggagattactgaaggtattttggcagatgaatgtgctgcacttttgtgcgatttttacagaatgcctagacaagtgttcaacgctcaaaagaaggcacaatcttctattaactctggtggttcttctggtggttctagcggcagcgagactcccgggacctcagagtccgccacacccgaaagttctggtggttcttctggtggttctaagtccctcaaaaagaatgacgccgtggtggccattatgaaagacctgctcgactccgtgaagtccttcgaaaattacattaaagcgttctttggggaggggaaggaaactaacagggatgagtccttctatggcgactttgtcctcgcgtacgacatcctgctgaaggtcgaccacatttacgacgcgatccgcaactacgtgacacagaagccgtactccaaagacaagttcaagctgtacttccagaacccgcaatttatggggggctgggacaaggataaagagacagactaccgcgcgacaattctccgctatggctccaaatactatctggccatcatggacaagaagtacgcgaagtgcctgcagaagatcgacaaagacgacgtcaatggcaactatgaaaagatcaactacaagctgctgccgggcccgaacaagatgctcccgaaggtgttcttcagcaagaagtggatggcctactacaatccaagcgaggatattcagaaaatctataaaaacgggaccttcaagaagggggacatgtttaacctcaacgactgccacaagctcattgatttcttcaaggatagcatttcccgctacccgaaatggtccaatgcgtacgattttaacttctccgagacagaaaagtacaaagacatcgcgggcttttacagggaggtggaggagcaagggtataaagtttcttttgaatccgcgagcaagaaggaagtcgacaagctcgtcgaggagggcaagctctacatgttccaaatttataacaaggacttttccgacaagagccatgggaccccaaacctccacaccatgtacttcaaactgctctttgacgagaacaaccacgggcaaatcaggctgagcggcggcgccgaattattcatgcgcagggcctccctcaagaaggaagagctggtcgtccatccagccaattccccgatcgcgaacaagaacccggacaatccgaaaaagaccaccaccctgtcctacgacgtctacaaggacaaacgcttcagcgaagaccagtacgaattacacatcccaattgcgattaataagtgcccaaagaatatcttcaaaattaatacagaggtcagggtgctgctcaaacacgacgacaatccgtatgtcatcggcattgccaggggcgagcgcaatctgctctatatcgtggtcgtggatgggaagggcaatattgtggagcagtactccctgaacgagattatcaacaacttcaatgggattaggattaagaccgactatcacagcctgctcgacaagaaagaaaaagagaggtttgaggcccgccaaaactggacctccattgagaatatcaaagaattaaaggccggctatatttcccaagtcgtccacaagatctgcgagctggtggagaaatatgacgccgtgattgcgctcgaagacttaaattctgggttcaagaactcccgcgtgaaggtggaaaaacaggtgtatcagaaattcgagaaaatgctgatcgacaaactcaattatatggtggataagaagtccaacccgtgtgccacagggggcgcgctgaagggctatcagatcaccaacaagttcgagagcttcaagagcatgagcacccagaacgggtttattttctacatcccggcgtggctcacctccaagattgacccgagcaccggcttcgtgaacctcctgaagacaaagtatacctccattgccgacagcaagaagtttatctcctccttcgaccgcattatgtatgtgccggaggaggacctcttcgagttcgccctcgactacaaaaacttcagccgcacagatgcggattacatcaagaagtggaagctgtactcctacgggaacaggatccgcatcttcaggaatccaaaaaaaaataacgtctttgactgggaggaagtgtgcctgacatccgcctacaaggaactgttcaataaatacggcatcaattaccagcagggcgacattcgcgccctcctctgtgagcagtccgacaaagcgttttactccagcttcatggccctcatgtccctgatgctccaaatgaggaatagcatcacagggcgcaccgacgtcgacttcctcatcagcccggtgaagaactccgacgggatcttttacgactcccgcaactatgaggcgcaagagaatgcgatcctcccgaagaacgccgatgcgaacggggcctataatatcgccaggaaagtgctctgggccatcgggcagttcaaaaaggcggaggatgagaagctcgacaaggtgaaaattgccatttccaacaaggagtggctggagtacgcgcagacctccgtgaagcacggctcctctggcagctccggctctagcggctcctctggcagctccggctccaagctggagaagtttacaaactgttacagcctctccaaaaccctcaggtttaaagcgatcccggtgggcaagacccaggagaacatcgacaacaagaggctcctggtggaagacgagaagcgcgccgaagactacaagggcgtgaagaagctgctcgataggtactacctcagctttattaacgacgtgctgcacagcatcaaactcaagaatctcaacaactacatctccctcttccgcaaaaagacccgcaccgagaaggagaacaaggagctggagaacctggagatcaacctccgcaaggaaatcgccaaagcgttcaagggcaatgaagggtacaagagcctcttcaagaaagacatcatcgaaactatcctcccagagtttctcgatgacaaggacgagatcgcgctggtgaactcctttaacgggttcacaaccgcgtttaccggcttctttgataacagggaaaatatgttctccgaggaggccaagtccaccagcatcgccttcaggtgtatcaacgagaacctcacccgctacatttccaatatggacattttcgagaaggtggatgcgatcttcgataagcacgaggtgcaggagatcaaagagaagattctcaattccgattatgacgtcgaggatttcttcgaaggggagttctttaattttgtgctcacacaagagggcattgacgtgtacaacgcgattatcgggggcttcgtcacagagtccggggagaagattaaggggctgaatgagtacatcaatctgtacaatcagaagaccaagcagaaactgccgaaattcaagccgctctacaagcaagtcctgtccgatagggaaagcctctccttctacggcgagggctataccagcgacgaggaggtgctggaagtcttccgcaacacactgaataagaatagcgagattttctcctccatcaagaagctcgagaagctctttaagaactttgacgagtacagctccgccgggattttcgtgaagaacgggccggcgatcagcaccatctccaaggacatctttggcgagtggaacgtcatcagggacaagtggaacgccgagtacgacgacatccacctgaagaagaaggcggtggtgaccgagaagtatgaggacgatcgcaggaagtccttcaaaaaaatcggctccttcagcctcgaacagctccaggagtatgccgatgcggatctgtccgtcgtcgagaagctgaaggaaatcatcattcagaaggtcgacgagatctataaagtgtacgggtccagcgagaagctgttcgacgccgactttgtgctcgag

SEQ ID NO: 508 - DNA, 4456 bp, synthetic construct
  source 1..4456: mol_type = other DNA
tctgaggttgaattttcacatgagtattggatgagacacgctcttaccttggctaagagagcaagggatgagagagaagttccagtgggagcagttcttgtgttgaacaatagagttattggagagggttggaacaggtaagtatcaaggttacaagacaggtttaaggagaccaatagaaactgggcttgtcgagacagagaagactcttgcgtttctgataggcacctattggtcttactgacatccactttgcctttctctccacagggctattggacttcatgatcctactgctcacgcagaaattatggcacttagacaaggtggacttgttatgcagaactacaggcttatcgatgctactctttatgttacattcgagccatgtgtgatgtgcgctggagcaatgattcattctaggattggaagggttgtgttcggtgttagaaactctaagaggggagctgcaggttcacttatgaacgttttgaattatcctggtatgaaccacagagtggagattactgaaggtattttggcagatgaatgtgctgcacttttgtgcgatttttacagaatgcctagacaagtgttcaacgctcaaaagaaggcacaatcttctattaactctggtggttcttctggtggttctagcggcagcgagactcccgggacctcagagtccgccacacccgaaagttctggtggttcttctggtggttcttccgacaaagcgttttactccagcttcatggccctcatgtccctgatgctccaaatgaggaatagcatcacagggcgcaccgacgtcgacttcctcatcagcccggtgaagaactccgacgggatcttttacgactcccgcaactatgaggcgcaagagaatgcgatcctcccgaagaacgccgatgcgaacggggcctataatatcgccaggaaagtgctctgggccatcgggcagttcaaaaaggcggaggatgagaagctcgacaaggtgaaaattgccatttccaacaaggagtggctggagtacgcgcagacctccgtgaagcacggctcctctggcagctccggctctagcggctcctctggcagctccggctccaagctggagaagtttacaaactgttacagcctctccaaaaccctcaggtttaaagcgatcccggtgggcaagacccaggagaacatcgacaacaagaggctcctggtggaagacgagaagcgcgccgaagactacaagggcgtgaagaagctgctcgataggtactacctcagctttattaacgacgtgctgcacagcatcaaactcaagaatctcaacaactacatctccctcttccgcaaaaagacccgcaccgagaaggagaacaaggagctggagaacctggagatcaacctccgcaaggaaatcgccaaagcgttcaagggcaatgaagggtacaagagcctcttcaagaaagacatcatcgaaactatcctcccagagtttctcgatgacaaggacgagatcgcgctggtgaactcctttaacgggttcacaaccgcgtttaccggcttctttgataacagggaaaatatgttctccgaggaggccaagtccaccagcatcgccttcaggtgtatcaacgagaacctcacccgctacatttccaatatggacattttcgagaaggtggatgcgatcttcgataagcacgaggtgcaggagatcaaagagaagattctcaattccgattatgacgtcgaggatttcttcgaaggggagttctttaattttgtgctcacacaagagggcattgacgtgtacaacgcgattatcgggggcttcgtcacagagtccggggagaagattaaggggctgaatgagtacatcaatctgtacaatcagaagaccaagcagaaactgccgaaattcaagccgctctacaagcaagtcctgtccgatagggaaagcctctccttctacggcgagggctataccagcgacgaggaggtgctggaagtcttccgcaacacactgaataagaatagcgagattttctcctccatcaagaagctcgagaagctctttaagaactttgacgagtacagctccgccgggattttcgtgaagaacgggccggcgatcagcaccatctccaaggacatctttggcgagtggaacgtcatcagggacaagtggaacgccgagtacgacgacatccacctgaagaagaaggcggtggtgaccgagaagtatgaggacgatcgcaggaagtccttcaaaaaaatcggctccttcagcctcgaacagctccaggagtatgccgatgcggatctgtccgtcgtcgagaagctgaaggaaatcatcattcagaaggtcgacgagatctataaagtgtacgggtccagcgagaagctgttcgacgccgactttgtgctcgagaagtccctcaaaaagaatgacgccgtggtggccattatgaaagacctgctcgactccgtgaagtccttcgaaaattacattaaagcgttctttggggaggggaaggaaactaacagggatgagtccttctatggcgactttgtcctcgcgtacgacatcctgctgaaggtcgaccacatttacgacgcgatccgcaactacgtgacacagaagccgtactccaaagacaagttcaagctgtacttccagaacccgcaatttatggggggctgggacaaggataaagagacagactaccgcgcgacaattctccgctatggctccaaatactatctggccatcatggacaagaagtacgcgaagtgcctgcagaagatcgacaaagacgacgtcaatggcaactatgaaaagatcaactacaagctgctgccgggcccgaacaagatgctcccgaaggtgttcttcagcaagaagtggatggcctactacaatccaagcgaggatattcagaaaatctataaaaacgggaccttcaagaagggggacatgtttaacctcaacgactgccacaagctcattgatttcttcaaggatagcatttcccgctacccgaaatggtccaatgcgtacgattttaacttctccgagacagaaaagtacaaagacatcgcgggcttttacagggaggtggaggagcaagggtataaagtttcttttgaatccgcgagcaagaaggaagtcgacaagctcgtcgaggagggcaagctctacatgttccaaatttataacaaggacttttccgacaagagccatgggaccccaaacctccacaccatgtacttcaaactgctctttgacgagaacaaccacgggcaaatcaggctgagcggcggcgccgaattattcatgcgcagggcctccctcaagaaggaagagctggtcgtccatccagccaattccccgatcgcgaacaagaacccggacaatccgaaaaagaccaccaccctgtcctacgacgtctacaaggacaaacgcttcagcgaagaccagtacgaattacacatcccaattgcgattaataagtgcccaaagaatatcttcaaaattaatacagaggtcagggtgctgctcaaacacgacgacaatccgtatgtcatcggcattgccaggggcgagcgcaatctgctctatatcgtggtcgtggatgggaagggcaatattgtggagcagtactccctgaacgagattatcaacaacttcaatgggattaggattaagaccgactatcacagcctgctcgacaagaaagaaaaagagaggtttgaggcccgccaaaactggacctccattgagaatatcaaagaattaaaggccggctatatttcccaagtcgtccacaagatctgcgagctggtggagaaatatgacgccgtgattgcgctcgaagacttaaattctgggttcaagaactcccgcgtgaaggtggaaaaacaggtgtatcagaaattcgagaaaatgctgatcgacaaactcaattatatggtggataagaagtccaacccgtgtgccacagggggcgcgctgaagggctatcagatcaccaacaagttcgagagcttcaagagcatgagcacccagaacgggtttattttctacatcccggcgtggctcacctccaagattgacccgagcaccggcttcgtgaacctcctgaagacaaagtatacctccattgccgacagcaagaagtttatctcctccttcgaccgcattatgtatgtgccggaggaggacctcttcgagttcgccctcgactacaaaaacttcagccgcacagatgcggattacatcaagaagtggaagctgtactcctacgggaacaggatccgcatcttcaggaatccaaaaaaaaataacgtctttgactgggaggaagtgtgcctgacatccgcctacaaggaactgttcaataaatacggcatcaattaccagcagggcgacattcgcgccctcctctgtgagcag

SEQ ID NO: 509 - DNA, 4456 bp, synthetic construct
  source 1..4456: mol_type = other DNA
cgcaccgagaaggagaacaaggagctggagaacctggagatcaacctccgcaaggaaatcgccaaagcgttcaagggcaatgaagggtacaagagcctcttcaagaaagacatcatcgaaactatcctcccagagtttctcgatgacaaggacgagatcgcgctggtgaactcctttaacgggttcacaaccgcgtttaccggcttctttgataacagggaaaatatgttctccgaggaggccaagtccaccagcatcgccttcaggtgtatcaacgagaacctcacccgctacatttccaatatggacattttcgagaaggtggatgcgatcttcgataagcacgaggtgcaggagatcaaagagaagattctcaattccgattatgacgtcgaggatttcttcgaaggggagttctttaattttgtgctcacacaagagggcattgacgtgtacaacgcgattatcgggggcttcgtcacagagtccggggagaagattaaggggctgaatgagtacatcaatctgtacaatcagaagaccaagcagaaactgccgaaattcaagccgctctacaagcaagtcctgtccgatagggaaagcctctccttctacggcgagggctataccagcgacgaggaggtgctggaagtcttccgcaacacactgaataagaatagcgagattttctcctccatcaagaagctcgagaagctctttaagaactttgacgagtacagctccgccgggattttcgtgaagaacgggccggcgatcagcaccatctccaaggacatctttggcgagtggaacgtcatcagggacaagtggaacgccgagtacgacgacatccacctgaagaagaaggcggtggtgaccgagaagtatgaggacgatcgcaggaagtccttcaaaaaaatcggctccttcagcctcgaacagctccaggagtatgccgatgcggatctgtccgtcgtcgagaagctgaaggaaatcatcattcagaaggtcgacgagatctataaagtgtacgggtccagcgagaagctgttcgacgccgactttgtgctcgagaagtccctcaaaaagaatgacgccgtggtggccattatgaaagacctgctcgactccgtgaagtccttcgaaaattacattaaagcgttctttggggaggggaaggaaactaacagggatgagtccttctatggcgactttgtcctcgcgtacgacatcctgctgaaggtcgaccacatttacgacgcgatccgcaactacgtgacacagaagccgtactccaaagacaagttcaagctgtacttccagaacccgcaatttatggggggctgggacaaggataaagagacagactaccgcgcgacaattctccgctatggctccaaatactatctggccatcatggacaagaagtacgcgaagtgcctgcagaagatcgacaaagacgacgtcaatggcaactatgaaaagatcaactacaagctgctgccgggcccgaacaagatgctcccgaaggtgttcttcagcaagaagtggatggcctactacaatccaagcgaggatattcagaaaatctataaaaacgggaccttcaagaagggggacatgtttaacctcaacgactgccacaagctcattgatttcttcaaggatagcatttcccgctacccgaaatggtccaatgcgtacgattttaacttctccgagacagaaaagtacaaagacatcgcgggcttttacagggaggtggaggagcaagggtataaagtttcttttgaatccgcgagcaagaaggaagtcgacaagctcgtcgaggagggcaagctctacatgttccaaatttataacaaggacttttccgacaagagccatgggaccccaaacctccacaccatgtacttcaaactgctctttgacgagaacaaccacgggcaaatcaggctgagcggcggcgccgaattattcatgcgcagggcctccctcaagaaggaagagctggtcgtccatccagccaattccccgatcgcgaacaagaacccggacaatccgaaaaagaccaccaccctgtcctacgacgtctacaaggacaaacgcttcagcgaagaccagtacgaattacacatcccaattgcgattaataagtgcccaaagaatatcttcaaaattaatacagaggtcagggtgctgctcaaacacgacgacaatccgtatgtcatcggcattgccaggggcgagcgcaatctgctctatatcgtggtcgtggatgggaagggcaatattgtggagcagtactccctgaacgagattatcaacaacttcaatgggattaggattaagaccgactatcacagcctgctcgacaagaaagaaaaagagaggtttgaggcccgccaaaactggacctccattgagaatatcaaagaattaaaggccggctatatttcccaagtcgtccacaagatctgcgagctggtggagaaatatgacgccgtgattgcgctcgaagacttaaattctgggttcaagaactcccgcgtgaaggtggaaaaacaggtgtatcagaaattcgagaaaatgctgatcgacaaactcaattatatggtggataagaagtccaacccgtgtgccacagggggcgcgctgaagggctatcagatcaccaacaagttcgagagcttcaagagcatgagcacccagaacgggtttattttctacatcccggcgtggctcacctccaagattgacccgagcaccggcttcgtgaacctcctgaagacaaagtatacctccattgccgacagcaagaagtttatctcctccttcgaccgcattatgtatgtgccggaggaggacctcttcgagttcgccctcgactacaaaaacttcagccgcacagatgcggattacatcaagaagtggaagctgtactcctacgggaacaggatccgcatcttcaggaatccaaaaaaaaataacgtctttgactgggaggaagtgtgcctgacatccgcctacaaggaactgttcaataaatacggcatcaattaccagcagggcgacattcgcgccctcctctgtgagcagtccgacaaagcgttttactccagcttcatggccctcatgtccctgatgctccaaatgaggaatagcatcacagggcgcaccgacgtcgacttcctcatcagcccggtgaagaactccgacgggatcttttacgactcccgcaactatgaggcgcaagagaatgcgatcctcccgaagaacgccgatgcgaacggggcctataatatcgccaggaaagtgctctgggccatcgggcagttcaaaaaggcggaggatgagaagctcgacaaggtgaaaattgccatttccaacaaggagtggctggagtacgcgcagacctccgtgaagcacggctcctctggcagctccggctctagcggctcctctggcagctccggctccaagctggagaagtttacaaactgttacagcctctccaaaaccctcaggtttaaagcgatcccggtgggcaagacccaggagaacatcgacaacaagaggctcctggtggaagacgagaagcgcgccgaagactacaagggcgtgaagaagctgctcgataggtactacctcagctttattaacgacgtgctgcacagcatcaaactcaagaatctcaacaactacatctccctcttccgcaaaaagacctctggtggttcttctggtggttctagcggcagcgagactcccgggacctcagagtccgccacacccgaaagttctggtggttcttctggtggttcttctgaggttgaattttcacatgagtattggatgagacacgctcttaccttggctaagagagcaagggatgagagagaagttccagtgggagcagttcttgtgttgaacaatagagttattggagagggttggaacaggtaagtatcaaggttacaagacaggtttaaggagaccaatagaaactgggcttgtcgagacagagaagactcttgcgtttctgataggcacctattggtcttactgacatccactttgcctttctctccacagggctattggacttcatgatcctactgctcacgcagaaattatggcacttagacaaggtggacttgttatgcagaactacaggcttatcgatgctactctttatgttacattcgagccatgtgtgatgtgcgctggagcaatgattcattctaggattggaagggttgtgttcggtgttagaaactctaagaggggagctgcaggttcacttatgaacgttttgaattatcctggtatgaaccacagagtggagattactgaaggtattttggcagatgaatgtgctgcacttttgtgcgatttttacagaatgcctagacaagtgttcaacgctcaaaagaaggcacaatcttctattaac

SEQ ID NO: 510 - DNA, 4456 bp, synthetic construct
  source 1..4456: mol_type = other DNA
ggctataccagcgacgaggaggtgctggaagtcttccgcaacacactgaataagaatagcgagattttctcctccatcaagaagctcgagaagctctttaagaactttgacgagtacagctccgccgggattttcgtgaagaacgggccggcgatcagcaccatctccaaggacatctttggcgagtggaacgtcatcagggacaagtggaacgccgagtacgacgacatccacctgaagaagaaggcggtggtgaccgagaagtatgaggacgatcgcaggaagtccttcaaaaaaatcggctccttcagcctcgaacagctccaggagtatgccgatgcggatctgtccgtcgtcgagaagctgaaggaaatcatcattcagaaggtcgacgagatctataaagtgtacgggtccagcgagaagctgttcgacgccgactttgtgctcgagaagtccctcaaaaagaatgacgccgtggtggccattatgaaagacctgctcgactccgtgaagtccttcgaaaattacattaaagcgttctttggggaggggaaggaaactaacagggatgagtccttctatggcgactttgtcctcgcgtacgacatcctgctgaaggtcgaccacatttacgacgcgatccgcaactacgtgacacagaagccgtactccaaagacaagttcaagctgtacttccagaacccgcaatttatggggggctgggacaaggataaagagacagactaccgcgcgacaattctccgctatggctccaaatactatctggccatcatggacaagaagtacgcgaagtgcctgcagaagatcgacaaagacgacgtcaatggcaactatgaaaagatcaactacaagctgctgccgggcccgaacaagatgctcccgaaggtgttcttcagcaagaagtggatggcctactacaatccaagcgaggatattcagaaaatctataaaaacgggaccttcaagaagggggacatgtttaacctcaacgactgccacaagctcattgatttcttcaaggatagcatttcccgctacccgaaatggtccaatgcgtacgattttaacttctccgagacagaaaagtacaaagacatcgcgggcttttacagggaggtggaggagcaagggtataaagtttcttttgaatccgcgagcaagaaggaagtcgacaagctcgtcgaggagggcaagctctacatgttccaaatttataacaaggacttttccgacaagagccatgggaccccaaacctccacaccatgtacttcaaactgctctttgacgagaacaaccacgggcaaatcaggctgagcggcggcgccgaattattcatgcgcagggcctccctcaagaaggaagagctggtcgtccatccagccaattccccgatcgcgaacaagaacccggacaatccgaaaaagaccaccaccctgtcctacgacgtctacaaggacaaacgcttcagcgaagaccagtacgaattacacatcccaattgcgattaataagtgcccaaagaatatcttcaaaattaatacagaggtcagggtgctgctcaaacacgacgacaatccgtatgtcatcggcattgccaggggcgagcgcaatctgctctatatcgtggtcgtggatgggaagggcaatattgtggagcagtactccctgaacgagattatcaacaacttcaatgggattaggattaagaccgactatcacagcctgctcgacaagaaagaaaaagagaggtttgaggcccgccaaaactggacctccattgagaatatcaaagaattaaaggccggctatatttcccaagtcgtccacaagatctgcgagctggtggagaaatatgacgccgtgattgcgctcgaagacttaaattctgggttcaagaactcccgcgtgaaggtggaaaaacaggtgtatcagaaattcgagaaaatgctgatcgacaaactcaattatatggtggataagaagtccaacccgtgtgccacagggggcgcgctgaagggctatcagatcaccaacaagttcgagagcttcaagagcatgagcacccagaacgggtttattttctacatcccggcgtggctcacctccaagattgacccgagcaccggcttcgtgaacctcctgaagacaaagtatacctccattgccgacagcaagaagtttatctcctccttcgaccgcattatgtatgtgccggaggaggacctcttcgagttcgccctcgactacaaaaacttcagccgcacagatgcggattacatcaagaagtggaagctgtactcctacgggaacaggatccgcatcttcaggaatccaaaaaaaaataacgtctttgactgggaggaagtgtgcctgacatccgcctacaaggaactgttcaataaatacggcatcaattaccagcagggcgacattcgcgccctcctctgtgagcagtccgacaaagcgttttactccagcttcatggccctcatgtccctgatgctccaaatgaggaatagcatcacagggcgcaccgacgtcgacttcctcatcagcccggtgaagaactccgacgggatcttttacgactcccgcaactatgaggcgcaagagaatgcgatcctcccgaagaacgccgatgcgaacggggcctataatatcgccaggaaagtgctctgggccatcgggcagttcaaaaaggcggaggatgagaagctcgacaaggtgaaaattgccatttccaacaaggagtggctggagtacgcgcagacctccgtgaagcacggctcctctggcagctccggctctagcggctcctctggcagctccggctccaagctggagaagtttacaaactgttacagcctctccaaaaccctcaggtttaaagcgatcccggtgggcaagacccaggagaacatcgacaacaagaggctcctggtggaagacgagaagcgcgccgaagactacaagggcgtgaagaagctgctcgataggtactacctcagctttattaacgacgtgctgcacagcatcaaactcaagaatctcaacaactacatctccctcttccgcaaaaagacccgcaccgagaaggagaacaaggagctggagaacctggagatcaacctccgcaaggaaatcgccaaagcgttcaagggcaatgaagggtacaagagcctcttcaagaaagacatcatcgaaactatcctcccagagtttctcgatgacaaggacgagatcgcgctggtgaactcctttaacgggttcacaaccgcgtttaccggcttctttgataacagggaaaatatgttctccgaggaggccaagtccaccagcatcgccttcaggtgtatcaacgagaacctcacccgctacatttccaatatggacattttcgagaaggtggatgcgatcttcgataagcacgaggtgcaggagatcaaagagaagattctcaattccgattatgacgtcgaggatttcttcgaaggggagttctttaattttgtgctcacacaagagggcattgacgtgtacaacgcgattatcgggggcttcgtcacagagtccggggagaagattaaggggctgaatgagtacatcaatctgtacaatcagaagaccaagcagaaactgccgaaattcaagccgctctacaagcaagtcctgtccgatagggaaagcctctccttctacggcgagtctggtggttcttctggtggttctagcggcagcgagactcccgggacctcagagtccgccacacccgaaagttctggtggttcttctggtggttcttctgaggttgaattttcacatgagtattggatgagacacgctcttaccttggctaagagagcaagggatgagagagaagttccagtgggagcagttcttgtgttgaacaatagagttattggagagggttggaacaggtaagtatcaaggttacaagacaggtttaaggagaccaatagaaactgggcttgtcgagacagagaagactcttgcgtttctgataggcacctattggtcttactgacatccactttgcctttctctccacagggctattggacttcatgatcctactgctcacgcagaaattatggcacttagacaaggtggacttgttatgcagaactacaggcttatcgatgctactctttatgttacattcgagccatgtgtgatgtgcgctggagcaatgattcattctaggattggaagggttgtgttcggtgttagaaactctaagaggggagctgcaggttcacttatgaacgttttgaattatcctggtatgaaccacagagtggagattactgaaggtattttggcagatgaatgtgctgcacttttgtgcgatttttacagaatgcctagacaagtgttcaacgctcaaaagaaggcacaatcttctattaac

SEQ ID NO: 511 - DNA, 4456 bp, synthetic construct
  source 1..4456: mol_type = other DNA
tccgacgggatcttttacgactcccgcaactatgaggcgcaagagaatgcgatcctcccgaagaacgccgatgcgaacggggcctataatatcgccaggaaagtgctctgggccatcgggcagttcaaaaaggcggaggatgagaagctcgacaaggtgaaaattgccatttccaacaaggagtggctggagtacgcgcagacctccgtgaagcacggctcctctggcagctccggctctagcggctcctctggcagctccggctccaagctggagaagtttacaaactgttacagcctctccaaaaccctcaggtttaaagcgatcccggtgggcaagacccaggagaacatcgacaacaagaggctcctggtggaagacgagaagcgcgccgaagactacaagggcgtgaagaagctgctcgataggtactacctcagctttattaacgacgtgctgcacagcatcaaactcaagaatctcaacaactacatctccctcttccgcaaaaagacccgcaccgagaaggagaacaaggagctggagaacctggagatcaacctccgcaaggaaatcgccaaagcgttcaagggcaatgaagggtacaagagcctcttcaagaaagacatcatcgaaactatcctcccagagtttctcgatgacaaggacgagatcgcgctggtgaactcctttaacgggttcacaaccgcgtttaccggcttctttgataacagggaaaatatgttctccgaggaggccaagtccaccagcatcgccttcaggtgtatcaacgagaacctcacccgctacatttccaatatggacattttcgagaaggtggatgcgatcttcgataagcacgaggtgcaggagatcaaagagaagattctcaattccgattatgacgtcgaggatttcttcgaaggggagttctttaattttgtgctcacacaagagggcattgacgtgtacaacgcgattatcgggggcttcgtcacagagtccggggagaagattaaggggctgaatgagtacatcaatctgtacaatcagaagaccaagcagaaactgccgaaattcaagccgctctacaagcaagtcctgtccgatagggaaagcctctccttctacggcgagggctataccagcgacgaggaggtgctggaagtcttccgcaacacactgaataagaatagcgagattttctcctccatcaagaagctcgagaagctctttaagaactttgacgagtacagctccgccgggattttcgtgaagaacgggccggcgatcagcaccatctccaaggacatctttggcgagtggaacgtcatcagggacaagtggaacgccgagtacgacgacatccacctgaagaagaaggcggtggtgaccgagaagtatgaggacgatcgcaggaagtccttcaaaaaaatcggctccttcagcctcgaacagctccaggagtatgccgatgcggatctgtccgtcgtcgagaagctgaaggaaatcatcattcagaaggtcgacgagatctataaagtgtacgggtccagcgagaagctgttcgacgccgactttgtgctcgagaagtccctcaaaaagaatgacgccgtggtggccattatgaaagacctgctcgactccgtgaagtccttcgaaaattacattaaagcgttctttggggaggggaaggaaactaacagggatgagtccttctatggcgactttgtcctcgcgtacgacatcctgctgaaggtcgaccacatttacgacgcgatccgcaactacgtgacacagaagccgtactccaaagacaagttcaagctgtacttccagaacccgcaatttatggggggctgggacaaggataaagagacagactaccgcgcgacaattctccgctatggctccaaatactatctggccatcatggacaagaagtacgcgaagtgcctgcagaagatcgacaaagacgacgtcaatggcaactatgaaaagatcaactacaagctgctgccgggcccgaacaagatgctcccgaaggtgttcttcagcaagaagtggatggcctactacaatccaagcgaggatattcagaaaatctataaaaacgggaccttcaagaagggggacatgtttaacctcaacgactgccacaagctcattgatttcttcaaggatagcatttcccgctacccgaaatggtccaatgcgtacgattttaacttctccgagacagaaaagtacaaagacatcgcgggcttttacagggaggtggaggagcaagggtataaagtttcttttgaatccgcgagcaagaaggaagtcgacaagctcgtcgaggagggcaagctctacatgttccaaatttataacaaggacttttccgacaagagccatgggaccccaaacctccacaccatgtacttcaaactgctctttgacgagaacaaccacgggcaaatcaggctgagcggcggcgccgaattattcatgcgcagggcctccctcaagaaggaagagctggtcgtccatccagccaattccccgatcgcgaacaagaacccggacaatccgaaaaagaccaccaccctgtcctacgacgtctacaaggacaaacgcttcagcgaagaccagtacgaattacacatcccaattgcgattaataagtgcccaaagaatatcttcaaaattaatacagaggtcagggtgctgctcaaacacgacgacaatccgtatgtcatcggcattgccaggggcgagcgcaatctgctctatatcgtggtcgtggatgggaagggcaatattgtggagcagtactccctgaacgagattatcaacaacttcaatgggattaggattaagaccgactatcacagcctgctcgacaagaaagaaaaagagaggtttgaggcccgccaaaactggacctccattgagaatatcaaagaattaaaggccggctatatttcccaagtcgtccacaagatctgcgagctggtggagaaatatgacgccgtgattgcgctcgaagacttaaattctgggttcaagaactcccgcgtgaaggtggaaaaacaggtgtatcagaaattcgagaaaatgctgatcgacaaactcaattatatggtggataagaagtccaacccgtgtgccacagggggcgcgctgaagggctatcagatcaccaacaagttcgagagcttcaagagcatgagcacccagaacgggtttattttctacatcccggcgtggctcacctccaagattgacccgagcaccggcttcgtgaacctcctgaagacaaagtatacctccattgccgacagcaagaagtttatctcctccttcgaccgcattatgtatgtgccggaggaggacctcttcgagttcgccctcgactacaaaaacttcagccgcacagatgcggattacatcaagaagtggaagctgtactcctacgggaacaggatccgcatcttcaggaatccaaaaaaaaataacgtctttgactgggaggaagtgtgcctgacatccgcctacaaggaactgttcaataaatacggcatcaattaccagcagggcgacattcgcgccctcctctgtgagcagtccgacaaagcgttttactccagcttcatggccctcatgtccctgatgctccaaatgaggaatagcatcacagggcgcaccgacgtcgacttcctcatcagcccggtgaagaactctggtggttcttctggtggttctagcggcagcgagactcccgggacctcagagtccgccacacccgaaagttctggtggttcttctggtggttcttctgaggttgaattttcacatgagtattggatgagacacgctcttaccttggctaagagagcaagggatgagagagaagttccagtgggagcagttcttgtgttgaacaatagagttattggagagggttggaacaggtaagtatcaaggttacaagacaggtttaaggagaccaatagaaactgggcttgtcgagacagagaagactcttgcgtttctgataggcacctattggtcttactgacatccactttgcctttctctccacagggctattggacttcatgatcctactgctcacgcagaaattatggcacttagacaaggtggacttgttatgcagaactacaggcttatcgatgctactctttatgttacattcgagccatgtgtgatgtgcgctggagcaatgattcattctaggattggaagggttgtgttcggtgttagaaactctaagaggggagctgcaggttcacttatgaacgttttgaattatcctggtatgaaccacagagtggagattactgaaggtattttggcagatgaatgtgctgcacttttgtgcgatttttacagaatgcctagacaagtgttcaacgctcaaaagaaggcacaatcttctattaac

SEQ ID NO: 512 - DNA, 4456 bp, synthetic construct
  source 1..4456: mol_type = other DNA
aaagacaagttcaagctgtacttccagaacccgcaatttatggggggctgggacaaggataaagagacagactaccgcgcgacaattctccgctatggctccaaatactatctggccatcatggacaagaagtacgcgaagtgcctgcagaagatcgacaaagacgacgtcaatggcaactatgaaaagatcaactacaagctgctgccgggcccgaacaagatgctcccgaaggtgttcttcagcaagaagtggatggcctactacaatccaagcgaggatattcagaaaatctataaaaacgggaccttcaagaagggggacatgtttaacctcaacgactgccacaagctcattgatttcttcaaggatagcatttcccgctacccgaaatggtccaatgcgtacgattttaacttctccgagacagaaaagtacaaagacatcgcgggcttttacagggaggtggaggagcaagggtataaagtttcttttgaatccgcgagcaagaaggaagtcgacaagctcgtcgaggagggcaagctctacatgttccaaatttataacaaggacttttccgacaagagccatgggaccccaaacctccacaccatgtacttcaaactgctctttgacgagaacaaccacgggcaaatcaggctgagcggcggcgccgaattattcatgcgcagggcctccctcaagaaggaagagctggtcgtccatccagccaattccccgatcgcgaacaagaacccggacaatccgaaaaagaccaccaccctgtcctacgacgtctacaaggacaaacgcttcagcgaagaccagtacgaattacacatcccaattgcgattaataagtgcccaaagaatatcttcaaaattaatacagaggtcagggtgctgctcaaacacgacgacaatccgtatgtcatcggcattgccaggggcgagcgcaatctgctctatatcgtggtcgtggatgggaagggcaatattgtggagcagtactccctgaacgagattatcaacaacttcaatgggattaggattaagaccgactatcacagcctgctcgacaagaaagaaaaagagaggtttgaggcccgccaaaactggacctccattgagaatatcaaagaattaaaggccggctatatttcccaagtcgtccacaagatctgcgagctggtggagaaatatgacgccgtgattgcgctcgaagacttaaattctgggttcaagaactcccgcgtgaaggtggaaaaacaggtgtatcagaaattcgagaaaatgctgatcgacaaactcaattatatggtggataagaagtccaacccgtgtgccacagggggcgcgctgaagggctatcagatcaccaacaagttcgagagcttcaagagcatgagcacccagaacgggtttattttctacatcccggcgtggctcacctccaagattgacccgagcaccggcttcgtgaacctcctgaagacaaagtatacctccattgccgacagcaagaagtttatctcctccttcgaccgcattatgtatgtgccggaggaggacctcttcgagttcgccctcgactacaaaaacttcagccgcacagatgcggattacatcaagaagtggaagctgtactcctacgggaacaggatccgcatcttcaggaatccaaaaaaaaataacgtctttgactgggaggaagtgtgcctgacatccgcctacaaggaactgttcaataaatacggcatcaattaccagcagggcgacattcgcgccctcctctgtgagcagtccgacaaagcgttttactccagcttcatggccctcatgtccctgatgctccaaatgaggaatagcatcacagggcgcaccgacgtcgacttcctcatcagcccggtgaagaactccgacgggatcttttacgactcccgcaactatgaggcgcaagagaatgcgatcctcccgaagaacgccgatgcgaacggggcctataatatcgccaggaaagtgctctgggccatcgggcagttcaaaaaggcggaggatgagaagctcgacaaggtgaaaattgccatttccaacaaggagtggctggagtacgcgcagacctccgtgaagcacggctcctctggcagctccggctctagcggctcctctggcagctccggctccaagctggagaagtttacaaactgttacagcctctccaaaaccctcaggtttaaagcgatcccggtgggcaagacccaggagaacatcgacaacaagaggctcctggtggaagacgagaagcgcgccgaagactacaagggcgtgaagaagctgctcgataggtactacctcagctttattaacgacgtgctgcacagcatcaaactcaagaatctcaacaactacatctccctcttccgcaaaaagacccgcaccgagaaggagaacaaggagctggagaacctggagatcaacctccgcaaggaaatcgccaaagcgttcaagggcaatgaagggtacaagagcctcttcaagaaagacatcatcgaaactatcctcccagagtttctcgatgacaaggacgagatcgcgctggtgaactcctttaacgggttcacaaccgcgtttaccggcttctttgataacagggaaaatatgttctccgaggaggccaagtccaccagcatcgccttcaggtgtatcaacgagaacctcacccgctacatttccaatatggacattttcgagaaggtggatgcgatcttcgataagcacgaggtgcaggagatcaaagagaagattctcaattccgattatgacgtcgaggatttcttcgaaggggagttctttaattttgtgctcacacaagagggcattgacgtgtacaacgcgattatcgggggcttcgtcacagagtccggggagaagattaaggggctgaatgagtacatcaatctgtacaatcagaagaccaagcagaaactgccgaaattcaagccgctctacaagcaagtcctgtccgatagggaaagcctctccttctacggcgagggctataccagcgacgaggaggtgctggaagtcttccgcaacacactgaataagaatagcgagattttctcctccatcaagaagctcgagaagctctttaagaactttgacgagtacagctccgccgggattttcgtgaagaacgggccggcgatcagcaccatctccaaggacatctttggcgagtggaacgtcatcagggacaagtggaacgccgagtacgacgacatccacctgaagaagaaggcggtggtgaccgagaagtatgaggacgatcgcaggaagtccttcaaaaaaatcggctccttcagcctcgaacagctccaggagtatgccgatgcggatctgtccgtcgtcgagaagctgaaggaaatcatcattcagaaggtcgacgagatctataaagtgtacgggtccagcgagaagctgttcgacgccgactttgtgctcgagaagtccctcaaaaagaatgacgccgtggtggccattatgaaagacctgctcgactccgtgaagtccttcgaaaattacattaaagcgttctttggggaggggaaggaaactaacagggatgagtccttctatggcgactttgtcctcgcgtacgacatcctgctgaaggtcgaccacatttacgacgcgatccgcaactacgtgacacagaagccgtactcctctggtggttcttctggtggttctagcggcagcgagactcccgggacctcagagtccgccacacccgaaagttctggtggttcttctggtggttcttctgaggttgaattttcacatgagtattggatgagacacgctcttaccttggctaagagagcaagggatgagagagaagttccagtgggagcagttcttgtgttgaacaatagagttattggagagggttggaacaggtaagtatcaaggttacaagacaggtttaaggagaccaatagaaactgggcttgtcgagacagagaagactcttgcgtttctgataggcacctattggtcttactgacatccactttgcctttctctccacagggctattggacttcatgatcctactgctcacgcagaaattatggcacttagacaaggtggacttgttatgcagaactacaggcttatcgatgctactctttatgttacattcgagccatgtgtgatgtgcgctggagcaatgattcattctaggattggaagggttgtgttcggtgttagaaactctaagaggggagctgcaggttcacttatgaacgttttgaattatcctggtatgaaccacagagtggagattactgaaggtattttggcagatgaatgtgctgcacttttgtgcgatttttacagaatgcctagacaagtgttcaacgctcaaaagaaggcacaatcttctattaac

SEQ ID NO: 513 - DNA, 4456 bp, synthetic construct
  source 1..4456: mol_type = other DNA
aagtccctcaaaaagaatgacgccgtggtggccattatgaaagacctgctcgactccgtgaagtccttcgaaaattacattaaagcgttctttggggaggggaaggaaactaacagggatgagtccttctatggcgactttgtcctcgcgtacgacatcctgctgaaggtcgaccacatttacgacgcgatccgcaactacgtgacacagaagccgtactccaaagacaagttcaagctgtacttccagaacccgcaatttatggggggctgggacaaggataaagagacagactaccgcgcgacaattctccgctatggctccaaatactatctggccatcatggacaagaagtacgcgaagtgcctgcagaagatcgacaaagacgacgtcaatggcaactatgaaaagatcaactacaagctgctgccgggcccgaacaagatgctcccgaaggtgttcttcagcaagaagtggatggcctactacaatccaagcgaggatattcagaaaatctataaaaacgggaccttcaagaagggggacatgtttaacctcaacgactgccacaagctcattgatttcttcaaggatagcatttcccgctacccgaaatggtccaatgcgtacgattttaacttctccgagacagaaaagtacaaagacatcgcgggcttttacagggaggtggaggagcaagggtataaagtttcttttgaatccgcgagcaagaaggaagtcgacaagctcgtcgaggagggcaagctctacatgttccaaatttataacaaggacttttccgacaagagccatgggaccccaaacctccacaccatgtacttcaaactgctctttgacgagaacaaccacgggcaaatcaggctgagcggcggcgccgaattattcatgcgcagggcctccctcaagaaggaagagctggtcgtccatccagccaattccccgatcgcgaacaagaacccggacaatccgaaaaagaccaccaccctgtcctacgacgtctacaaggacaaacgcttcagcgaagaccagtacgaattacacatcccaattgcgattaataagtgcccaaagaatatcttcaaaattaatacagaggtcagggtgctgctcaaacacgacgacaatccgtatgtcatcggcattgccaggggcgagcgcaatctgctctatatcgtggtcgtggatgggaagggcaatattgtggagcagtactccctgaacgagattatcaacaacttcaatgggattaggattaagaccgactatcacagcctgctcgacaagaaagaaaaagagaggtttgaggcccgccaaaactggacctccattgagaatatcaaagaattaaaggccggctatatttcccaagtcgtccacaagatctgcgagctggtggagaaatatgacgccgtgattgcgctcgaagacttaaattctgggttcaagaactcccgcgtgaaggtggaaaaacaggtgtatcagaaattcgagaaaatgctgatcgacaaactcaattatatggtggataagaagtccaacccgtgtgccacagggggcgcgctgaagggctatcagatcaccaacaagttcgagagcttcaagagcatgagcacccagaacgggtttattttctacatcccggcgtggctcacctccaagattgacccgagcaccggcttcgtgaacctcctgaagacaaagtatacctccattgccgacagcaagaagtttatctcctccttcgaccgcattatgtatgtgccggaggaggacctcttcgagttcgccctcgactacaaaaacttcagccgcacagatgcggattacatcaagaagtggaagctgtactcctacgggaacaggatccgcatcttcaggaatccaaaaaaaaataacgtctttgactgggaggaagtgtgcctgacatccgcctacaaggaactgttcaataaatacggcatcaattaccagcagggcgacattcgcgccctcctctgtgagcagtccgacaaagcgttttactccagcttcatggccctcatgtccctgatgctccaaatgaggaatagcatcacagggcgcaccgacgtcgacttcctcatcagcccggtgaagaactccgacgggatcttttacgactcccgcaactatgaggcgcaagagaatgcgatcctcccgaagaacgccgatgcgaacggggcctataatatcgccaggaaagtgctctgggccatcgggcagttcaaaaaggcggaggatgagaagctcgacaaggtgaaaattgccatttccaacaaggagtggctggagtacgcgcagacctccgtgaagcacggctcctctggcagctccggctctagcggctcctctggcagctccggctccaagctggagaagtttacaaactgttacagcctctccaaaaccctcaggtttaaagcgatcccggtgggcaagacccaggagaacatcgacaacaagaggctcctggtggaagacgagaagcgcgccgaagactacaagggcgtgaagaagctgctcgataggtactacctcagctttattaacgacgtgctgcacagcatcaaactcaagaatctcaacaactacatctccctcttccgcaaaaagacccgcaccgagaaggagaacaaggagctggagaacctggagatcaacctccgcaaggaaatcgccaaagcgttcaagggcaatgaagggtacaagagcctcttcaagaaagacatcatcgaaactatcctcccagagtttctcgatgacaaggacgagatcgcgctggtgaactcctttaacgggttcacaaccgcgtttaccggcttctttgataacagggaaaatatgttctccgaggaggccaagtccaccagcatcgccttcaggtgtatcaacgagaacctcacccgctacatttccaatatggacattttcgagaaggtggatgcgatcttcgataagcacgaggtgcaggagatcaaagagaagattctcaattccgattatgacgtcgaggatttcttcgaaggggagttctttaattttgtgctcacacaagagggcattgacgtgtacaacgcgattatcgggggcttcgtcacagagtccggggagaagattaaggggctgaatgagtacatcaatctgtacaatcagaagaccaagcagaaactgccgaaattcaagccgctctacaagcaagtcctgtccgatagggaaagcctctccttctacggcgagggctataccagcgacgaggaggtgctggaagtcttccgcaacacactgaataagaatagcgagattttctcctccatcaagaagctcgagaagctctttaagaactttgacgagtacagctccgccgggattttcgtgaagaacgggccggcgatcagcaccatctccaaggacatctttggcgagtggaacgtcatcagggacaagtggaacgccgagtacgacgacatccacctgaagaagaaggcggtggtgaccgagaagtatgaggacgatcgcaggaagtccttcaaaaaaatcggctccttcagcctcgaacagctccaggagtatgccgatgcggatctgtccgtcgtcgagaagctgaaggaaatcatcattcagaaggtcgacgagatctataaagtgtacgggtccagcgagaagctgttcgacgccgactttgtgctcgagtctggtggttcttctggtggttctagcggcagcgagactcccgggacctcagagtccgccacacccgaaagttctggtggttcttctggtggttcttctgaggttgaattttcacatgagtattggatgagacacgctcttaccttggctaagagagcaagggatgagagagaagttccagtgggagcagttcttgtgttgaacaatagagttattggagagggttggaacaggtaagtatcaaggttacaagacaggtttaaggagaccaatagaaactgggcttgtcgagacagagaagactcttgcgtttctgataggcacctattggtcttactgacatccactttgcctttctctccacagggctattggacttcatgatcctactgctcacgcagaaattatggcacttagacaaggtggacttgttatgcagaactacaggcttatcgatgctactctttatgttacattcgagccatgtgtgatgtgcgctggagcaatgattcattctaggattggaagggttgtgttcggtgttagaaactctaagaggggagctgcaggttcacttatgaacgttttgaattatcctggtatgaaccacagagtggagattactgaaggtattttggcagatgaatgtgctgcacttttgtgcgatttttacagaatgcctagacaagtgttcaacgctcaaaagaaggcacaatcttctattaac

SEQ ID NO: 514 - DNA, 4456 bp, synthetic construct
  source 1..4456: mol_type = other DNA
tccgacaaagcgttttactccagcttcatggccctcatgtccctgatgctccaaatgaggaatagcatcacagggcgcaccgacgtcgacttcctcatcagcccggtgaagaactccgacgggatcttttacgactcccgcaactatgaggcgcaagagaatgcgatcctcccgaagaacgccgatgcgaacggggcctataatatcgccaggaaagtgctctgggccatcgggcagttcaaaaaggcggaggatgagaagctcgacaaggtgaaaattgccatttccaacaaggagtggctggagtacgcgcagacctccgtgaagcacggctcctctggcagctccggctctagcggctcctctggcagctccggctccaagctggagaagtttacaaactgttacagcctctccaaaaccctcaggtttaaagcgatcccggtgggcaagacccaggagaacatcgacaacaagaggctcctggtggaagacgagaagcgcgccgaagactacaagggcgtgaagaagctgctcgataggtactacctcagctttattaacgacgtgctgcacagcatcaaactcaagaatctcaacaactacatctccctcttccgcaaaaagacccgcaccgagaaggagaacaaggagctggagaacctggagatcaacctccgcaaggaaatcgccaaagcgttcaagggcaatgaagggtacaagagcctcttcaagaaagacatcatcgaaactatcctcccagagtttctcgatgacaaggacgagatcgcgctggtgaactcctttaacgggttcacaaccgcgtttaccggcttctttgataacagggaaaatatgttctccgaggaggccaagtccaccagcatcgccttcaggtgtatcaacgagaacctcacccgctacatttccaatatggacattttcgagaaggtggatgcgatcttcgataagcacgaggtgcaggagatcaaagagaagattctcaattccgattatgacgtcgaggatttcttcgaaggggagttctttaattttgtgctcacacaagagggcattgacgtgtacaacgcgattatcgggggcttcgtcacagagtccggggagaagattaaggggctgaatgagtacatcaatctgtacaatcagaagaccaagcagaaactgccgaaattcaagccgctctacaagcaagtcctgtccgatagggaaagcctctccttctacggcgagggctataccagcgacgaggaggtgctggaagtcttccgcaacacactgaataagaatagcgagattttctcctccatcaagaagctcgagaagctctttaagaactttgacgagtacagctccgccgggattttcgtgaagaacgggccggcgatcagcaccatctccaaggacatctttggcgagtggaacgtcatcagggacaagtggaacgccgagtacgacgacatccacctgaagaagaaggcggtggtgaccgagaagtatgaggacgatcgcaggaagtccttcaaaaaaatcggctccttcagcctcgaacagctccaggagtatgccgatgcggatctgtccgtcgtcgagaagctgaaggaaatcatcattcagaaggtcgacgagatctataaagtgtacgggtccagcgagaagctgttcgacgccgactttgtgctcgagaagtccctcaaaaagaatgacgccgtggtggccattatgaaagacctgctcgactccgtgaagtccttcgaaaattacattaaagcgttctttggggaggggaaggaaactaacagggatgagtccttctatggcgactttgtcctcgcgtacgacatcctgctgaaggtcgaccacatttacgacgcgatccgcaactacgtgacacagaagccgtactccaaagacaagttcaagctgtacttccagaacccgcaatttatggggggctgggacaaggataaagagacagactaccgcgcgacaattctccgctatggctccaaatactatctggccatcatggacaagaagtacgcgaagtgcctgcagaagatcgacaaagacgacgtcaatggcaactatgaaaagatcaactacaagctgctgccgggcccgaacaagatgctcccgaaggtgttcttcagcaagaagtggatggcctactacaatccaagcgaggatattcagaaaatctataaaaacgggaccttcaagaagggggacatgtttaacctcaacgactgccacaagctcattgatttcttcaaggatagcatttcccgctacccgaaatggtccaatgcgtacgattttaacttctccgagacagaaaagtacaaagacatcgcgggcttttacagggaggtggaggagcaagggtataaagtttcttttgaatccgcgagcaagaaggaagtcgacaagctcgtcgaggagggcaagctctacatgttccaaatttataacaaggacttttccgacaagagccatgggaccccaaacctccacaccatgtacttcaaactgctctttgacgagaacaaccacgggcaaatcaggctgagcggcggcgccgaattattcatgcgcagggcctccctcaagaaggaagagctggtcgtccatccagccaattccccgatcgcgaacaagaacccggacaatccgaaaaagaccaccaccctgtcctacgacgtctacaaggacaaacgcttcagcgaagaccagtacgaattacacatcccaattgcgattaataagtgcccaaagaatatcttcaaaattaatacagaggtcagggtgctgctcaaacacgacgacaatccgtatgtcatcggcattgccaggggcgagcgcaatctgctctatatcgtggtcgtggatgggaagggcaatattgtggagcagtactccctgaacgagattatcaacaacttcaatgggattaggattaagaccgactatcacagcctgctcgacaagaaagaaaaagagaggtttgaggcccgccaaaactggacctccattgagaatatcaaagaattaaaggccggctatatttcccaagtcgtccacaagatctgcgagctggtggagaaatatgacgccgtgattgcgctcgaagacttaaattctgggttcaagaactcccgcgtgaaggtggaaaaacaggtgtatcagaaattcgagaaaatgctgatcgacaaactcaattatatggtggataagaagtccaacccgtgtgccacagggggcgcgctgaagggctatcagatcaccaacaagttcgagagcttcaagagcatgagcacccagaacgggtttattttctacatcccggcgtggctcacctccaagattgacccgagcaccggcttcgtgaacctcctgaagacaaagtatacctccattgccgacagcaagaagtttatctcctccttcgaccgcattatgtatgtgccggaggaggacctcttcgagttcgccctcgactacaaaaacttcagccgcacagatgcggattacatcaagaagtggaagctgtactcctacgggaacaggatccgcatcttcaggaatccaaaaaaaaataacgtctttgactgggaggaagtgtgcctgacatccgcctacaaggaactgttcaataaatacggcatcaattaccagcagggcgacattcgcgccctcctctgtgagcagtctggtggttcttctggtggttctagcggcagcgagactcccgggacctcagagtccgccacacccgaaagttctggtggttcttctggtggttcttctgaggttgaattttcacatgagtattggatgagacacgctcttaccttggctaagagagcaagggatgagagagaagttccagtgggagcagttcttgtgttgaacaatagagttattggagagggttggaacaggtaagtatcaaggttacaagacaggtttaaggagaccaatagaaactgggcttgtcgagacagagaagactcttgcgtttctgataggcacctattggtcttactgacatccactttgcctttctctccacagggctattggacttcatgatcctactgctcacgcagaaattatggcacttagacaaggtggacttgttatgcagaactacaggcttatcgatgctactctttatgttacattcgagccatgtgtgatgtgcgctggagcaatgattcattctaggattggaagggttgtgttcggtgttagaaactctaagaggggagctgcaggttcacttatgaacgttttgaattatcctggtatgaaccacagagtggagattactgaaggtattttggcagatgaatgtgctgcacttttgtgcgatttttacagaatgcctagacaagtgttcaacgctcaaaagaaggcacaatcttctattaac

SEQ ID NO: 515 - DNA, 4408 bp, synthetic construct
  source 1..4408: mol_type = other DNA
tctgaggttgaattttcacatgagtattggatgagacacgctcttaccttggctaagagagcaagggatgagagagaagttccagtgggagcagttcttgtgttgaacaatagagttattggagagggttggaacaggtaagtatcaaggttacaagacaggtttaaggagaccaatagaaactgggcttgtcgagacagagaagactcttgcgtttctgataggcacctattggtcttactgacatccactttgcctttctctccacagggctattggacttcatgatcctactgctcacgcagaaattatggcacttagacaaggtggacttgttatgcagaactacaggcttatcgatgctactctttatgttacattcgagccatgtgtgatgtgcgctggagcaatgattcattctaggattggaagggttgtgttcggtgttagaaactctaagaggggagctgcaggttcacttatgaacgttttgaattatcctggtatgaaccacagagtggagattactgaaggtattttggcagatgaatgtgctgcacttttgtgcgatttttacagaatgcctagacaagtgttcaacgctcaaaagaaggcacaatcttctattaactctggtggttcttctggtggttctagcggcagcgagactcccgggacctcagagtccgccacacccgaaagttctggtggttcttctggtggttcttccaagctggagaagtttacaaactgttacagcctctccaaaaccctcaggtttaaagcgatcccggtgggcaagacccaggagaacatcgacaacaagaggctcctggtggaagacgagaagcgcgccgaagactacaagggcgtgaagaagctgctcgataggtactacctcagctttattaacgacgtgctgcacagcatcaaactcaagaatctcaacaactacatctccctcttccgcaaaaagacccgcaccgagaaggagaacaaggagctggagaacctggagatcaacctccgcaaggaaatcgccaaagcgttcaagggcaatgaagggtacaagagcctcttcaagaaagacatcatcgaaactatcctcccagagtttctcgatgacaaggacgagatcgcgctggtgaactcctttaacgggttcacaaccgcgtttaccggcttctttgataacagggaaaatatgttctccgaggaggccaagtccaccagcatcgccttcaggtgtatcaacgagaacctcacccgctacatttccaatatggacattttcgagaaggtggatgcgatcttcgataagcacgaggtgcaggagatcaaagagaagattctcaattccgattatgacgtcgaggatttcttcgaaggggagttctttaattttgtgctcacacaagagggcattgacgtgtacaacgcgattatcgggggcttcgtcacagagtccggggagaagattaaggggctgaatgagtacatcaatctgtacaatcagaagaccaagcagaaactgccgaaattcaagccgctctacaagcaagtcctgtccgatagggaaagcctctccttctacggcgagggctataccagcgacgaggaggtgctggaagtcttccgcaacacactgaataagaatagcgagattttctcctccatcaagaagctcgagaagctctttaagaactttgacgagtacagctccgccgggattttcgtgaagaacgggccggcgatcagcaccatctccaaggacatctttggcgagtggaacgtcatcagggacaagtggaacgccgagtacgacgacatccacctgaagaagaaggcggtggtgaccgagaagtatgaggacgatcgcaggaagtccttcaaaaaaatcggctccttcagcctcgaacagctccaggagtatgccgatgcggatctgtccgtcgtcgagaagctgaaggaaatcatcattcagaaggtcgacgagatctataaagtgtacgggtccagcgagaagctgttcgacgccgactttgtgctcgagaagtccctcaaaaagaatgacgccgtggtggccattatgaaagacctgctcgactccgtgaagtccttcgaaaattacattaaagcgttctttggggaggggaaggaaactaacagggatgagtccttctatggcgactttgtcctcgcgtacgacatcctgctgaaggtcgaccacatttacgacgcgatccgcaactacgtgacacagaagccgtactccaaagacaagttcaagctgtacttccagaacccgcaatttatggggggctgggacaaggataaagagacagactaccgcgcgacaattctccgctatggctccaaatactatctggccatcatggacaagaagtacgcgaagtgcctgcagaagatcgacaaagacgacgtcaatggcaactatgaaaagatcaactacaagctgctgccgggcccgaacaagatgctcccgaaggtgttcttcagcaagaagtggatggcctactacaatccaagcgaggatattcagaaaatctataaaaacgggaccttcaagaagggggacatgtttaacctcaacgactgccacaagctcattgatttcttcaaggatagcatttcccgctacccgaaatggtccaatgcgtacgattttaacttctccgagacagaaaagtacaaagacatcgcgggcttttacagggaggtggaggagcaagggtataaagtttcttttgaatccgcgagcaagaaggaagtcgacaagctcgtcgaggagggcaagctctacatgttccaaatttataacaaggacttttccgacaagagccatgggaccccaaacctccacaccatgtacttcaaactgctctttgacgagaacaaccacgggcaaatcaggctgagcggcggcgccgaattattcatgcgcagggcctccctcaagaaggaagagctggtcgtccatccagccaattccccgatcgcgaacaagaacccggacaatccgaaaaagaccaccaccctgtcctacgacgtctacaaggacaaacgcttcagcgaagaccagtacgaattacacatcccaattgcgattaataagtgcccaaagaatatcttcaaaattaatacagaggtcagggtgctgctcaaacacgacgacaatccgtatgtcatcggcattgccaggggcgagcgcaatctgctctatatcgtggtcgtggatgggaagggcaatattgtggagcagtactccctgaacgagattatcaacaacttcaatgggattaggattaagaccgactatcacagcctgctcgacaagaaagaaaaagagaggtttgaggcccgccaaaactggacctccattgagaatatcaaagaattaaaggccggctatatttcccaagtcgtccacaagatctgcgagctggtggagaaatatgacgccgtgattgcgctcgaagacttaaattctgggttcaagaactcccgcgtgaaggtggaaaaacaggtgtatcagaaattcgagaaaatgctgatcgacaaactcaattatatggtggataagaagtccaacccgtgtgccacagggggcgcgctgaagggctatcagatcaccaacaagttcgagagcttcaagagcatgagcacccagaacgggtttattttctacatcccggcgtggctcacctccaagattgacccgagcaccggcttcgtgaacctcctgaagacaaagtatacctccattgccgacagcaagaagtttatctcctccttcgaccgcattatgtatgtgccggaggaggacctcttcgagttcgccctcgactacaaaaacttcagccgcacagatgcggattacatcaagaagtggaagctgtactcctacgggaacaggatccgcatcttcaggaatccaaaaaaaaataacgtctttgactgggaggaagtgtgcctgacatccgcctacaaggaactgttcaataaatacggcatcaattaccagcagggcgacattcgcgccctcctctgtgagcagtccgacaaagcgttttactccagcttcatggccctcatgtccctgatgctccaaatgaggaatagcatcacagggcgcaccgacgtcgacttcctcatcagcccggtgaagaactccgacgggatcttttacgactcccgcaactatgaggcgcaagagaatgcgatcctcccgaagaacgccgatgcgaacggggcctataatatcgccaggaaagtgctctgggccatcgggcagttcaaaaaggcggaggatgagaagctcgacaaggtgaaaattgccatttccaacaaggagtggctggagtacgcgcagacctccgtgaagcac

SEQ ID NO: 516 - DNA, 4408 bp, synthetic construct
  source 1..4408: mol_type = other DNA
tccaagctggagaagtttacaaactgttacagcctctccaaaaccctcaggtttaaagcgatcccggtgggcaagacccaggagaacatcgacaacaagaggctcctggtggaagacgagaagcgcgccgaagactacaagggcgtgaagaagctgctcgataggtactacctcagctttattaacgacgtgctgcacagcatcaaactcaagaatctcaacaactacatctccctcttccgcaaaaagacccgcaccgagaaggagaacaaggagctggagaacctggagatcaacctccgcaaggaaatcgccaaagcgttcaagggcaatgaagggtacaagagcctcttcaagaaagacatcatcgaaactatcctcccagagtttctcgatgacaaggacgagatcgcgctggtgaactcctttaacgggttcacaaccgcgtttaccggcttctttgataacagggaaaatatgttctccgaggaggccaagtccaccagcatcgccttcaggtgtatcaacgagaacctcacccgctacatttccaatatggacattttcgagaaggtggatgcgatcttcgataagcacgaggtgcaggagatcaaagagaagattctcaattccgattatgacgtcgaggatttcttcgaaggggagttctttaattttgtgctcacacaagagggcattgacgtgtacaacgcgattatcgggggcttcgtcacagagtccggggagaagattaaggggctgaatgagtacatcaatctgtacaatcagaagaccaagcagaaactgccgaaattcaagccgctctacaagcaagtcctgtccgatagggaaagcctctccttctacggcgagggctataccagcgacgaggaggtgctggaagtcttccgcaacacactgaataagaatagcgagattttctcctccatcaagaagctcgagaagctctttaagaactttgacgagtacagctccgccgggattttcgtgaagaacgggccggcgatcagcaccatctccaaggacatctttggcgagtggaacgtcatcagggacaagtggaacgccgagtacgacgacatccacctgaagaagaaggcggtggtgaccgagaagtatgaggacgatcgcaggaagtccttcaaaaaaatcggctccttcagcctcgaacagctccaggagtatgccgatgcggatctgtccgtcgtcgagaagctgaaggaaatcatcattcagaaggtcgacgagatctataaagtgtacgggtccagcgagaagctgttcgacgccgactttgtgctcgagaagtccctcaaaaagaatgacgccgtggtggccattatgaaagacctgctcgactccgtgaagtccttcgaaaattacattaaagcgttctttggggaggggaaggaaactaacagggatgagtccttctatggcgactttgtcctcgcgtacgacatcctgctgaaggtcgaccacatttacgacgcgatccgcaactacgtgacacagaagccgtactccaaagacaagttcaagctgtacttccagaacccgcaatttatggggggctgggacaaggataaagagacagactaccgcgcgacaattctccgctatggctccaaatactatctggccatcatggacaagaagtacgcgaagtgcctgcagaagatcgacaaagacgacgtcaatggcaactatgaaaagatcaactacaagctgctgccgggcccgaacaagatgctcccgaaggtgttcttcagcaagaagtggatggcctactacaatccaagcgaggatattcagaaaatctataaaaacgggaccttcaagaagggggacatgtttaacctcaacgactgccacaagctcattgatttcttcaaggatagcatttcccgctacccgaaatggtccaatgcgtacgattttaacttctccgagacagaaaagtacaaagacatcgcgggcttttacagggaggtggaggagcaagggtataaagtttcttttgaatccgcgagcaagaaggaagtcgacaagctcgtcgaggagggcaagctctacatgttccaaatttataacaaggacttttccgacaagagccatgggaccccaaacctccacaccatgtacttcaaactgctctttgacgagaacaaccacgggcaaatcaggctgagcggcggcgccgaattattcatgcgcagggcctccctcaagaaggaagagctggtcgtccatccagccaattccccgatcgcgaacaagaacccggacaatccgaaaaagaccaccaccctgtcctacgacgtctacaaggacaaacgcttcagcgaagaccagtacgaattacacatcccaattgcgattaataagtgcccaaagaatatcttcaaaattaatacagaggtcagggtgctgctcaaacacgacgacaatccgtatgtcatcggcattgccaggggcgagcgcaatctgctctatatcgtggtcgtggatgggaagggcaatattgtggagcagtactccctgaacgagattatcaacaacttcaatgggattaggattaagaccgactatcacagcctgctcgacaagaaagaaaaagagaggtttgaggcccgccaaaactggacctccattgagaatatcaaagaattaaaggccggctatatttcccaagtcgtccacaagatctgcgagctggtggagaaatatgacgccgtgattgcgctcgaagacttaaattctgggttcaagaactcccgcgtgaaggtggaaaaacaggtgtatcagaaattcgagaaaatgctgatcgacaaactcaattatatggtggataagaagtccaacccgtgtgccacagggggcgcgctgaagggctatcagatcaccaacaagttcgagagcttcaagagcatgagcacccagaacgggtttattttctacatcccggcgtggctcacctccaagattgacccgagcaccggcttcgtgaacctcctgaagacaaagtatacctccattgccgacagcaagaagtttatctcctccttcgaccgcattatgtatgtgccggaggaggacctcttcgagttcgccctcgactacaaaaacttcagccgcacagatgcggattacatcaagaagtggaagctgtactcctacgggaacaggatccgcatcttcaggaatccaaaaaaaaataacgtctttgactgggaggaagtgtgcctgacatccgcctacaaggaactgttcaataaatacggcatcaattaccagcagggcgacattcgcgccctcctctgtgagcagtccgacaaagcgttttactccagcttcatggccctcatgtccctgatgctccaaatgaggaatagcatcacagggcgcaccgacgtcgacttcctcatcagcccggtgaagaactccgacgggatcttttacgactcccgcaactatgaggcgcaagagaatgcgatcctcccgaagaacgccgatgcgaacggggcctataatatcgccaggaaagtgctctgggccatcgggcagttcaaaaaggcggaggatgagaagctcgacaaggtgaaaattgccatttccaacaaggagtggctggagtacgcgcagacctccgtgaagcactctggtggttcttctggtggttctagcggcagcgagactcccgggacctcagagtccgccacacccgaaagttctggtggttcttctggtggttcttctgaggttgaattttcacatgagtattggatgagacacgctcttaccttggctaagagagcaagggatgagagagaagttccagtgggagcagttcttgtgttgaacaatagagttattggagagggttggaacaggtaagtatcaaggttacaagacaggtttaaggagaccaatagaaactgggcttgtcgagacagagaagactcttgcgtttctgataggcacctattggtcttactgacatccactttgcctttctctccacagggctattggacttcatgatcctactgctcacgcagaaattatggcacttagacaaggtggacttgttatgcagaactacaggcttatcgatgctactctttatgttacattcgagccatgtgtgatgtgcgctggagcaatgattcattctaggattggaagggttgtgttcggtgttagaaactctaagaggggagctgcaggttcacttatgaacgttttgaattatcctggtatgaaccacagagtggagattactgaaggtattttggcagatgaatgtgctgcacttttgtgcgatttttacagaatgcctagacaagtgttcaacgctcaaaagaaggcacaatcttctattaac

SEQ ID NO: 517 - DNA, 4275 bp, synthetic construct
  source 1..4275: mol_type = other DNA
tctgaggttgaattttcacatgagtattggatgagacacgctcttaccttggctaagagagcaagggatgagagagaagttccagtgggagcagttcttgtgttgaacaatagagttattggagagggttggaacagggctattggacttcatgatcctactgctcacgcagaaattatggcacttagacaaggtggacttgttatgcagaactacaggcttatcgatgctactctttatgttacattcgagccatgtgtgatgtgcgctggagcaatgattcattctaggattggaagggttgtgttcggtgttagaaactctaagaggggagctgcaggttcacttatgaacgttttgaattatcctggtatgaaccacagagtggagattactgaaggtattttggcagatgaatgtgctgcacttttgtgcgatttttacagaatgcctagacaagtgttcaacgctcaaaagaaggcacaatcttctattaactctggaggatctagcggaggatcctctggcagcgagacaccaggaacaagcgagtcagcaacaccagagagcagtggcggcagcagcggcggcagctccaagctggagaagtttacaaactgttacagcctctccaaaaccctcaggtttaaagcgatcccggtgggcaagacccaggagaacatcgacaacaagaggctcctggtggaagacgagaagcgcgccgaagactacaagggcgtgaagaagctgctcgataggtactacctcagctttattaacgacgtgctgcacagcatcaaactcaagaatctcaacaactacatctccctcttccgcaaaaagacccgcaccgagaaggagaacaaggagctggagaacctggagatcaacctccgcaaggaaatcgccaaagcgttcaagggcaatgaagggtacaagagcctcttcaagaaagacatcatcgaaactatcctcccagagtttctcgatgacaaggacgagatcgcgctggtgaactcctttaacgggttcacaaccgcgtttaccggcttctttgataacagggaaaatatgttctccgaggaggccaagtccaccagcatcgccttcaggtgtatcaacgagaacctcacccgctacatttccaatatggacattttcgagaaggtggatgcgatcttcgataagcacgaggtgcaggagatcaaagagaagattctcaattccgattatgacgtcgaggatttcttcgaaggggagttctttaattttgtgctcacacaagagggcattgacgtgtacaacgcgattatcgggggcttcgtcacagagtccggggagaagattaaggggctgaatgagtacatcaatctgtacaatcagaagaccaagcagaaactgccgaaattcaagccgctctacaagcaagtcctgtccgatagggaaagcctctccttctacggcgagggctataccagcgacgaggaggtgctggaagtcttccgcaacacactgaataagaatagcgagattttctcctccatcaagaagctcgagaagctctttaagaactttgacgagtacagctccgccgggattttcgtgaagaacgggccggcgatcagcaccatctccaaggacatctttggcgagtggaacgtcatcagggacaagtggaacgccgagtacgacgacatccacctgaagaagaaggcggtggtgaccgagaagtatgaggacgatcgcaggaagtccttcaaaaaaatcggctccttcagcctcgaacagctccaggagtatgccgatgcggatctgtccgtcgtcgagaagctgaaggaaatcatcattcagaaggtcgacgagatctataaagtgtacgggtccagcgagaagctgttcgacgccgactttgtgctcgagaagtccctcaaaaagaatgacgccgtggtggccattatgaaagacctgctcgactccgtgaagtccttcgaaaattacattaaagcgttctttggggaggggaaggaaactaacagggatgagtccttctatggcgactttgtcctcgcgtacgacatcctgctgaaggtcgaccacatttacgacgcgatccgcaactacgtgacacagaagccgtactccaaagacaagttcaagctgtacttccagaacccgcaatttatggggggctgggacaaggataaagagacagactaccgcgcgacaattctccgctatggctccaaatactatctggccatcatggacaagaagtacgcgaagtgcctgcagaagatcgacaaagacgacgtcaatggcaactatgaaaagatcaactacaagctgctgccgggcccgaacaagatgctcccgaaggtgttcttcagcaagaagtggatggcctactacaatccaagcgaggatattcagaaaatctataaaaacgggaccttcaagaagggggacatgtttaacctcaacgactgccacaagctcattgatttcttcaaggatagcatttcccgctacccgaaatggtccaatgcgtacgattttaacttctccgagacagaaaagtacaaagacatcgcgggcttttacagggaggtggaggagcaagggtataaagtttcttttgaatccgcgagcaagaaggaagtcgacaagctcgtcgaggagggcaagctctacatgttccaaatttataacaaggacttttccgacaagagccatgggaccccaaacctccacaccatgtacttcaaactgctctttgacgagaacaaccacgggcaaatcaggctgagcggcggcgccgaattattcatgcgcagggcctccctcaagaaggaagagctggtcgtccatccagccaattccccgatcgcgaacaagaacccggacaatccgaaaaagaccaccaccctgtcctacgacgtctacaaggacaaacgcttcagcgaagaccagtacgaattacacatcccaattgcgattaataagtgcccaaagaatatcttcaaaattaatacagaggtcagggtgctgctcaaacacgacgacaatccgtatgtcatcggcattgccaggggcgagcgcaatctgctctatatcgtggtcgtggatgggaagggcaatattgtggagcagtactccctgaacgagattatcaacaacttcaatgggattaggattaagaccgactatcacagcctgctcgacaagaaagaaaaagagaggtttgaggcccgccaaaactggacctccattgagaatatcaaagaattaaaggccggctatatttcccaagtcgtccacaagatctgcgagctggtggagaaatatgacgccgtgattgcgctcgaagacttaaattctgggttcaagaactcccgcgtgaaggtggaaaaacaggtgtatcagaaattcgagaaaatgctgatcgacaaactcaattatatggtggataagaagtccaacccgtgtgccacagggggcgcgctgaagggctatcagatcaccaacaagttcgagagcttcaagagcatgagcacccagaacgggtttattttctacatcccggcgtggctcacctccaagattgacccgagcaccggcttcgtgaacctcctgaagacaaagtatacctccattgccgacagcaagaagtttatctcctccttcgaccgcattatgtatgtgccggaggaggacctcttcgagttcgccctcgactacaaaaacttcagccgcacagatgcggattacatcaagaagtggaagctgtactcctacgggaacaggatccgcatcttcaggaatccaaaaaaaaataacgtctttgactgggaggaagtgtgcctgacatccgcctacaaggaactgttcaataaatacggcatcaattaccagcagggcgacattcgcgccctcctctgtgagcagtccgacaaagcgttttactccagcttcatggccctcatgtccctgatgctccaaatgaggaatagcatcacagggcgcaccgacgtcgacttcctcatcagcccggtgaagaactccgacgggatcttttacgactcccgcaactatgaggcgcaagagaatgcgatcctcccgaagaacgccgatgcgaacggggcctataatatcgccaggaaagtgctctgggccatcgggcagttcaaaaaggcggaggatgagaagctcgacaaggtgaaaattgccatttccaacaaggagtggctggagtacgcgcagacctccgtgaagcac

SEQ ID NO: 518 - DNA, 4272 bp, synthetic construct
  source 1..4272: mol_type = other DNA
tctgaggtggagttttcccacgagtactggatgagacatgccctgaccctggccaagagggcacgggatgagagggaggtgcctgtgggagccgtgctggtgctgaacaatagagtgatcggcgagggctggaacagagccatcggcctgcacgacccaacagcccatgccgaaattatggccctgagacagggcggcctggtcatgcagaactacagactgattgacgccaccctgtacgtgacattcgagccttgcgtgatgtgcgccggcgccatgatccactctaggatcggccgcgtggtgtttggcgtgaggaactcaaaaagaggcgccgcaggctccctgatgaacgtgctgaactaccccggcatgaatcaccgcgtcgaaattaccgagggaatcctggcagatgaatgtgccgccctgctgtgcgatttctatcggatgcctagacaggtgttcaatgctcagaagaaggcccagagctccatcaactccggaggatctagcggaggatcctctggcagcgagacaccaggaacaagcgagtcagcaacaccagagagcagtggcggcagcagcggcggcagcagcaagctggagaagtttacaaactgctactccctgtctaagaccctgaggttcaaggccatccctgtgggcaagacccaggagaacatcgacaataagcggctgctggtggaggacgagaagagagccgaggattataagggcgtgaagaagctgctggatcgctactatctgtcttttatcaacgacgtgctgcacagcatcaagctgaagaatctgaacaattacatcagcctgttccggaagaaaaccagaaccgagaaggagaataaggagctggagaacctggagatcaatctgcggaaggagatcgccaaggccttcaagggcaacgagggctacaagtccctgtttaagaaggatatcatcgagacaatcctgccagagttcctggacgataaggacgagatcgccctggtgaacagcttcaatggctttaccacagccttcaccggcttctttgataacagagagaatatgttttccgaggaggccaagagcacatccatcgccttcaggtgtatcaacgagaatctgacccgctacatctctaatatggacatcttcgagaaggtggacgccatctttgataagcacgaggtgcaggagatcaaggagaagatcctgaacagcgactatgatgtggaggatttctttgagggcgagttctttaactttgtgctgacacaggagggcatcgacgtgtataacgccatcatcggcggcttcgtgaccgagagcggcgagaagatcaagggcctgaacgagtacatcaacctgtataatcagaaaaccaagcagaagctgcctaagtttaagccactgtataagcaggtgctgagcgatcgggagtctctgagcttctacggcgagggctatacatccgatgaggaggtgctggaggtgtttagaaacaccctgaacaagaacagcgagatcttcagctccatcaagaagctggagaagctgttcaagaattttgacgagtactctagcgccggcatctttgtgaagaacggccccgccatcagcacaatctccaaggatatcttcggcgagtggaacgtgatccgggacaagtggaatgccgagtatgacgatatccacctgaagaagaaggccgtggtgaccgagaagtacgaggacgatcggagaaagtccttcaagaagatcggctccttttctctggagcagctgcaggagtacgccgacgccgatctgtctgtggtggagaagctgaaggagatcatcatccagaaggtggatgagatctacaaggtgtatggctcctctgagaagctgttcgacgccgattttgtgctggagaagagcctgaagaagaacgacgccgtggtggccatcatgaaggacctgctggattctgtgaagagcttcgagaattacatcaaggccttctttggcgagggcaaggagacaaacagggacgagtccttctatggcgattttgtgctggcctacgacatcctgctgaaggtggaccacatctacgatgccatccgcaattatgtgacccagaagccctactctaaggataagttcaagctgtattttcagaaccctcagttcatgggcggctgggacaaggataaggagacagactatcgggccaccatcctgagatacggctccaagtactatctggccatcatggataagaagtacgccaagtgcctgcagaagatcgacaaggacgatgtgaacggcaattacgagaagatcaactataagctgctgcccggccctaataagatgctgccaaaggtgttcttttctaagaagtggatggcctactataaccccagcgaggacatccagaagatctacaagaatggcacattcaagaagggcgatatgtttaacctgaatgactgtcacaagctgatcgacttctttaaggatagcatctcccggtatccaaagtggtccaatgcctacgatttcaacttttctgagacagagaagtataaggacatcgccggcttttacagagaggtggaggagcagggctataaggtgagcttcgagtctgccagcaagaaggaggtggataagctggtggaggagggcaagctgtatatgttccagatctataacaaggacttttccgataagtctcacggcacacccaatctgcacaccatgtacttcaagctgctgtttgacgagaacaatcacggacagatcaggctgagcggaggagcagagctgttcatgaggcgcgcctccctgaagaaggaggagctggtggtgcacccagccaactcccctatcgccaacaagaatccagataatcccaagaaaaccacaaccctgtcctacgacgtgtataaggataagaggttttctgaggaccagtacgagctgcacatcccaatcgccatcaataagtgccccaagaacatcttcaagatcaatacagaggtgcgcgtgctgctgaagcacgacgataacccctatgtgatcggcatcgccaggggtgagcgcaatctgctgtatatcgtggtggtggacggcaagggcaacatcgtggagcagtattccctgaacgagatcatcaacaacttcaacggcatcaggatcaagacagattaccactctctgctggacaagaaggagaaggagaggttcgaggcccgccagaactggacctccatcgagaatatcaaggagctgaaggccggctatatctctcaggtggtgcacaagatctgcgagctggtggagaagtacgatgccgtgatcgccctggaggacctgaactctggctttaagaatagccgcgtgaaggtggagaagcaggtgtatcagaagttcgagaagatgctgatcgataagctgaactacatggtggacaagaagtctaatccttgtgcaacaggcggcgccctgaagggctatcagatcaccaataagttcgagagctttaagtccatgtctacccagaacggcttcatcttttacatccctgcctggctgacatccaagatcgatccatctaccggctttgtgaacctgctgaaaaccaagtataccagcatcgccgattccaagaagttcatcagctcctttgacaggatcatgtacgtgcccgaggaggatctgttcgagtttgccctggactataagaacttctctcgcacagacgccgattacatcaagaagtggaagctgtactcctacggcaaccggatcagaatcttccggaatcctaagaagaacaacgtgttcgactgggaggaggtgtgcctgaccagcgcctataaggagctgttcaacaagtacggcatcaattatcagcagggcgatatcagagccctgctgtgcgagcagtccgacaaggccttctactctagctttatggccctgatgagcctgatgctgcagatgcggaacagcatcacaggccgcaccgacgtggattttctgatcagccctgtgaagaactccgacggcatcttctacgatagccggaactatgaggcccaggagaatgccatcctgccaaagaacgccgacgccaatggcgcctataacatcgccagaaaggtgctgtgggccatcggccagttcaagaaggccgaggacgagaagctggataaggtgaagatcgccatctctaacaaggagtggctggagtacgcccagaccagcgtgaag

SEQ ID NO: 519 - DNA, 4707 bp, synthetic construct
  source 1..4707: mol_type = other DNA
tctgaggttgaattttcacatgagtattggatgagacacgctcttaccttggctaagagagcaagggatgagagagaagttccagtgggagcagttcttgtgttgaacaatagagttattggagagggttggaacagggctattggacttcatgatcctactgctcacgcagaaattatggcacttagacaaggtggacttgttatgcagaactacaggcttatcgatgctactctttatgttacattcgagccatgtgtgatgtgcgctggagcaatgattcattctaggattggaagggttgtgttcggtgttagaaactctaagaggggagctgcaggttcacttatgaacgttttgaattatcctggtatgaaccacagagtggagattactgaaggtattttggcagatgaatgtgctgcacttttgtgcgatttttacagaatgcctagacaagtgttcaacgctcaaaagaaggcacaatcttctattaactctggaggatctagcggaggatcctctggcagcgagacaccaggaacaagcgagtcagcaacaccagagagcagtggcggcagcagcggcggcagctccaagctggagaagtttacaaactgttacagcctctccaaaaccctcaggtttaaagcgatcccggtgggcaagacccaggagaacatcgacaacaagaggctcctggtggaagacgagaagcgcgccgaagactacaagggcgtgaagaagctgctcgataggtactacctcagctttattaacgacgtgctgcacagcatcaaactcaagaatctcaacaactacatctccctcttccgcaaaaagacccgcaccgagaaggagaacaaggagctggagaacctggagatcaacctccgcaaggaaatcgccaaagcgttcaagggcaatgaagggtacaagagcctcttcaagaaagacatcatcgaaactatcctcccagagtttctcgatgacaaggacgagatcgcgctggtgaactcctttaacgggttcacaaccgcgtttaccggcttctttgataacagggaaaatatgttctccgaggaggccaagtccaccagcatcgccttcaggtgtatcaacgagaacctcacccgctacatttccaatatggacattttcgagaaggtggatgcgatcttcgataagcacgaggtgcaggagatcaaagagaagattctcaattccgattatgacgtcgaggatttcttcgaaggggagttctttaattttgtgctcacacaagagggcattgacgtgtacaacgcgattatcgggggcttcgtcacagagtccggggagaagattaaggggctgaatgagtacatcaatctgtacaatcagaagaccaagcagaaactgccgaaattcaagccgctctacaagcaagtcctgtccgatagggaaagcctctccttctacggcgagaaccagaccacccagaagggacagaagaacagccgcgagagaatgaagcggatcgaagagggcatcaaagagctgggcagccagatcctgaaagaacaccccgtggaaaacacccagctgcagaacgagaagctgtacctgtactacctgcagaatgggcgggatatgtacgtggaccaggaactggacatcaaccggctgtccgactacgatgtggaccatatcgtgcctcagagctttctgaaggacgactccatcgacaacaaggtgctgaccagaagcgacaagaaccggggcaagagcgacaacgtgccctccgaagaggtcgtgaagaagatgaagaactactggcggcagctgctgaacgccaagctgattacccagagaaagttcgacaatctgaccaaggccgagagaggcggcctgagcgagggctataccagcgacgaggaggtgctggaagtcttccgcaacacactgaataagaatagcgagattttctcctccatcaagaagctcgagaagctctttaagaactttgacgagtacagctccgccgggattttcgtgaagaacgggccggcgatcagcaccatctccaaggacatctttggcgagtggaacgtcatcagggacaagtggaacgccgagtacgacgacatccacctgaagaagaaggcggtggtgaccgagaagtatgaggacgatcgcaggaagtccttcaaaaaaatcggctccttcagcctcgaacagctccaggagtatgccgatgcggatctgtccgtcgtcgagaagctgaaggaaatcatcattcagaaggtcgacgagatctataaagtgtacgggtccagcgagaagctgttcgacgccgactttgtgctcgagaagtccctcaaaaagaatgacgccgtggtggccattatgaaagacctgctcgactccgtgaagtccttcgaaaattacattaaagcgttctttggggaggggaaggaaactaacagggatgagtccttctatggcgactttgtcctcgcgtacgacatcctgctgaaggtcgaccacatttacgacgcgatccgcaactacgtgacacagaagccgtactccaaagacaagttcaagctgtacttccagaacccgcaatttatggggggctgggacaaggataaagagacagactaccgcgcgacaattctccgctatggctccaaatactatctggccatcatggacaagaagtacgcgaagtgcctgcagaagatcgacaaagacgacgtcaatggcaactatgaaaagatcaactacaagctgctgccgggcccgaacaagatgctcccgaaggtgttcttcagcaagaagtggatggcctactacaatccaagcgaggatattcagaaaatctataaaaacgggaccttcaagaagggggacatgtttaacctcaacgactgccacaagctcattgatttcttcaaggatagcatttcccgctacccgaaatggtccaatgcgtacgattttaacttctccgagacagaaaagtacaaagacatcgcgggcttttacagggaggtggaggagcaagggtataaagtttcttttgaatccgcgagcaagaaggaagtcgacaagctcgtcgaggagggcaagctctacatgttccaaatttataacaaggacttttccgacaagagccatgggaccccaaacctccacaccatgtacttcaaactgctctttgacgagaacaaccacgggcaaatcaggctgagcggcggcgccgaattattcatgcgcagggcctccctcaagaaggaagagctggtcgtccatccagccaattccccgatcgcgaacaagaacccggacaatccgaaaaagaccaccaccctgtcctacgacgtctacaaggacaaacgcttcagcgaagaccagtacgaattacacatcccaattgcgattaataagtgcccaaagaatatcttcaaaattaatacagaggtcagggtgctgctcaaacacgacgacaatccgtatgtcatcggcattgccaggggcgagcgcaatctgctctatatcgtggtcgtggatgggaagggcaatattgtggagcagtactccctgaacgagattatcaacaacttcaatgggattaggattaagaccgactatcacagcctgctcgacaagaaagaaaaagagaggtttgaggcccgccaaaactggacctccattgagaatatcaaagaattaaaggccggctatatttcccaagtcgtccacaagatctgcgagctggtggagaaatatgacgccgtgattgcgctcgaagacttaaattctgggttcaagaactcccgcgtgaaggtggaaaaacaggtgtatcagaaattcgagaaaatgctgatcgacaaactcaattatatggtggataagaagtccaacccgtgtgccacagggggcgcgctgaagggctatcagatcaccaacaagttcgagagcttcaagagcatgagcacccagaacgggtttattttctacatcccggcgtggctcacctccaagattgacccgagcaccggcttcgtgaacctcctgaagacaaagtatacctccattgccgacagcaagaagtttatctcctccttcgaccgcattatgtatgtgccggaggaggacctcttcgagttcgccctcgactacaaaaacttcagccgcacagatgcggattacatcaagaagtggaagctgtactcctacgggaacaggatccgcatcttcaggaatccaaaaaaaaataacgtctttgactgggaggaagtgtgcctgacatccgcctacaaggaactgttcaataaatacggcatcaattaccagcagggcgacattcgcgccctcctctgtgagcagtccgacaaagcgttttactccagcttcatggccctcatgtccctgatgctccaaatgaggaatagcatcacagggcgcaccgacgtcgacttcctcatcagcccggtgaagaactccgacgggatcttttacgactcccgcaactatgaggcgcaagagaatgcgatcctcccgaagaacgccgatgcgaacggggcctataatatcgccaggaaagtgctctgggccatcgggcagttcaaaaaggcggaggatgagaagctcgacaaggtgaaaattgccatttccaacaaggagtggctggagtacgcgcagacctccgtgaagcac

SEQ ID NO: 520 - DNA, 8794 bp, synthetic construct
  source 1..8794: mol_type = other DNA
gacattgattattgactagttattaatagtaatcaattacggggtcattagttcatagcccatatatggagttccgcgttacataacttacggtaaatggcccgcctggctgaccgcccaacgacccccgcccattgacgtcaataatgacgtatgttcccatagtaacgccaatagggactttccattgacgtcaatgggtggagtatttacggtaaactgcccacttggcagtacatcaagtgtatcatatgccaagtacgccccctattgacgtcaatgacggtaaatggcccgcctggcattatgcccagtacatgaccttatgggactttcctacttggcagtacatctacgtattagtcatcgctattaccatggtgatgcggttttggcagtacatcaatgggcgtggatagcggtttgactcacggggatttccaagtctccaccccattgacgtcaatgggagtttgttttggcaccaaaatcaacgggactttccaaaatgtcgtaacaactccgccccattgacgcaaatgggcggtaggcgtgtacggtgggaggtctatataagcagagctggtttagtgaaccgtcagatccgctagagatccgcggccgctaatacgactcactatagggagagccgccaccatgaaacggacagccgacggaagcgagttcgagtcaccaaagaagaagcggaaagtctctgaggttgaattttcacatgagtattggatgagacacgctcttaccttggctaagagagcaagggatgagagagaagttccagtgggagcagttcttgtgttgaacaatagagttattggagagggttggaacaggtaagtatcaaggttacaagacaggtttaaggagaccaatagaaactgggcttgtcgagacagagaagactcttgcgtttctgataggcacctattggtcttactgacatccactttgcctttctctccacagggctattggacttcatgatcctactgctcacgcagaaattatggcacttagacaaggtggacttgttatgcagaactacaggcttatcgatgctactctttatgttacattcgagccatgtgtgatgtgcgctggagcaatgattcattctaggattggaagggttgtgttcggtgttagaaactctaagaggggagctgcaggttcacttatgaacgttttgaattatcctggtatgaaccacagagtggagattactgaaggtattttggcagatgaatgtgctgcacttttgtgcgatttttacagaatgcctagacaagtgttcaacgctcaaaagaaggcacaatcttctattaactctggtggttcttctggtggttctagcggcagcgagactcccgggacctcagagtccgccacacccgaaagttctggtggttcttctggtggttctcgcaccgagaaggagaacaaggagctggagaacctggagatcaacctccgcaaggaaatcgccaaagcgttcaagggcaatgaagggtacaagagcctcttcaagaaagacatcatcgaaactatcctcccagagtttctcgatgacaaggacgagatcgcgctggtgaactcctttaacgggttcacaaccgcgtttaccggcttctttgataacagggaaaatatgttctccgaggaggccaagtccaccagcatcgccttcaggtgtatcaacgagaacctcacccgctacatttccaatatggacattttcgagaaggtggatgcgatcttcgataagcacgaggtgcaggagatcaaagagaagattctcaattccgattatgacgtcgaggatttcttcgaaggggagttctttaattttgtgctcacacaagagggcattgacgtgtacaacgcgattatcgggggcttcgtcacagagtccggggagaagattaaggggctgaatgagtacatcaatctgtacaatcagaagaccaagcagaaactgccgaaattcaagccgctctacaagcaagtcctgtccgatagggaaagcctctccttctacggcgagggctataccagcgacgaggaggtgctggaagtcttccgcaacacactgaataagaatagcgagattttctcctccatcaagaagctcgagaagctctttaagaactttgacgagtacagctccgccgggattttcgtgaagaacgggccggcgatcagcaccatctccaaggacatctttggcgagtggaacgtcatcagggacaagtggaacgccgagtacgacgacatccacctgaagaagaaggcggtggtgaccgagaagtatgaggacgatcgcaggaagtccttcaaaaaaatcggctccttcagcctcgaacagctccaggagtatgccgatgcggatctgtccgtcgtcgagaagctgaaggaaatcatcattcagaaggtcgacgagatctataaagtgtacgggtccagcgagaagctgttcgacgccgactttgtgctcgagaagtccctcaaaaagaatgacgccgtggtggccattatgaaagacctgctcgactccgtgaagtccttcgaaaattacattaaagcgttctttggggaggggaaggaaactaacagggatgagtccttctatggcgactttgtcctcgcgtacgacatcctgctgaaggtcgaccacatttacgacgcgatccgcaactacgtgacacagaagccgtactccaaagacaagttcaagctgtacttccagaacccgcaatttatggggggctgggacaaggataaagagacagactaccgcgcgacaattctccgctatggctccaaatactatctggccatcatggacaagaagtacgcgaagtgcctgcagaagatcgacaaagacgacgtcaatggcaactatgaaaagatcaactacaagctgctgccgggcccgaacaagatgctcccgaaggtgttcttcagcaagaagtggatggcctactacaatccaagcgaggatattcagaaaatctataaaaacgggaccttcaagaagggggacatgtttaacctcaacgactgccacaagctcattgatttcttcaaggatagcatttcccgctacccgaaatggtccaatgcgtacgattttaacttctccgagacagaaaagtacaaagacatcgcgggcttttacagggaggtggaggagcaagggtataaagtttcttttgaatccgcgagcaagaaggaagtcgacaagctcgtcgaggagggcaagctctacatgttccaaatttataacaaggacttttccgacaagagccatgggaccccaaacctccacaccatgtacttcaaactgctctttgacgagaacaaccacgggcaaatcaggctgagcggcggcgccgaattattcatgcgcagggcctccctcaagaaggaagagctggtcgtccatccagccaattccccgatcgcgaacaagaacccggacaatccgaaaaagaccaccaccctgtcctacgacgtctacaaggacaaacgcttcagcgaagaccagtacgaattacacatcccaattgcgattaataagtgcccaaagaatatcttcaaaattaatacagaggtcagggtgctgctcaaacacgacgacaatccgtatgtcatcggcattgccaggggcgagcgcaatctgctctatatcgtggtcgtggatgggaagggcaatattgtggagcagtactccctgaacgagattatcaacaacttcaatgggattaggattaagaccgactatcacagcctgctcgacaagaaagaaaaagagaggtttgaggcccgccaaaactggacctccattgagaatatcaaagaattaaaggccggctatatttcccaagtcgtccacaagatctgcgagctggtggagaaatatgacgccgtgattgcgctcgaagacttaaattctgggttcaagaactcccgcgtgaaggtggaaaaacaggtgtatcagaaattcgagaaaatgctgatcgacaaactcaattatatggtggataagaagtccaacccgtgtgccacagggggcgcgctgaagggctatcagatcaccaacaagttcgagagcttcaagagcatgagcacccagaacgggtttattttctacatcccggcgtggctcacctccaagattgacccgagcaccggcttcgtgaacctcctgaagacaaagtatacctccattgccgacagcaagaagtttatctcctccttcgaccgcattatgtatgtgccggaggaggacctcttcgagttcgccctcgactacaaaaacttcagccgcacagatgcggattacatcaagaagtggaagctgtactcctacgggaacaggatccgcatcttcaggaatccaaaaaaaaataacgtctttgactgggaggaagtgtgcctgacatccgcctacaaggaactgttcaataaatacggcatcaattaccagcagggcgacattcgcgccctcctctgtgagcagtccgacaaagcgttttactccagcttcatggccctcatgtccctgatgctccaaatgaggaatagcatcacagggcgcaccgacgtcgacttcctcatcagcccggtgaagaactccgacgggatcttttacgactcccgcaactatgaggcgcaagagaatgcgatcctcccgaagaacgccgatgcgaacggggcctataatatcgccaggaaagtgctctgggccatcgggcagttcaaaaaggcggaggatgagaagctcgacaaggtgaaaattgccatttccaacaaggagtggctggagtacgcgcagacctccgtgaagcacggctcctctggcagctccggctctagcggctcctctggcagctccggctccaagctggagaagtttacaaactgttacagcctctccaaaaccctcaggtttaaagcgatcccggtgggcaagacccaggagaacatcgacaacaagaggctcctggtggaagacgagaagcgcgccgaagactacaagggcgtgaagaagctgctcgataggtactacctcagctttattaacgacgtgctgcacagcatcaaactcaagaatctcaacaactacatctccctcttccgcaaaaagacctctggcggctcaaaaagaaccgccgacggcagcgaattcgagcccaagaagaagaggaaagtcggaagcggagctactaacttcagcctgctgaagcaggctggagacgtggaggagaaccctggacctatggtgagcaagggcgaggagctgttcaccggggtggtgcccatcctggtcgagctggacggcgacgtaaacggccacaagttcagcgtgtccggcgagggcgagggcgatgccacctacggcaagctgaccctgaagttcatctgcaccaccggcaagctgcccgtgccctggcccaccctcgtgaccaccctgacctatggagtgcagtgcttcagccgctaccccgaccacatgaagcagcacgacttcttcaagtccgccatgcccgaaggctacgtccaggagcgcaccatcttcttcaaggacgacggcaactacaagacccgcgccgaggtgaagttcgagggcgacaccctggtgaaccgcatcgagctgaagggcatcgacttcaaggaggacggcaacatcctggggcacaagctggagtacaactacaacagccacaacgtctatatcatggccgacaagcagaagaacggcatcaaggtgaacttcaagatccgccacaacatcgaggacggcagcgtgcagctcgccgaccactaccagcagaacacccccatcggcgacggccccgtgctgctgcccgacaaccactacctgagcacccagtccgccctgagcaaagaccccaacgagaagcgcgatcacatggtcctgctggagttcgtgaccgccgccgggatcactctcggcatggacgagctgtacaagtctggtggttctcccaagaagaagaggaaagtctaaccggtcatcatcaccatcaccattgagtttaaacccgctgatcagcctcgactgtgccttctagttgccagccatctgttgtttgcccctcccccgtgccttccttgaccctggaaggtgccactcccactgtcctttcctaataaaatgaggaaattgcatcgcattgtctgagtaggtgtcattctattctggggggtggggtggggcaggacagcaagggggaggattgggaagacaatagcaggcatgctggggatgcggtgggctctatggcttctgaggcggaaagaaccagctggggctcgataccgtcgacctctagctagagcttggcgtaatcatggtcatagctgtttcctgtgtgaaattgttatccgctcacaattccacacaacatacgagccggaagcataaagtgtaaagcctagggtgcctaatgagtgagctaactcacattaattgcgttgcgctcactgcccgctttccagtcgggaaacctgtcgtgccagctgcattaatgaatcggccaacgcgcggggagaggcggtttgcgtattgggcgctcttccgcttcctcgctcactgactcgctgcgctcggtcgttcggctgcggcgagcggtatcagctcactcaaaggcggtaatacggttatccacagaatcaggggataacgcaggaaagaacatgtgagcaaaaggccagcaaaaggccaggaaccgtaaaaaggccgcgttgctggcgtttttccataggctccgcccccctgacgagcatcacaaaaatcgacgctcaagtcagaggtggcgaaacccgacaggactataaagataccaggcgtttccccctggaagctccctcgtgcgctctcctgttccgaccctgccgcttaccggatacctgtccgcctttctcccttcgggaagcgtggcgctttctcatagctcacgctgtaggtatctcagttcggtgtaggtcgttcgctccaagctgggctgtgtgcacgaaccccccgttcagcccgaccgctgcgccttatccggtaactatcgtcttgagtccaacccggtaagacacgacttatcgccactggcagcagccactggtaacaggattagcagagcgaggtatgtaggcggtgctacagagttcttgaagtggtggcctaactacggctacactagaagaacagtatttggtatctgcgctctgctgaagccagttaccttcggaaaaagagttggtagctcttgatccggcaaacaaaccaccgctggtagcggtggtttttttgtttgcaagcagcagattacgcgcagaaaaaaaggatctcaagaagatcctttgatcttttctacggggtctgacactcagtggaacgaaaactcacgttaagggattttggtcatgagattatcaaaaaggatcttcacctagatccttttaaattaaaaatgaagttttaaatcaatctaaagtatatatgagtaaacttggtctgacagttaccaatgcttaatcagtgaggcacctatctcagcgatctgtctatttcgttcatccatagttgcctgactccccgtcgtgtagataactacgatacgggagggcttaccatctggccccagtgctgcaatgataccgcgagacccacgctcaccggctccagatttatcagcaataaaccagccagccggaagggccgagcgcagaagtggtcctgcaactttatccgcctccatccagtctattaattgttgccgggaagctagagtaagtagttcgccagttaatagtttgcgcaacgttgttgccattgctacaggcatcgtggtgtcacgctcgtcgtttggtatggcttcattcagctccggttcccaacgatcaaggcgagttacatgatcccccatgttgtgcaaaaaagcggttagctccttcggtcctccgatcgttgtcagaagtaagttggccgcagtgttatcactcatggttatggcagcactgcataattctcttactgtcatgccatccgtaagatgcttttctgtgactggtgagtactcaaccaagtcattctgagaatagtgtatgcggcgaccgagttgctcttgcccggcgtcaatacgggataataccgcgccacatagcagaactttaaaagtgctcatcattggaaaacgttcttcggggcgaaaactctcaaggatcttaccgctgttgagatccagttcgatgtaacccactcgtgcacccaactgatcttcagcatcttttactttcaccagcgtttctgggtgagcaaaaacaggaaggcaaaatgccgcaaaaaagggaataagggcgacacggaaatgttgaatactcatactcttcctttttcaatattattgaagcatttatcagggttattgtctcatgagcggatacatatttgaatgtatttagaaaaataaacaaataggggttccgcgcacatttccccgaaaagtgccacctgacgtcgacggatcgggagatcgatctcccgatcccctagggtcgactctcagtacaatctgctctgatgccgcatagttaagccagtatctgctccctgcttgtgtgttggaggtcgctgagtagtgcgcgagcaaaatttaagctacaacaaggcaaggcttgaccgacaattgcatgaagaatctgcttagggttaggcgttttgcgctgcttcgcgatgtacgggccagatatacgcgtt

SEQ ID NO: 521 - DNA, 8794 bp, synthetic construct
  source 1..8794: mol_type = other DNA
gacattgattattgactagttattaatagtaatcaattacggggtcattagttcatagcccatatatggagttccgcgttacataacttacggtaaatggcccgcctggctgaccgcccaacgacccccgcccattgacgtcaataatgacgtatgttcccatagtaacgccaatagggactttccattgacgtcaatgggtggagtatttacggtaaactgcccacttggcagtacatcaagtgtatcatatgccaagtacgccccctattgacgtcaatgacggtaaatggcccgcctggcattatgcccagtacatgaccttatgggactttcctacttggcagtacatctacgtattagtcatcgctattaccatggtgatgcggttttggcagtacatcaatgggcgtggatagcggtttgactcacggggatttccaagtctccaccccattgacgtcaatgggagtttgttttggcaccaaaatcaacgggactttccaaaatgtcgtaacaactccgccccattgacgcaaatgggcggtaggcgtgtacggtgggaggtctatataagcagagctggtttagtgaaccgtcagatccgctagagatccgcggccgctaatacgactcactatagggagagccgccaccatgaaacggacagccgacggaagcgagttcgagtcaccaaagaagaagcggaaagtctctgaggttgaattttcacatgagtattggatgagacacgctcttaccttggctaagagagcaagggatgagagagaagttccagtgggagcagttcttgtgttgaacaatagagttattggagagggttggaacaggtaagtatcaaggttacaagacaggtttaaggagaccaatagaaactgggcttgtcgagacagagaagactcttgcgtttctgataggcacctattggtcttactgacatccactttgcctttctctccacagggctattggacttcatgatcctactgctcacgcagaaattatggcacttagacaaggtggacttgttatgcagaactacaggcttatcgatgctactctttatgttacattcgagccatgtgtgatgtgcgctggagcaatgattcattctaggattggaagggttgtgttcggtgttagaaactctaagaggggagctgcaggttcacttatgaacgttttgaattatcctggtatgaaccacagagtggagattactgaaggtattttggcagatgaatgtgctgcacttttgtgcgatttttacagaatgcctagacaagtgttcaacgctcaaaagaaggcacaatcttctattaactctggtggttcttctggtggttctagcggcagcgagactcccgggacctcagagtccgccacacccgaaagttctggtggttcttctggtggttctggctataccagcgacgaggaggtgctggaagtcttccgcaacacactgaataagaatagcgagattttctcctccatcaagaagctcgagaagctctttaagaactttgacgagtacagctccgccgggattttcgtgaagaacgggccggcgatcagcaccatctccaaggacatctttggcgagtggaacgtcatcagggacaagtggaacgccgagtacgacgacatccacctgaagaagaaggcggtggtgaccgagaagtatgaggacgatcgcaggaagtccttcaaaaaaatcggctccttcagcctcgaacagctccaggagtatgccgatgcggatctgtccgtcgtcgagaagctgaaggaaatcatcattcagaaggtcgacgagatctataaagtgtacgggtccagcgagaagctgttcgacgccgactttgtgctcgagaagtccctcaaaaagaatgacgccgtggtggccattatgaaagacctgctcgactccgtgaagtccttcgaaaattacattaaagcgttctttggggaggggaaggaaactaacagggatgagtccttctatggcgactttgtcctcgcgtacgacatcctgctgaaggtcgaccacatttacgacgcgatccgcaactacgtgacacagaagccgtactccaaagacaagttcaagctgtacttccagaacccgcaatttatggggggctgggacaaggataaagagacagactaccgcgcgacaattctccgctatggctccaaatactatctggccatcatggacaagaagtacgcgaagtgcctgcagaagatcgacaaagacgacgtcaatggcaactatgaaaagatcaactacaagctgctgccgggcccgaacaagatgctcccgaaggtgttcttcagcaagaagtggatggcctactacaatccaagcgaggatattcagaaaatctataaaaacgggaccttcaagaagggggacatgtttaacctcaacgactgccacaagctcattgatttcttcaaggatagcatttcccgctacccgaaatggtccaatgcgtacgattttaacttctccgagacagaaaagtacaaagacatcgcgggcttttacagggaggtggaggagcaagggtataaagtttcttttgaatccgcgagcaagaaggaagtcgacaagctcgtcgaggagggcaagctctacatgttccaaatttataacaaggacttttccgacaagagccatgggaccccaaacctccacaccatgtacttcaaactgctctttgacgagaacaaccacgggcaaatcaggctgagcggcggcgccgaattattcatgcgcagggcctccctcaagaaggaagagctggtcgtccatccagccaattccccgatcgcgaacaagaacccggacaatccgaaaaagaccaccaccctgtcctacgacgtctacaaggacaaacgcttcagcgaagaccagtacgaattacacatcccaattgcgattaataagtgcccaaagaatatcttcaaaattaatacagaggtcagggtgctgctcaaacacgacgacaatccgtatgtcatcggcattgccaggggcgagcgcaatctgctctatatcgtggtcgtggatgggaagggcaatattgtggagcagtactccctgaacgagattatcaacaacttcaatgggattaggattaagaccgactatcacagcctgctcgacaagaaagaaaaagagaggtttgaggcccgccaaaactggacctccattgagaatatcaaagaattaaaggccggctatatttcccaagtcgtccacaagatctgcgagctggtggagaaatatgacgccgtgattgcgctcgaagacttaaattctgggttcaagaactcccgcgtgaaggtggaaaaacaggtgtatcagaaattcgagaaaatgctgatcgacaaactcaattatatggtggataagaagtccaacccgtgtgccacagggggcgcgctgaagggctatcagatcaccaacaagttcgagagcttcaagagcatgagcacccagaacgggtttattttctacatcccggcgtggctcacctccaagattgacccgagcaccggcttcgtgaacctcctgaagacaaagtatacctccattgccgacagcaagaagtttatctcctccttcgaccgcattatgtatgtgccggaggaggacctcttcgagttcgccctcgactacaaaaacttcagccgcacagatgcggattacatcaagaagtggaagctgtactcctacgggaacaggatccgcatcttcaggaatccaaaaaaaaataacgtctttgactgggaggaagtgtgcctgacatccgcctacaaggaactgttcaataaatacggcatcaattaccagcagggcgacattcgcgccctcctctgtgagcagtccgacaaagcgttttactccagcttcatggccctcatgtccctgatgctccaaatgaggaatagcatcacagggcgcaccgacgtcgacttcctcatcagcccggtgaagaactccgacgggatcttttacgactcccgcaactatgaggcgcaagagaatgcgatcctcccgaagaacgccgatgcgaacggggcctataatatcgccaggaaagtgctctgggccatcgggcagttcaaaaaggcggaggatgagaagctcgacaaggtgaaaattgccatttccaacaaggagtggctggagtacgcgcagacctccgtgaagcacggctcctctggcagctccggctctagcggctcctctggcagctccggctccaagctggagaagtttacaaactgttacagcctctccaaaaccctcaggtttaaagcgatcccggtgggcaagacccaggagaacatcgacaacaagaggctcctggtggaagacgagaagcgcgccgaagactacaagggcgtgaagaagctgctcgataggtactacctcagctttattaacgacgtgctgcacagcatcaaactcaagaatctcaacaactacatctccctcttccgcaaaaagacccgcaccgagaaggagaacaaggagctggagaacctggagatcaacctccgcaaggaaatcgccaaagcgttcaagggcaatgaagggtacaagagcctcttcaagaaagacatcatcgaaactatcctcccagagtttctcgatgacaaggacgagatcgcgctggtgaactcctttaacgggttcacaaccgcgtttaccggcttctttgataacagggaaaatatgttctccgaggaggccaagtccaccagcatcgccttcaggtgtatcaacgagaacctcacccgctacatttccaatatggacattttcgagaaggtggatgcgatcttcgataagcacgaggtgcaggagatcaaagagaagattctcaattccgattatgacgtcgaggatttcttcgaaggggagttctttaattttgtgctcacacaagagggcattgacgtgtacaacgcgattatcgggggcttcgtcacagagtccggggagaagattaaggggctgaatgagtacatcaatctgtacaatcagaagaccaagcagaaactgccgaaattcaagccgctctacaagcaagtcctgtccgatagggaaagcctctccttctacggcgagtctggcggctcaaaaagaaccgccgacggcagcgaattcgagcccaagaagaagaggaaagtcggaagcggagctactaacttcagcctgctgaagcaggctggagacgtggaggagaaccctggacctatggtgagcaagggcgaggagctgttcaccggggtggtgcccatcctggtcgagctggacggcgacgtaaacggccacaagttcagcgtgtccggcgagggcgagggcgatgccacctacggcaagctgaccctgaagttcatctgcaccaccggcaagctgcccgtgccctggcccaccctcgtgaccaccctgacctatggagtgcagtgcttcagccgctaccccgaccacatgaagcagcacgacttcttcaagtccgccatgcccgaaggctacgtccaggagcgcaccatcttcttcaaggacgacggcaactacaagacccgcgccgaggtgaagttcgagggcgacaccctggtgaaccgcatcgagctgaagggcatcgacttcaaggaggacggcaacatcctggggcacaagctggagtacaactacaacagccacaacgtctatatcatggccgacaagcagaagaacggcatcaaggtgaacttcaagatccgccacaacatcgaggacggcagcgtgcagctcgccgaccactaccagcagaacacccccatcggcgacggccccgtgctgctgcccgacaaccactacctgagcacccagtccgccctgagcaaagaccccaacgagaagcgcgatcacatggtcctgctggagttcgtgaccgccgccgggatcactctcggcatggacgagctgtacaagtctggtggttctcccaagaagaagaggaaagtctaaccggtcatcatcaccatcaccattgagtttaaacccgctgatcagcctcgactgtgccttctagttgccagccatctgttgtttgcccctcccccgtgccttccttgaccctggaaggtgccactcccactgtcctttcctaataaaatgaggaaattgcatcgcattgtctgagtaggtgtcattctattctggggggtggggtggggcaggacagcaagggggaggattgggaagacaatagcaggcatgctggggatgcggtgggctctatggcttctgaggcggaaagaaccagctggggctcgataccgtcgacctctagctagagcttggcgtaatcatggtcatagctgtttcctgtgtgaaattgttatccgctcacaattccacacaacatacgagccggaagcataaagtgtaaagcctagggtgcctaatgagtgagctaactcacattaattgcgttgcgctcactgcccgctttccagtcgggaaacctgtcgtgccagctgcattaatgaatcggccaacgcgcggggagaggcggtttgcgtattgggcgctcttccgcttcctcgctcactgactcgctgcgctcggtcgttcggctgcggcgagcggtatcagctcactcaaaggcggtaatacggttatccacagaatcaggggataacgcaggaaagaacatgtgagcaaaaggccagcaaaaggccaggaaccgtaaaaaggccgcgttgctggcgtttttccataggctccgcccccctgacgagcatcacaaaaatcgacgctcaagtcagaggtggcgaaacccgacaggactataaagataccaggcgtttccccctggaagctccctcgtgcgctctcctgttccgaccctgccgcttaccggatacctgtccgcctttctcccttcgggaagcgtggcgctttctcatagctcacgctgtaggtatctcagttcggtgtaggtcgttcgctccaagctgggctgtgtgcacgaaccccccgttcagcccgaccgctgcgccttatccggtaactatcgtcttgagtccaacccggtaagacacgacttatcgccactggcagcagccactggtaacaggattagcagagcgaggtatgtaggcggtgctacagagttcttgaagtggtggcctaactacggctacactagaagaacagtatttggtatctgcgctctgctgaagccagttaccttcggaaaaagagttggtagctcttgatccggcaaacaaaccaccgctggtagcggtggtttttttgtttgcaagcagcagattacgcgcagaaaaaaaggatctcaagaagatcctttgatcttttctacggggtctgacactcagtggaacgaaaactcacgttaagggattttggtcatgagattatcaaaaaggatcttcacctagatccttttaaattaaaaatgaagttttaaatcaatctaaagtatatatgagtaaacttggtctgacagttaccaatgcttaatcagtgaggcacctatctcagcgatctgtctatttcgttcatccatagttgcctgactccccgtcgtgtagataactacgatacgggagggcttaccatctggccccagtgctgcaatgataccgcgagacccacgctcaccggctccagatttatcagcaataaaccagccagccggaagggccgagcgcagaagtggtcctgcaactttatccgcctccatccagtctattaattgttgccgggaagctagagtaagtagttcgccagttaatagtttgcgcaacgttgttgccattgctacaggcatcgtggtgtcacgctcgtcgtttggtatggcttcattcagctccggttcccaacgatcaaggcgagttacatgatcccccatgttgtgcaaaaaagcggttagctccttcggtcctccgatcgttgtcagaagtaagttggccgcagtgttatcactcatggttatggcagcactgcataattctcttactgtcatgccatccgtaagatgcttttctgtgactggtgagtactcaaccaagtcattctgagaatagtgtatgcggcgaccgagttgctcttgcccggcgtcaatacgggataataccgcgccacatagcagaactttaaaagtgctcatcattggaaaacgttcttcggggcgaaaactctcaaggatcttaccgctgttgagatccagttcgatgtaacccactcgtgcacccaactgatcttcagcatcttttactttcaccagcgtttctgggtgagcaaaaacaggaaggcaaaatgccgcaaaaaagggaataagggcgacacggaaatgttgaatactcatactcttcctttttcaatattattgaagcatttatcagggttattgtctcatgagcggatacatatttgaatgtatttagaaaaataaacaaataggggttccgcgcacatttccccgaaaagtgccacctgacgtcgacggatcgggagatcgatctcccgatcccctagggtcgactctcagtacaatctgctctgatgccgcatagttaagccagtatctgctccctgcttgtgtgttggaggtcgctgagtagtgcgcgagcaaaatttaagctacaacaaggcaaggcttgaccgacaattgcatgaagaatctgcttagggttaggcgttttgcgctgcttcgcgatgtacgggccagatatacgcgtt

SEQ ID NO: 522 - DNA, 8794 bp, synthetic construct
  source 1..8794: mol_type = other DNA
gacattgattattgactagttattaatagtaatcaattacggggtcattagttcatagcccatatatggagttccgcgttacataacttacggtaaatggcccgcctggctgaccgcccaacgacccccgcccattgacgtcaataatgacgtatgttcccatagtaacgccaatagggactttccattgacgtcaatgggtggagtatttacggtaaactgcccacttggcagtacatcaagtgtatcatatgccaagtacgccccctattgacgtcaatgacggtaaatggcccgcctggcattatgcccagtacatgaccttatgggactttcctacttggcagtacatctacgtattagtcatcgctattaccatggtgatgcggttttggcagtacatcaatgggcgtggatagcggtttgactcacggggatttccaagtctccaccccattgacgtcaatgggagtttgttttggcaccaaaatcaacgggactttccaaaatgtcgtaacaactccgccccattgacgcaaatgggcggtaggcgtgtacggtgggaggtctatataagcagagctggtttagtgaaccgtcagatccgctagagatccgcggccgctaatacgactcactatagggagagccgccaccatgaaacggacagccgacggaagcgagttcgagtcaccaaagaagaagcggaaagtctctgaggttgaattttcacatgagtattggatgagacacgctcttaccttggctaagagagcaagggatgagagagaagttccagtgggagcagttcttgtgttgaacaatagagttattggagagggttggaacaggtaagtatcaaggttacaagacaggtttaaggagaccaatagaaactgggcttgtcgagacagagaagactcttgcgtttctgataggcacctattggtcttactgacatccactttgcctttctctccacagggctattggacttcatgatcctactgctcacgcagaaattatggcacttagacaaggtggacttgttatgcagaactacaggcttatcgatgctactctttatgttacattcgagccatgtgtgatgtgcgctggagcaatgattcattctaggattggaagggttgtgttcggtgttagaaactctaagaggggagctgcaggttcacttatgaacgttttgaattatcctggtatgaaccacagagtggagattactgaaggtattttggcagatgaatgtgctgcacttttgtgcgatttttacagaatgcctagacaagtgttcaacgctcaaaagaaggcacaatcttctattaactctggtggttcttctggtggttctagcggcagcgagactcccgggacctcagagtccgccacacccgaaagttctggtggttcttctggtggttcttccgacgggatcttttacgactcccgcaactatgaggcgcaagagaatgcgatcctcccgaagaacgccgatgcgaacggggcctataatatcgccaggaaagtgctctgggccatcgggcagttcaaaaaggcggaggatgagaagctcgacaaggtgaaaattgccatttccaacaaggagtggctggagtacgcgcagacctccgtgaagcacggctcctctggcagctccggctctagcggctcctctggcagctccggctccaagctggagaagtttacaaactgttacagcctctccaaaaccctcaggtttaaagcgatcccggtgggcaagacccaggagaacatcgacaacaagaggctcctggtggaagacgagaagcgcgccgaagactacaagggcgtgaagaagctgctcgataggtactacctcagctttattaacgacgtgctgcacagcatcaaactcaagaatctcaacaactacatctccctcttccgcaaaaagacccgcaccgagaaggagaacaaggagctggagaacctggagatcaacctccgcaaggaaatcgccaaagcgttcaagggcaatgaagggtacaagagcctcttcaagaaagacatcatcgaaactatcctcccagagtttctcgatgacaaggacgagatcgcgctggtgaactcctttaacgggttcacaaccgcgtttaccggcttctttgataacagggaaaatatgttctccgaggaggccaagtccaccagcatcgccttcaggtgtatcaacgagaacctcacccgctacatttccaatatggacattttcgagaaggtggatgcgatcttcgataagcacgaggtgcaggagatcaaagagaagattctcaattccgattatgacgtcgaggatttcttcgaaggggagttctttaattttgtgctcacacaagagggcattgacgtgtacaacgcgattatcgggggcttcgtcacagagtccggggagaagattaaggggctgaatgagtacatcaatctgtacaatcagaagaccaagcagaaactgccgaaattcaagccgctctacaagcaagtcctgtccgatagggaaagcctctccttctacggcgagggctataccagcgacgaggaggtgctggaagtcttccgcaacacactgaataagaatagcgagattttctcctccatcaagaagctcgagaagctctttaagaactttgacgagtacagctccgccgggattttcgtgaagaacgggccggcgatcagcaccatctccaaggacatctttggcgagtggaacgtcatcagggacaagtggaacgccgagtacgacgacatccacctgaagaagaaggcggtggtgaccgagaagtatgaggacgatcgcaggaagtccttcaaaaaaatcggctccttcagcctcgaacagctccaggagtatgccgatgcggatctgtccgtcgtcgagaagctgaaggaaatcatcattcagaaggtcgacgagatctataaagtgtacgggtccagcgagaagctgttcgacgccgactttgtgctcgagaagtccctcaaaaagaatgacgccgtggtggccattatgaaagacctgctcgactccgtgaagtccttcgaaaattacattaaagcgttctttggggaggggaaggaaactaacagggatgagtccttctatggcgactttgtcctcgcgtacgacatcctgctgaaggtcgaccacatttacgacgcgatccgcaactacgtgacacagaagccgtactccaaagacaagttcaagctgtacttccagaacccgcaatttatggggggctgggacaaggataaagagacagactaccgcgcgacaattctccgctatggctccaaatactatctggccatcatggacaagaagtacgcgaagtgcctgcagaagatcgacaaagacgacgtcaatggcaactatgaaaagatcaactacaagctgctgccgggcccgaacaagatgctcccgaaggtgttcttcagcaagaagtggatggcctactacaatccaagcgaggatattcagaaaatctataaaaacgggaccttcaagaagggggacatgtttaacctcaacgactgccacaagctcattgatttcttcaaggatagcatttcccgctacccgaaatggtccaatgcgtacgattttaacttctccgagacagaaaagtacaaagacatcgcgggcttttacagggaggtggaggagcaagggtataaagtttcttttgaatccgcgagcaagaaggaagtcgacaagctcgtcgaggagggcaagctctacatgttccaaatttataacaaggacttttccgacaagagccatgggaccccaaacctccacaccatgtacttcaaactgctctttgacgagaacaaccacgggcaaatcaggctgagcggcggcgccgaattattcatgcgcagggcctccctcaagaaggaagagctggtcgtccatccagccaattccccgatcgcgaacaagaacccggacaatccgaaaaagaccaccaccctgtcctacgacgtctacaaggacaaacgcttcagcgaagaccagtacgaattacacatcccaattgcgattaataagtgcccaaagaatatcttcaaaattaatacagaggtcagggtgctgctcaaacacgacgacaatccgtatgtcatcggcattgccaggggcgagcgcaatctgctctatatcgtggtcgtggatgggaagggcaatattgtggagcagtactccctgaacgagattatcaacaacttcaatgggattaggattaagaccgactatcacagcctgctcgacaagaaagaaaaagagaggtttgaggcccgccaaaactggacctccattgagaatatcaaagaattaaaggccggctatatttcccaagtcgtccacaagatctgcgagctggtggagaaatatgacgccgtgattgcgctcgaagacttaaattctgggttcaagaactcccgcgtgaaggtggaaaaacaggtgtatcagaaattcgagaaaatgctgatcgacaaactcaattatatggtggataagaagtccaacccgtgtgccacagggggcgcgctgaagggctatcagatcaccaacaagttcgagagcttcaagagcatgagcacccagaacgggtttattttctacatcccggcgtggctcacctccaagattgacccgagcaccggcttcgtgaacctcctgaagacaaagtatacctccattgccgacagcaagaagtttatctcctccttcgaccgcattatgtatgtgccggaggaggacctcttcgagttcgccctcgactacaaaaacttcagccgcacagatgcggattacatcaagaagtggaagctgtactcctacgggaacaggatccgcatcttcaggaatccaaaaaaaaataacgtctttgactgggaggaagtgtgcctgacatccgcctacaaggaactgttcaataaatacggcatcaattaccagcagggcgacattcgcgccctcctctgtgagcagtccgacaaagcgttttactccagcttcatggccctcatgtccctgatgctccaaatgaggaatagcatcacagggcgcaccgacgtcgacttcctcatcagcccggtgaagaactctggcggctcaaaaagaaccgccgacggcagcgaattcgagcccaagaagaagaggaaagtcggaagcggagctactaacttcagcctgctgaagcaggctggagacgtggaggagaaccctggacctatggtgagcaagggcgaggagctgttcaccggggtggtgcccatcctggtcgagctggacggcgacgtaaacggccacaagttcagcgtgtccggcgagggcgagggcgatgccacctacggcaagctgaccctgaagttcatctgcaccaccggcaagctgcccgtgccctggcccaccctcgtgaccaccctgacctatggagtgcagtgcttcagccgctaccccgaccacatgaagcagcacgacttcttcaagtccgccatgcccgaaggctacgtccaggagcgcaccatcttcttcaaggacgacggcaactacaagacccgcgccgaggtgaagttcgagggcgacaccctggtgaaccgcatcgagctgaagggcatcgacttcaaggaggacggcaacatcctggggcacaagctggagtacaactacaacagccacaacgtctatatcatggccgacaagcagaagaacggcatcaaggtgaacttcaagatccgccacaacatcgaggacggcagcgtgcagctcgccgaccactaccagcagaacacccccatcggcgacggccccgtgctgctgcccgacaaccactacctgagcacccagtccgccctgagcaaagaccccaacgagaagcgcgatcacatggtcctgctggagttcgtgaccgccgccgggatcactctcggcatggacgagctgtacaagtctggtggttctcccaagaagaagaggaaagtctaaccggtcatcatcaccatcaccattgagtttaaacccgctgatcagcctcgactgtgccttctagttgccagccatctgttgtttgcccctcccccgtgccttccttgaccctggaaggtgccactcccactgtcctttcctaataaaatgaggaaattgcatcgcattgtctgagtaggtgtcattctattctggggggtggggtggggcaggacagcaagggggaggattgggaagacaatagcaggcatgctggggatgcggtgggctctatggcttctgaggcggaaagaaccagctggggctcgataccgtcgacctctagctagagcttggcgtaatcatggtcatagctgtttcctgtgtgaaattgttatccgctcacaattccacacaacatacgagccggaagcataaagtgtaaagcctagggtgcctaatgagtgagctaactcacattaattgcgttgcgctcactgcccgctttccagtcgggaaacctgtcgtgccagctgcattaatgaatcggccaacgcgcggggagaggcggtttgcgtattgggcgctcttccgcttcctcgctcactgactcgctgcgctcggtcgttcggctgcggcgagcggtatcagctcactcaaaggcggtaatacggttatccacagaatcaggggataacgcaggaaagaacatgtgagcaaaaggccagcaaaaggccaggaaccgtaaaaaggccgcgttgctggcgtttttccataggctccgcccccctgacgagcatcacaaaaatcgacgctcaagtcagaggtggcgaaacccgacaggactataaagataccaggcgtttccccctggaagctccctcgtgcgctctcctgttccgaccctgccgcttaccggatacctgtccgcctttctcccttcgggaagcgtggcgctttctcatagctcacgctgtaggtatctcagttcggtgtaggtcgttcgctccaagctgggctgtgtgcacgaaccccccgttcagcccgaccgctgcgccttatccggtaactatcgtcttgagtccaacccggtaagacacgacttatcgccactggcagcagccactggtaacaggattagcagagcgaggtatgtaggcggtgctacagagttcttgaagtggtggcctaactacggctacactagaagaacagtatttggtatctgcgctctgctgaagccagttaccttcggaaaaagagttggtagctcttgatccggcaaacaaaccaccgctggtagcggtggtttttttgtttgcaagcagcagattacgcgcagaaaaaaaggatctcaagaagatcctttgatcttttctacggggtctgacactcagtggaacgaaaactcacgttaagggattttggtcatgagattatcaaaaaggatcttcacctagatccttttaaattaaaaatgaagttttaaatcaatctaaagtatatatgagtaaacttggtctgacagttaccaatgcttaatcagtgaggcacctatctcagcgatctgtctatttcgttcatccatagttgcctgactccccgtcgtgtagataactacgatacgggagggcttaccatctggccccagtgctgcaatgataccgcgagacccacgctcaccggctccagatttatcagcaataaaccagccagccggaagggccgagcgcagaagtggtcctgcaactttatccgcctccatccagtctattaattgttgccgggaagctagagtaagtagttcgccagttaatagtttgcgcaacgttgttgccattgctacaggcatcgtggtgtcacgctcgtcgtttggtatggcttcattcagctccggttcccaacgatcaaggcgagttacatgatcccccatgttgtgcaaaaaagcggttagctccttcggtcctccgatcgttgtcagaagtaagttggccgcagtgttatcactcatggttatggcagcactgcataattctcttactgtcatgccatccgtaagatgcttttctgtgactggtgagtactcaaccaagtcattctgagaatagtgtatgcggcgaccgagttgctcttgcccggcgtcaatacgggataataccgcgccacatagcagaactttaaaagtgctcatcattggaaaacgttcttcggggcgaaaactctcaaggatcttaccgctgttgagatccagttcgatgtaacccactcgtgcacccaactgatcttcagcatcttttactttcaccagcgtttctgggtgagcaaaaacaggaaggcaaaatgccgcaaaaaagggaataagggcgacacggaaatgttgaatactcatactcttcctttttcaatattattgaagcatttatcagggttattgtctcatgagcggatacatatttgaatgtatttagaaaaataaacaaataggggttccgcgcacatttccccgaaaagtgccacctgacgtcgacggatcgggagatcgatctcccgatcccctagggtcgactctcagtacaatctgctctgatgccgcatagttaagccagtatctgctccctgcttgtgtgttggaggtcgctgagtagtgcgcgagcaaaatttaagctacaacaaggcaaggcttgaccgacaattgcatgaagaatctgcttagggttaggcgttttgcgctgcttcgcgatgtacgggccagatatacgcgtt

SEQ ID NO: 523 - DNA, 8794 bp, synthetic construct
  source 1..8794: mol_type = other DNA
gacattgattattgactagttattaatagtaatcaattacggggtcattagttcatagcccatatatggagttccgcgttacataacttacggtaaatggcccgcctggctgaccgcccaacgacccccgcccattgacgtcaataatgacgtatgttcccatagtaacgccaatagggactttccattgacgtcaatgggtggagtatttacggtaaactgcccacttggcagtacatcaagtgtatcatatgccaagtacgccccctattgacgtcaatgacggtaaatggcccgcctggcattatgcccagtacatgaccttatgggactttcctacttggcagtacatctacgtattagtcatcgctattaccatggtgatgcggttttggcagtacatcaatgggcgtggatagcggtttgactcacggggatttccaagtctccaccccattgacgtcaatgggagtttgttttggcaccaaaatcaacgggactttccaaaatgtcgtaacaactccgccccattgacgcaaatgggcggtaggcgtgtacggtgggaggtctatataagcagagctggtttagtgaaccgtcagatccgctagagatccgcggccgctaatacgactcactatagggagagccgccaccatgaaacggacagccgacggaagcgagttcgagtcaccaaagaagaagcggaaagtctctgaggttgaattttcacatgagtattggatgagacacgctcttaccttggctaagagagcaagggatgagagagaagttccagtgggagcagttcttgtgttgaacaatagagttattggagagggttggaacaggtaagtatcaaggttacaagacaggtttaaggagaccaatagaaactgggcttgtcgagacagagaagactcttgcgtttctgataggcacctattggtcttactgacatccactttgcctttctctccacagggctattggacttcatgatcctactgctcacgcagaaattatggcacttagacaaggtggacttgttatgcagaactacaggcttatcgatgctactctttatgttacattcgagccatgtgtgatgtgcgctggagcaatgattcattctaggattggaagggttgtgttcggtgttagaaactctaagaggggagctgcaggttcacttatgaacgttttgaattatcctggtatgaaccacagagtggagattactgaaggtattttggcagatgaatgtgctgcacttttgtgcgatttttacagaatgcctagacaagtgttcaacgctcaaaagaaggcacaatcttctattaactctggtggttcttctggtggttctagcggcagcgagactcccgggacctcagagtccgccacacccgaaagttctggtggttcttctggtggttctaaagacaagttcaagctgtacttccagaacccgcaatttatggggggctgggacaaggataaagagacagactaccgcgcgacaattctccgctatggctccaaatactatctggccatcatggacaagaagtacgcgaagtgcctgcagaagatcgacaaagacgacgtcaatggcaactatgaaaagatcaactacaagctgctgccgggcccgaacaagatgctcccgaaggtgttcttcagcaagaagtggatggcctactacaatccaagcgaggatattcagaaaatctataaaaacgggaccttcaagaagggggacatgtttaacctcaacgactgccacaagctcattgatttcttcaaggatagcatttcccgctacccgaaatggtccaatgcgtacgattttaacttctccgagacagaaaagtacaaagacatcgcgggcttttacagggaggtggaggagcaagggtataaagtttcttttgaatccgcgagcaagaaggaagtcgacaagctcgtcgaggagggcaagctctacatgttccaaatttataacaaggacttttccgacaagagccatgggaccccaaacctccacaccatgtacttcaaactgctctttgacgagaacaaccacgggcaaatcaggctgagcggcggcgccgaattattcatgcgcagggcctccctcaagaaggaagagctggtcgtccatccagccaattccccgatcgcgaacaagaacccggacaatccgaaaaagaccaccaccctgtcctacgacgtctacaaggacaaacgcttcagcgaagaccagtacgaattacacatcccaattgcgattaataagtgcccaaagaatatcttcaaaattaatacagaggtcagggtgctgctcaaacacgacgacaatccgtatgtcatcggcattgccaggggcgagcgcaatctgctctatatcgtggtcgtggatgggaagggcaatattgtggagcagtactccctgaacgagattatcaacaacttcaatgggattaggattaagaccgactatcacagcctgctcgacaagaaagaaaaagagaggtttgaggcccgccaaaactggacctccattgagaatatcaaagaattaaaggccggctatatttcccaagtcgtccacaagatctgcgagctggtggagaaatatgacgccgtgattgcgctcgaagacttaaattctgggttcaagaactcccgcgtgaaggtggaaaaacaggtgtatcagaaattcgagaaaatgctgatcgacaaactcaattatatggtggataagaagtccaacccgtgtgccacagggggcgcgctgaagggctatcagatcaccaacaagttcgagagcttcaagagcatgagcacccagaacgggtttattttctacatcccggcgtggctcacctccaagattgacccgagcaccggcttcgtgaacctcctgaagacaaagtatacctccattgccgacagcaagaagtttatctcctccttcgaccgcattatgtatgtgccggaggaggacctcttcgagttcgccctcgactacaaaaacttcagccgcacagatgcggattacatcaagaagtggaagctgtactcctacgggaacaggatccgcatcttcaggaatccaaaaaaaaataacgtctttgactgggaggaagtgtgcctgacatccgcctacaaggaactgttcaataaatacggcatcaattaccagcagggcgacattcgcgccctcctctgtgagcagtccgacaaagcgttttactccagcttcatggccctcatgtccctgatgctccaaatgaggaatagcatcacagggcgcaccgacgtcgacttcctcatcagcccggtgaagaactccgacgggatcttttacgactcccgcaactatgaggcgcaagagaatgcgatcctcccgaagaacgccgatgcgaacggggcctataatatcgccaggaaagtgctctgggccatcgggcagttcaaaaaggcggaggatgagaagctcgacaaggtgaaaattgccatttccaacaaggagtggctggagtacgcgcagacctccgtgaagcacggctcctctggcagctccggctctagcggctcctctggcagctccggctccaagctggagaagtttacaaactgttacagcctctccaaaaccctcaggtttaaagcgatcccggtgggcaagacccaggagaacatcgacaacaagaggctcctggtggaagacgagaagcgcgccgaagactacaagggcgtgaagaagctgctcgataggtactacctcagctttattaacgacgtgctgcacagcatcaaactcaagaatctcaacaactacatctccctcttccgcaaaaagacccgcaccgagaaggagaacaaggagctggagaacctggagatcaacctccgcaaggaaatcgccaaagcgttcaagggcaatgaagggtacaagagcctcttcaagaaagacatcatcgaaactatcctcccagagtttctcgatgacaaggacgagatcgcgctggtgaactcctttaacgggttcacaaccgcgtttaccggcttctttgataacagggaaaatatgttctccgaggaggccaagtccaccagcatcgccttcaggtgtatcaacgagaacctcacccgctacatttccaatatggacattttcgagaaggtggatgcgatcttcgataagcacgaggtgcaggagatcaaagagaagattctcaattccgattatgacgtcgaggatttcttcgaaggggagttctttaattttgtgctcacacaagagggcattgacgtgtacaacgcgattatcgggggcttcgtcacagagtccggggagaagattaaggggctgaatgagtacatcaatctgtacaatcagaagaccaagcagaaactgccgaaattcaagccgctctacaagcaagtcctgtccgatagggaaagcctctccttctacggcgagggctataccagcgacgaggaggtgctggaagtcttccgcaacacactgaataagaatagcgagattttctcctccatcaagaagctcgagaagctctttaagaactttgacgagtacagctccgccgggattttcgtgaagaacgggccggcgatcagcaccatctccaaggacatctttggcgagtggaacgtcatcagggacaagtggaacgccgagtacgacgacatccacctgaagaagaaggcggtggtgaccgagaagtatgaggacgatcgcaggaagtccttcaaaaaaatcggctccttcagcctcgaacagctccaggagtatgccgatgcggatctgtccgtcgtcgagaagctgaaggaaatcatcattcagaaggtcgacgagatctataaagtgtacgggtccagcgagaagctgttcgacgccgactttgtgctcgagaagtccctcaaaaagaatgacgccgtggtggccattatgaaagacctgctcgactccgtgaagtccttcgaaaattacattaaagcgttctttggggaggggaaggaaactaacagggatgagtccttctatggcgactttgtcctcgcgtacgacatcctgctgaaggtcgaccacatttacgacgcgatccgcaactacgtgacacagaagccgtactcctctggcggctcaaaaagaaccgccgacggcagcgaattcgagcccaagaagaagaggaaagtcggaagcggagctactaacttcagcctgctgaagcaggctggagacgtggaggagaaccctggacctatggtgagcaagggcgaggagctgttcaccggggtggtgcccatcctggtcgagctggacggcgacgtaaacggccacaagttcagcgtgtccggcgagggcgagggcgatgccacctacggcaagctgaccctgaagttcatctgcaccaccggcaagctgcccgtgccctggcccaccctcgtgaccaccctgacctatggagtgcagtgcttcagccgctaccccgaccacatgaagcagcacgacttcttcaagtccgccatgcccgaaggctacgtccaggagcgcaccatcttcttcaaggacgacggcaactacaagacccgcgccgaggtgaagttcgagggcgacaccctggtgaaccgcatcgagctgaagggcatcgacttcaaggaggacggcaacatcctggggcacaagctggagtacaactacaacagccacaacgtctatatcatggccgacaagcagaagaacggcatcaaggtgaacttcaagatccgccacaacatcgaggacggcagcgtgcagctcgccgaccactaccagcagaacacccccatcggcgacggccccgtgctgctgcccgacaaccactacctgagcacccagtccgccctgagcaaagaccccaacgagaagcgcgatcacatggtcctgctggagttcgtgaccgccgccgggatcactctcggcatggacgagctgtacaagtctggtggttctcccaagaagaagaggaaagtctaaccggtcatcatcaccatcaccattgagtttaaacccgctgatcagcctcgactgtgccttctagttgccagccatctgttgtttgcccctcccccgtgccttccttgaccctggaaggtgccactcccactgtcctttcctaataaaatgaggaaattgcatcgcattgtctgagtaggtgtcattctattctggggggtggggtggggcaggacagcaagggggaggattgggaagacaatagcaggcatgctggggatgcggtgggctctatggcttctgaggcggaaagaaccagctggggctcgataccgtcgacctctagctagagcttggcgtaatcatggtcatagctgtttcctgtgtgaaattgttatccgctcacaattccacacaacatacgagccggaagcataaagtgtaaagcctagggtgcctaatgagtgagctaactcacattaattgcgttgcgctcactgcccgctttccagtcgggaaacctgtcgtgccagctgcattaatgaatcggccaacgcgcggggagaggcggtttgcgtattgggcgctcttccgcttcctcgctcactgactcgctgcgctcggtcgttcggctgcggcgagcggtatcagctcactcaaaggcggtaatacggttatccacagaatcaggggataacgcaggaaagaacatgtgagcaaaaggccagcaaaaggccaggaaccgtaaaaaggccgcgttgctggcgtttttccataggctccgcccccctgacgagcatcacaaaaatcgacgctcaagtcagaggtggcgaaacccgacaggactataaagataccaggcgtttccccctggaagctccctcgtgcgctctcctgttccgaccctgccgcttaccggatacctgtccgcctttctcccttcgggaagcgtggcgctttctcatagctcacgctgtaggtatctcagttcggtgtaggtcgttcgctccaagctgggctgtgtgcacgaaccccccgttcagcccgaccgctgcgccttatccggtaactatcgtcttgagtccaacccggtaagacacgacttatcgccactggcagcagccactggtaacaggattagcagagcgaggtatgtaggcggtgctacagagttcttgaagtggtggcctaactacggctacactagaagaacagtatttggtatctgcgctctgctgaagccagttaccttcggaaaaagagttggtagctcttgatccggcaaacaaaccaccgctggtagcggtggtttttttgtttgcaagcagcagattacgcgcagaaaaaaaggatctcaagaagatcctttgatcttttctacggggtctgacactcagtggaacgaaaactcacgttaagggattttggtcatgagattatcaaaaaggatcttcacctagatccttttaaattaaaaatgaagttttaaatcaatctaaagtatatatgagtaaacttggtctgacagttaccaatgcttaatcagtgaggcacctatctcagcgatctgtctatttcgttcatccatagttgcctgactccccgtcgtgtagataactacgatacgggagggcttaccatctggccccagtgctgcaatgataccgcgagacccacgctcaccggctccagatttatcagcaataaaccagccagccggaagggccgagcgcagaagtggtcctgcaactttatccgcctccatccagtctattaattgttgccgggaagctagagtaagtagttcgccagttaatagtttgcgcaacgttgttgccattgctacaggcatcgtggtgtcacgctcgtcgtttggtatggcttcattcagctccggttcccaacgatcaaggcgagttacatgatcccccatgttgtgcaaaaaagcggttagctccttcggtcctccgatcgttgtcagaagtaagttggccgcagtgttatcactcatggttatggcagcactgcataattctcttactgtcatgccatccgtaagatgcttttctgtgactggtgagtactcaaccaagtcattctgagaatagtgtatgcggcgaccgagttgctcttgcccggcgtcaatacgggataataccgcgccacatagcagaactttaaaagtgctcatcattggaaaacgttcttcggggcgaaaactctcaaggatcttaccgctgttgagatccagttcgatgtaacccactcgtgcacccaactgatcttcagcatcttttactttcaccagcgtttctgggtgagcaaaaacaggaaggcaaaatgccgcaaaaaagggaataagggcgacacggaaatgttgaatactcatactcttcctttttcaatattattgaagcatttatcagggttattgtctcatgagcggatacatatttgaatgtatttagaaaaataaacaaataggggttccgcgcacatttccccgaaaagtgccacctgacgtcgacggatcgggagatcgatctcccgatcccctagggtcgactctcagtacaatctgctctgatgccgcatagttaagccagtatctgctccctgcttgtgtgttggaggtcgctgagtagtgcgcgagcaaaatttaagctacaacaaggcaaggcttgaccgacaattgcatgaagaatctgcttagggttaggcgttttgcgctgcttcgcgatgtacgggccagatatacgcgtt

SEQ ID NO: 524 - DNA, 8794 bp, synthetic construct
  source 1..8794: mol_type = other DNA
gacattgattattgactagttattaatagtaatcaattacggggtcattagttcatagcccatatatggagttccgcgttacataacttacggtaaatggcccgcctggctgaccgcccaacgacccccgcccattgacgtcaataatgacgtatgttcccatagtaacgccaatagggactttccattgacgtcaatgggtggagtatttacggtaaactgcccacttggcagtacatcaagtgtatcatatgccaagtacgccccctattgacgtcaatgacggtaaatggcccgcctggcattatgcccagtacatgaccttatgggactttcctacttggcagtacatctacgtattagtcatcgctattaccatggtgatgcggttttggcagtacatcaatgggcgtggatagcggtttgactcacggggatttccaagtctccaccccattgacgtcaatgggagtttgttttggcaccaaaatcaacgggactttccaaaatgtcgtaacaactccgccccattgacgcaaatgggcggtaggcgtgtacggtgggaggtctatataagcagagctggtttagtgaaccgtcagatccgctagagatccgcggccgctaatacgactcactatagggagagccgccaccatgaaacggacagccgacggaagcgagttcgagtcaccaaagaagaagcggaaagtctctgaggttgaattttcacatgagtattggatgagacacgctcttaccttggctaagagagcaagggatgagagagaagttccagtgggagcagttcttgtgttgaacaatagagttattggagagggttggaacaggtaagtatcaaggttacaagacaggtttaaggagaccaatagaaactgggcttgtcgagacagagaagactcttgcgtttctgataggcacctattggtcttactgacatccactttgcctttctctccacagggctattggacttcatgatcctactgctcacgcagaaattatggcacttagacaaggtggacttgttatgcagaactacaggcttatcgatgctactctttatgttacattcgagccatgtgtgatgtgcgctggagcaatgattcattctaggattggaagggttgtgttcggtgttagaaactctaagaggggagctgcaggttcacttatgaacgttttgaattatcctggtatgaaccacagagtggagattactgaaggtattttggcagatgaatgtgctgcacttttgtgcgatttttacagaatgcctagacaagtgttcaacgctcaaaagaaggcacaatcttctattaactctggtggttcttctggtggttctagcggcagcgagactcccgggacctcagagtccgccacacccgaaagttctggtggttcttctggtggttctaagtccctcaaaaagaatgacgccgtggtggccattatgaaagacctgctcgactccgtgaagtccttcgaaaattacattaaagcgttctttggggaggggaaggaaactaacagggatgagtccttctatggcgactttgtcctcgcgtacgacatcctgctgaaggtcgaccacatttacgacgcgatccgcaactacgtgacacagaagccgtactccaaagacaagttcaagctgtacttccagaacccgcaatttatggggggctgggacaaggataaagagacagactaccgcgcgacaattctccgctatggctccaaatactatctggccatcatggacaagaagtacgcgaagtgcctgcagaagatcgacaaagacgacgtcaatggcaactatgaaaagatcaactacaagctgctgccgggcccgaacaagatgctcccgaaggtgttcttcagcaagaagtggatggcctactacaatccaagcgaggatattcagaaaatctataaaaacgggaccttcaagaagggggacatgtttaacctcaacgactgccacaagctcattgatttcttcaaggatagcatttcccgctacccgaaatggtccaatgcgtacgattttaacttctccgagacagaaaagtacaaagacatcgcgggcttttacagggaggtggaggagcaagggtataaagtttcttttgaatccgcgagcaagaaggaagtcgacaagctcgtcgaggagggcaagctctacatgttccaaatttataacaaggacttttccgacaagagccatgggaccccaaacctccacaccatgtacttcaaactgctctttgacgagaacaaccacgggcaaatcaggctgagcggcggcgccgaattattcatgcgcagggcctccctcaagaaggaagagctggtcgtccatccagccaattccccgatcgcgaacaagaacccggacaatccgaaaaagaccaccaccctgtcctacgacgtctacaaggacaaacgcttcagcgaagaccagtacgaattacacatcccaattgcgattaataagtgcccaaagaatatcttcaaaattaatacagaggtcagggtgctgctcaaacacgacgacaatccgtatgtcatcggcattgccaggggcgagcgcaatctgctctatatcgtggtcgtggatgggaagggcaatattgtggagcagtactccctgaacgagattatcaacaacttcaatgggattaggattaagaccgactatcacagcctgctcgacaagaaagaaaaagagaggtttgaggcccgccaaaactggacctccattgagaatatcaaagaattaaaggccggctatatttcccaagtcgtccacaagatctgcgagctggtggagaaatatgacgccgtgattgcgctcgaagacttaaattctgggttcaagaactcccgcgtgaaggtggaaaaacaggtgtatcagaaattcgagaaaatgctgatcgacaaactcaattatatggtggataagaagtccaacccgtgtgccacagggggcgcgctgaagggctatcagatcaccaacaagttcgagagcttcaagagcatgagcacccagaacgggtttattttctacatcccggcgtggctcacctccaagattgacccgagcaccggcttcgtgaacctcctgaagacaaagtatacctccattgccgacagcaagaagtttatctcctccttcgaccgcattatgtatgtgccggaggaggacctcttcgagttcgccctcgactacaaaaacttcagccgcacagatgcggattacatcaagaagtggaagctgtactcctacgggaacaggatccgcatcttcaggaatccaaaaaaaaataacgtctttgactgggaggaagtgtgcctgacatccgcctacaaggaactgttcaataaatacggcatcaattaccagcagggcgacattcgcgccctcctctgtgagcagtccgacaaagcgttttactccagcttcatggccctcatgtccctgatgctccaaatgaggaatagcatcacagggcgcaccgacgtcgacttcctcatcagcccggtgaagaactccgacgggatcttttacgactcccgcaactatgaggcgcaagagaatgcgatcctcccgaagaacgccgatgcgaacggggcctataatatcgccaggaaagtgctctgggccatcgggcagttcaaaaaggcggaggatgagaagctcgacaaggtgaaaattgccatttccaacaaggagtggctggagtacgcgcagacctccgtgaagcacggctcctctggcagctccggctctagcggctcctctggcagctccggctccaagctggagaagtttacaaactgttacagcctctccaaaaccctcaggtttaaagcgatcccggtgggcaagacccaggagaacatcgacaacaagaggctcctggtggaagacgagaagcgcgccgaagactacaagggcgtgaagaagctgctcgataggtactacctcagctttattaacgacgtgctgcacagcatcaaactcaagaatctcaacaactacatctccctcttccgcaaaaagacccgcaccgagaaggagaacaaggagctggagaacctggagatcaacctccgcaaggaaatcgccaaagcgttcaagggcaatgaagggtacaagagcctcttcaagaaagacatcatcgaaactatcctcccagagtttctcgatgacaaggacgagatcgcgctggtgaactcctttaacgggttcacaaccgcgtttaccggcttctttgataacagggaaaatatgttctccgaggaggccaagtccaccagcatcgccttcaggtgtatcaacgagaacctcacccgctacatttccaatatggacattttcgagaaggtggatgcgatcttcgataagcacgaggtgcaggagatcaaagagaagattctcaattccgattatgacgtcgaggatttcttcgaaggggagttctttaattttgtgctcacacaagagggcattgacgtgtacaacgcgattatcgggggcttcgtcacagagtccggggagaagattaaggggctgaatgagtacatcaatctgtacaatcagaagaccaagcagaaactgccgaaattcaagccgctctacaagcaagtcctgtccgatagggaaagcctctccttctacggcgagggctataccagcgacgaggaggtgctggaagtcttccgcaacacactgaataagaatagcgagattttctcctccatcaagaagctcgagaagctctttaagaactttgacgagtacagctccgccgggattttcgtgaagaacgggccggcgatcagcaccatctccaaggacatctttggcgagtggaacgtcatcagggacaagtggaacgccgagtacgacgacatccacctgaagaagaaggcggtggtgaccgagaagtatgaggacgatcgcaggaagtccttcaaaaaaatcggctccttcagcctcgaacagctccaggagtatgccgatgcggatctgtccgtcgtcgagaagctgaaggaaatcatcattcagaaggtcgacgagatctataaagtgtacgggtccagcgagaagctgttcgacgccgactttgtgctcgagtctggcggctcaaaaagaaccgccgacggcagcgaattcgagcccaagaagaagaggaaagtcggaagcggagctactaacttcagcctgctgaagcaggctggagacgtggaggagaaccctggacctatggtgagcaagggcgaggagctgttcaccggggtggtgcccatcctggtcgagctggacggcgacgtaaacggccacaagttcagcgtgtccggcgagggcgagggcgatgccacctacggcaagctgaccctgaagttcatctgcaccaccggcaagctgcccgtgccctggcccaccctcgtgaccaccctgacctatggagtgcagtgcttcagccgctaccccgaccacatgaagcagcacgacttcttcaagtccgccatgcccgaaggctacgtccaggagcgcaccatcttcttcaaggacgacggcaactacaagacccgcgccgaggtgaagttcgagggcgacaccctggtgaaccgcatcgagctgaagggcatcgacttcaaggaggacggcaacatcctggggcacaagctggagtacaactacaacagccacaacgtctatatcatggccgacaagcagaagaacggcatcaaggtgaacttcaagatccgccacaacatcgaggacggcagcgtgcagctcgccgaccactaccagcagaacacccccatcggcgacggccccgtgctgctgcccgacaaccactacctgagcacccagtccgccctgagcaaagaccccaacgagaagcgcgatcacatggtcctgctggagttcgtgaccgccgccgggatcactctcggcatggacgagctgtacaagtctggtggttctcccaagaagaagaggaaagtctaaccggtcatcatcaccatcaccattgagtttaaacccgctgatcagcctcgactgtgccttctagttgccagccatctgttgtttgcccctcccccgtgccttccttgaccctggaaggtgccactcccactgtcctttcctaataaaatgaggaaattgcatcgcattgtctgagtaggtgtcattctattctggggggtggggtggggcaggacagcaagggggaggattgggaagacaatagcaggcatgctggggatgcggtgggctctatggcttctgaggcggaaagaaccagctggggctcgataccgtcgacctctagctagagcttggcgtaatcatggtcatagctgtttcctgtgtgaaattgttatccgctcacaattccacacaacatacgagccggaagcataaagtgtaaagcctagggtgcctaatgagtgagctaactcacattaattgcgttgcgctcactgcccgctttccagtcgggaaacctgtcgtgccagctgcattaatgaatcggccaacgcgcggggagaggcggtttgcgtattgggcgctcttccgcttcctcgctcactgactcgctgcgctcggtcgttcggctgcggcgagcggtatcagctcactcaaaggcggtaatacggttatccacagaatcaggggataacgcaggaaagaacatgtgagcaaaaggccagcaaaaggccaggaaccgtaaaaaggccgcgttgctggcgtttttccataggctccgcccccctgacgagcatcacaaaaatcgacgctcaagtcagaggtggcgaaacccgacaggactataaagataccaggcgtttccccctggaagctccctcgtgcgctctcctgttccgaccctgccgcttaccggatacctgtccgcctttctcccttcgggaagcgtggcgctttctcatagctcacgctgtaggtatctcagttcggtgtaggtcgttcgctccaagctgggctgtgtgcacgaaccccccgttcagcccgaccgctgcgccttatccggtaactatcgtcttgagtccaacccggtaagacacgacttatcgccactggcagcagccactggtaacaggattagcagagcgaggtatgtaggcggtgctacagagttcttgaagtggtggcctaactacggctacactagaagaacagtatttggtatctgcgctctgctgaagccagttaccttcggaaaaagagttggtagctcttgatccggcaaacaaaccaccgctggtagcggtggtttttttgtttgcaagcagcagattacgcgcagaaaaaaaggatctcaagaagatcctttgatcttttctacggggtctgacactcagtggaacgaaaactcacgttaagggattttggtcatgagattatcaaaaaggatcttcacctagatccttttaaattaaaaatgaagttttaaatcaatctaaagtatatatgagtaaacttggtctgacagttaccaatgcttaatcagtgaggcacctatctcagcgatctgtctatttcgttcatccatagttgcctgactccccgtcgtgtagataactacgatacgggagggcttaccatctggccccagtgctgcaatgataccgcgagacccacgctcaccggctccagatttatcagcaataaaccagccagccggaagggccgagcgcagaagtggtcctgcaactttatccgcctccatccagtctattaattgttgccgggaagctagagtaagtagttcgccagttaatagtttgcgcaacgttgttgccattgctacaggcatcgtggtgtcacgctcgtcgtttggtatggcttcattcagctccggttcccaacgatcaaggcgagttacatgatcccccatgttgtgcaaaaaagcggttagctccttcggtcctccgatcgttgtcagaagtaagttggccgcagtgttatcactcatggttatggcagcactgcataattctcttactgtcatgccatccgtaagatgcttttctgtgactggtgagtactcaaccaagtcattctgagaatagtgtatgcggcgaccgagttgctcttgcccggcgtcaatacgggataataccgcgccacatagcagaactttaaaagtgctcatcattggaaaacgttcttcggggcgaaaactctcaaggatcttaccgctgttgagatccagttcgatgtaacccactcgtgcacccaactgatcttcagcatcttttactttcaccagcgtttctgggtgagcaaaaacaggaaggcaaaatgccgcaaaaaagggaataagggcgacacggaaatgttgaatactcatactcttcctttttcaatattattgaagcatttatcagggttattgtctcatgagcggatacatatttgaatgtatttagaaaaataaacaaataggggttccgcgcacatttccccgaaaagtgccacctgacgtcgacggatcgggagatcgatctcccgatcccctagggtcgactctcagtacaatctgctctgatgccgcatagttaagccagtatctgctccctgcttgtgtgttggaggtcgctgagtagtgcgcgagcaaaatttaagctacaacaaggcaaggcttgaccgacaattgcatgaagaatctgcttagggttaggcgttttgcgctgcttcgcgatgtacgggccagatatacgcgtt

SEQ ID NO: 525 - DNA, 8794 bp, synthetic construct
  source 1..8794: mol_type = other DNA
gacattgattattgactagttattaatagtaatcaattacggggtcattagttcatagcccatatatggagttccgcgttacataacttacggtaaatggcccgcctggctgaccgcccaacgacccccgcccattgacgtcaataatgacgtatgttcccatagtaacgccaatagggactttccattgacgtcaatgggtggagtatttacggtaaactgcccacttggcagtacatcaagtgtatcatatgccaagtacgccccctattgacgtcaatgacggtaaatggcccgcctggcattatgcccagtacatgaccttatgggactttcctacttggcagtacatctacgtattagtcatcgctattaccatggtgatgcggttttggcagtacatcaatgggcgtggatagcggtttgactcacggggatttccaagtctccaccccattgacgtcaatgggagtttgttttggcaccaaaatcaacgggactttccaaaatgtcgtaacaactccgccccattgacgcaaatgggcggtaggcgtgtacggtgggaggtctatataagcagagctggtttagtgaaccgtcagatccgctagagatccgcggccgctaatacgactcactatagggagagccgccaccatgaaacggacagccgacggaagcgagttcgagtcaccaaagaagaagcggaaagtctctgaggttgaattttcacatgagtattggatgagacacgctcttaccttggctaagagagcaagggatgagagagaagttccagtgggagcagttcttgtgttgaacaatagagttattggagagggttggaacaggtaagtatcaaggttacaagacaggtttaaggagaccaatagaaactgggcttgtcgagacagagaagactcttgcgtttctgataggcacctattggtcttactgacatccactttgcctttctctccacagggctattggacttcatgatcctactgctcacgcagaaattatggcacttagacaaggtggacttgttatgcagaactacaggcttatcgatgctactctttatgttacattcgagccatgtgtgatgtgcgctggagcaatgattcattctaggattggaagggttgtgttcggtgttagaaactctaagaggggagctgcaggttcacttatgaacgttttgaattatcctggtatgaaccacagagtggagattactgaaggtattttggcagatgaatgtgctgcacttttgtgcgatttttacagaatgcctagacaagtgttcaacgctcaaaagaaggcacaatcttctattaactctggtggttcttctggtggttctagcggcagcgagactcccgggacctcagagtccgccacacccgaaagttctggtggttcttctggtggttcttccgacaaagcgttttactccagcttcatggccctcatgtccctgatgctccaaatgaggaatagcatcacagggcgcaccgacgtcgacttcctcatcagcccggtgaagaactccgacgggatcttttacgactcccgcaactatgaggcgcaagagaatgcgatcctcccgaagaacgccgatgcgaacggggcctataatatcgccaggaaagtgctctgggccatcgggcagttcaaaaaggcggaggatgagaagctcgacaaggtgaaaattgccatttccaacaaggagtggctggagtacgcgcagacctccgtgaagcacggctcctctggcagctccggctctagcggctcctctggcagctccggctccaagctggagaagtttacaaactgttacagcctctccaaaaccctcaggtttaaagcgatcccggtgggcaagacccaggagaacatcgacaacaagaggctcctggtggaagacgagaagcgcgccgaagactacaagggcgtgaagaagctgctcgataggtactacctcagctttattaacgacgtgctgcacagcatcaaactcaagaatctcaacaactacatctccctcttccgcaaaaagacccgcaccgagaaggagaacaaggagctggagaacctggagatcaacctccgcaaggaaatcgccaaagcgttcaagggcaatgaagggtacaagagcctcttcaagaaagacatcatcgaaactatcctcccagagtttctcgatgacaaggacgagatcgcgctggtgaactcctttaacgggttcacaaccgcgtttaccggcttctttgataacagggaaaatatgttctccgaggaggccaagtccaccagcatcgccttcaggtgtatcaacgagaacctcacccgctacatttccaatatggacattttcgagaaggtggatgcgatcttcgataagcacgaggtgcaggagatcaaagagaagattctcaattccgattatgacgtcgaggatttcttcgaaggggagttctttaattttgtgctcacacaagagggcattgacgtgtacaacgcgattatcgggggcttcgtcacagagtccggggagaagattaaggggctgaatgagtacatcaatctgtacaatcagaagaccaagcagaaactgccgaaattcaagccgctctacaagcaagtcctgtccgatagggaaagcctctccttctacggcgagggctataccagcgacgaggaggtgctggaagtcttccgcaacacactgaataagaatagcgagattttctcctccatcaagaagctcgagaagctctttaagaactttgacgagtacagctccgccgggattttcgtgaagaacgggccggcgatcagcaccatctccaaggacatctttggcgagtggaacgtcatcagggacaagtggaacgccgagtacgacgacatccacctgaagaagaaggcggtggtgaccgagaagtatgaggacgatcgcaggaagtccttcaaaaaaatcggctccttcagcctcgaacagctccaggagtatgccgatgcggatctgtccgtcgtcgagaagctgaaggaaatcatcattcagaaggtcgacgagatctataaagtgtacgggtccagcgagaagctgttcgacgccgactttgtgctcgagaagtccctcaaaaagaatgacgccgtggtggccattatgaaagacctgctcgactccgtgaagtccttcgaaaattacattaaagcgttctttggggaggggaaggaaactaacagggatgagtccttctatggcgactttgtcctcgcgtacgacatcctgctgaaggtcgaccacatttacgacgcgatccgcaactacgtgacacagaagccgtactccaaagacaagttcaagctgtacttccagaacccgcaatttatggggggctgggacaaggataaagagacagactaccgcgcgacaattctccgctatggctccaaatactatctggccatcatggacaagaagtacgcgaagtgcctgcagaagatcgacaaagacgacgtcaatggcaactatgaaaagatcaactacaagctgctgccgggcccgaacaagatgctcccgaaggtgttcttcagcaagaagtggatggcctactacaatccaagcgaggatattcagaaaatctataaaaacgggaccttcaagaagggggacatgtttaacctcaacgactgccacaagctcattgatttcttcaaggatagcatttcccgctacccgaaatggtccaatgcgtacgattttaacttctccgagacagaaaagtacaaagacatcgcgggcttttacagggaggtggaggagcaagggtataaagtttcttttgaatccgcgagcaagaaggaagtcgacaagctcgtcgaggagggcaagctctacatgttccaaatttataacaaggacttttccgacaagagccatgggaccccaaacctccacaccatgtacttcaaactgctctttgacgagaacaaccacgggcaaatcaggctgagcggcggcgccgaattattcatgcgcagggcctccctcaagaaggaagagctggtcgtccatccagccaattccccgatcgcgaacaagaacccggacaatccgaaaaagaccaccaccctgtcctacgacgtctacaaggacaaacgcttcagcgaagaccagtacgaattacacatcccaattgcgattaataagtgcccaaagaatatcttcaaaattaatacagaggtcagggtgctgctcaaacacgacgacaatccgtatgtcatcggcattgccaggggcgagcgcaatctgctctatatcgtggtcgtggatgggaagggcaatattgtggagcagtactccctgaacgagattatcaacaacttcaatgggattaggattaagaccgactatcacagcctgctcgacaagaaagaaaaagagaggtttgaggcccgccaaaactggacctccattgagaatatcaaagaattaaaggccggctatatttcccaagtcgtccacaagatctgcgagctggtggagaaatatgacgccgtgattgcgctcgaagacttaaattctgggttcaagaactcccgcgtgaaggtggaaaaacaggtgtatcagaaattcgagaaaatgctgatcgacaaactcaattatatggtggataagaagtccaacccgtgtgccacagggggcgcgctgaagggctatcagatcaccaacaagttcgagagcttcaagagcatgagcacccagaacgggtttattttctacatcccggcgtggctcacctccaagattgacccgagcaccggcttcgtgaacctcctgaagacaaagtatacctccattgccgacagcaagaagtttatctcctccttcgaccgcattatgtatgtgccggaggaggacctcttcgagttcgccctcgactacaaaaacttcagccgcacagatgcggattacatcaagaagtggaagctgtactcctacgggaacaggatccgcatcttcaggaatccaaaaaaaaataacgtctttgactgggaggaagtgtgcctgacatccgcctacaaggaactgttcaataaatacggcatcaattaccagcagggcgacattcgcgccctcctctgtgagcagtctggcggctcaaaaagaaccgccgacggcagcgaattcgagcccaagaagaagaggaaagtcggaagcggagctactaacttcagcctgctgaagcaggctggagacgtggaggagaaccctggacctatggtgagcaagggcgaggagctgttcaccggggtggtgcccatcctggtcgagctggacggcgacgtaaacggccacaagttcagcgtgtccggcgagggcgagggcgatgccacctacggcaagctgaccctgaagttcatctgcaccaccggcaagctgcccgtgccctggcccaccctcgtgaccaccctgacctatggagtgcagtgcttcagccgctaccccgaccacatgaagcagcacgacttcttcaagtccgccatgcccgaaggctacgtccaggagcgcaccatcttcttcaaggacgacggcaactacaagacccgcgccgaggtgaagttcgagggcgacaccctggtgaaccgcatcgagctgaagggcatcgacttcaaggaggacggcaacatcctggggcacaagctggagtacaactacaacagccacaacgtctatatcatggccgacaagcagaagaacggcatcaaggtgaacttcaagatccgccacaacatcgaggacggcagcgtgcagctcgccgaccactaccagcagaacacccccatcggcgacggccccgtgctgctgcccgacaaccactacctgagcacccagtccgccctgagcaaagaccccaacgagaagcgcgatcacatggtcctgctggagttcgtgaccgccgccgggatcactctcggcatggacgagctgtacaagtctggtggttctcccaagaagaagaggaaagtctaaccggtcatcatcaccatcaccattgagtttaaacccgctgatcagcctcgactgtgccttctagttgccagccatctgttgtttgcccctcccccgtgccttccttgaccctggaaggtgccactcccactgtcctttcctaataaaatgaggaaattgcatcgcattgtctgagtaggtgtcattctattctggggggtggggtggggcaggacagcaagggggaggattgggaagacaatagcaggcatgctggggatgcggtgggctctatggcttctgaggcggaaagaaccagctggggctcgataccgtcgacctctagctagagcttggcgtaatcatggtcatagctgtttcctgtgtgaaattgttatccgctcacaattccacacaacatacgagccggaagcataaagtgtaaagcctagggtgcctaatgagtgagctaactcacattaattgcgttgcgctcactgcccgctttccagtcgggaaacctgtcgtgccagctgcattaatgaatcggccaacgcgcggggagaggcggtttgcgtattgggcgctcttccgcttcctcgctcactgactcgctgcgctcggtcgttcggctgcggcgagcggtatcagctcactcaaaggcggtaatacggttatccacagaatcaggggataacgcaggaaagaacatgtgagcaaaaggccagcaaaaggccaggaaccgtaaaaaggccgcgttgctggcgtttttccataggctccgcccccctgacgagcatcacaaaaatcgacgctcaagtcagaggtggcgaaacccgacaggactataaagataccaggcgtttccccctggaagctccctcgtgcgctctcctgttccgaccctgccgcttaccggatacctgtccgcctttctcccttcgggaagcgtggcgctttctcatagctcacgctgtaggtatctcagttcggtgtaggtcgttcgctccaagctgggctgtgtgcacgaaccccccgttcagcccgaccgctgcgccttatccggtaactatcgtcttgagtccaacccggtaagacacgacttatcgccactggcagcagccactggtaacaggattagcagagcgaggtatgtaggcggtgctacagagttcttgaagtggtggcctaactacggctacactagaagaacagtatttggtatctgcgctctgctgaagccagttaccttcggaaaaagagttggtagctcttgatccggcaaacaaaccaccgctggtagcggtggtttttttgtttgcaagcagcagattacgcgcagaaaaaaaggatctcaagaagatcctttgatcttttctacggggtctgacactcagtggaacgaaaactcacgttaagggattttggtcatgagattatcaaaaaggatcttcacctagatccttttaaattaaaaatgaagttttaaatcaatctaaagtatatatgagtaaacttggtctgacagttaccaatgcttaatcagtgaggcacctatctcagcgatctgtctatttcgttcatccatagttgcctgactccccgtcgtgtagataactacgatacgggagggcttaccatctggccccagtgctgcaatgataccgcgagacccacgctcaccggctccagatttatcagcaataaaccagccagccggaagggccgagcgcagaagtggtcctgcaactttatccgcctccatccagtctattaattgttgccgggaagctagagtaagtagttcgccagttaatagtttgcgcaacgttgttgccattgctacaggcatcgtggtgtcacgctcgtcgtttggtatggcttcattcagctccggttcccaacgatcaaggcgagttacatgatcccccatgttgtgcaaaaaagcggttagctccttcggtcctccgatcgttgtcagaagtaagttggccgcagtgttatcactcatggttatggcagcactgcataattctcttactgtcatgccatccgtaagatgcttttctgtgactggtgagtactcaaccaagtcattctgagaatagtgtatgcggcgaccgagttgctcttgcccggcgtcaatacgggataataccgcgccacatagcagaactttaaaagtgctcatcattggaaaacgttcttcggggcgaaaactctcaaggatcttaccgctgttgagatccagttcgatgtaacccactcgtgcacccaactgatcttcagcatcttttactttcaccagcgtttctgggtgagcaaaaacaggaaggcaaaatgccgcaaaaaagggaataagggcgacacggaaatgttgaatactcatactcttcctttttcaatattattgaagcatttatcagggttattgtctcatgagcggatacatatttgaatgtatttagaaaaataaacaaataggggttccgcgcacatttccccgaaaagtgccacctgacgtcgacggatcgggagatcgatctcccgatcccctagggtcgactctcagtacaatctgctctgatgccgcatagttaagccagtatctgctccctgcttgtgtgttggaggtcgctgagtagtgcgcgagcaaaatttaagctacaacaaggcaaggcttgaccgacaattgcatgaagaatctgcttagggttaggcgttttgcgctgcttcgcgatgtacgggccagatatacgcgtt

SEQ ID NO: 526 - DNA, 8794 bp, synthetic construct
  source 1..8794: mol_type = other DNA
gacattgattattgactagttattaatagtaatcaattacggggtcattagttcatagcccatatatggagttccgcgttacataacttacggtaaatggcccgcctggctgaccgcccaacgacccccgcccattgacgtcaataatgacgtatgttcccatagtaacgccaatagggactttccattgacgtcaatgggtggagtatttacggtaaactgcccacttggcagtacatcaagtgtatcatatgccaagtacgccccctattgacgtcaatgacggtaaatggcccgcctggcattatgcccagtacatgaccttatgggactttcctacttggcagtacatctacgtattagtcatcgctattaccatggtgatgcggttttggcagtacatcaatgggcgtggatagcggtttgactcacggggatttccaagtctccaccccattgacgtcaatgggagtttgttttggcaccaaaatcaacgggactttccaaaatgtcgtaacaactccgccccattgacgcaaatgggcggtaggcgtgtacggtgggaggtctatataagcagagctggtttagtgaaccgtcagatccgctagagatccgcggccgctaatacgactcactatagggagagccgccaccatgaaacggacagccgacggaagcgagttcgagtcaccaaagaagaagcggaaagtccgcaccgagaaggagaacaaggagctggagaacctggagatcaacctccgcaaggaaatcgccaaagcgttcaagggcaatgaagggtacaagagcctcttcaagaaagacatcatcgaaactatcctcccagagtttctcgatgacaaggacgagatcgcgctggtgaactcctttaacgggttcacaaccgcgtttaccggcttctttgataacagggaaaatatgttctccgaggaggccaagtccaccagcatcgccttcaggtgtatcaacgagaacctcacccgctacatttccaatatggacattttcgagaaggtggatgcgatcttcgataagcacgaggtgcaggagatcaaagagaagattctcaattccgattatgacgtcgaggatttcttcgaaggggagttctttaattttgtgctcacacaagagggcattgacgtgtacaacgcgattatcgggggcttcgtcacagagtccggggagaagattaaggggctgaatgagtacatcaatctgtacaatcagaagaccaagcagaaactgccgaaattcaagccgctctacaagcaagtcctgtccgatagggaaagcctctccttctacggcgagggctataccagcgacgaggaggtgctggaagtcttccgcaacacactgaataagaatagcgagattttctcctccatcaagaagctcgagaagctctttaagaactttgacgagtacagctccgccgggattttcgtgaagaacgggccggcgatcagcaccatctccaaggacatctttggcgagtggaacgtcatcagggacaagtggaacgccgagtacgacgacatccacctgaagaagaaggcggtggtgaccgagaagtatgaggacgatcgcaggaagtccttcaaaaaaatcggctccttcagcctcgaacagctccaggagtatgccgatgcggatctgtccgtcgtcgagaagctgaaggaaatcatcattcagaaggtcgacgagatctataaagtgtacgggtccagcgagaagctgttcgacgccgactttgtgctcgagaagtccctcaaaaagaatgacgccgtggtggccattatgaaagacctgctcgactccgtgaagtccttcgaaaattacattaaagcgttctttggggaggggaaggaaactaacagggatgagtccttctatggcgactttgtcctcgcgtacgacatcctgctgaaggtcgaccacatttacgacgcgatccgcaactacgtgacacagaagccgtactccaaagacaagttcaagctgtacttccagaacccgcaatttatggggggctgggacaaggataaagagacagactaccgcgcgacaattctccgctatggctccaaatactatctggccatcatggacaagaagtacgcgaagtgcctgcagaagatcgacaaagacgacgtcaatggcaactatgaaaagatcaactacaagctgctgccgggcccgaacaagatgctcccgaaggtgttcttcagcaagaagtggatggcctactacaatccaagcgaggatattcagaaaatctataaaaacgggaccttcaagaagggggacatgtttaacctcaacgactgccacaagctcattgatttcttcaaggatagcatttcccgctacccgaaatggtccaatgcgtacgattttaacttctccgagacagaaaagtacaaagacatcgcgggcttttacagggaggtggaggagcaagggtataaagtttcttttgaatccgcgagcaagaaggaagtcgacaagctcgtcgaggagggcaagctctacatgttccaaatttataacaaggacttttccgacaagagccatgggaccccaaacctccacaccatgtacttcaaactgctctttgacgagaacaaccacgggcaaatcaggctgagcggcggcgccgaattattcatgcgcagggcctccctcaagaaggaagagctggtcgtccatccagccaattccccgatcgcgaacaagaacccggacaatccgaaaaagaccaccaccctgtcctacgacgtctacaaggacaaacgcttcagcgaagaccagtacgaattacacatcccaattgcgattaataagtgcccaaagaatatcttcaaaattaatacagaggtcagggtgctgctcaaacacgacgacaatccgtatgtcatcggcattgccaggggcgagcgcaatctgctctatatcgtggtcgtggatgggaagggcaatattgtggagcagtactccctgaacgagattatcaacaacttcaatgggattaggattaagaccgactatcacagcctgctcgacaagaaagaaaaagagaggtttgaggcccgccaaaactggacctccattgagaatatcaaagaattaaaggccggctatatttcccaagtcgtccacaagatctgcgagctggtggagaaatatgacgccgtgattgcgctcgaagacttaaattctgggttcaagaactcccgcgtgaaggtggaaaaacaggtgtatcagaaattcgagaaaatgctgatcgacaaactcaattatatggtggataagaagtccaacccgtgtgccacagggggcgcgctgaagggctatcagatcaccaacaagttcgagagcttcaagagcatgagcacccagaacgggtttattttctacatcccggcgtggctcacctccaagattgacccgagcaccggcttcgtgaacctcctgaagacaaagtatacctccattgccgacagcaagaagtttatctcctccttcgaccgcattatgtatgtgccggaggaggacctcttcgagttcgccctcgactacaaaaacttcagccgcacagatgcggattacatcaagaagtggaagctgtactcctacgggaacaggatccgcatcttcaggaatccaaaaaaaaataacgtctttgactgggaggaagtgtgcctgacatccgcctacaaggaactgttcaataaatacggcatcaattaccagcagggcgacattcgcgccctcctctgtgagcagtccgacaaagcgttttactccagcttcatggccctcatgtccctgatgctccaaatgaggaatagcatcacagggcgcaccgacgtcgacttcctcatcagcccggtgaagaactccgacgggatcttttacgactcccgcaactatgaggcgcaagagaatgcgatcctcccgaagaacgccgatgcgaacggggcctataatatcgccaggaaagtgctctgggccatcgggcagttcaaaaaggcggaggatgagaagctcgacaaggtgaaaattgccatttccaacaaggagtggctggagtacgcgcagacctccgtgaagcacggctcctctggcagctccggctctagcggctcctctggcagctccggctccaagctggagaagtttacaaactgttacagcctctccaaaaccctcaggtttaaagcgatcccggtgggcaagacccaggagaacatcgacaacaagaggctcctggtggaagacgagaagcgcgccgaagactacaagggcgtgaagaagctgctcgataggtactacctcagctttattaacgacgtgctgcacagcatcaaactcaagaatctcaacaactacatctccctcttccgcaaaaagacctctggtggttcttctggtggttctagcggcagcgagactcccgggacctcagagtccgccacacccgaaagttctggtggttcttctggtggttcttctgaggttgaattttcacatgagtattggatgagacacgctcttaccttggctaagagagcaagggatgagagagaagttccagtgggagcagttcttgtgttgaacaatagagttattggagagggttggaacaggtaagtatcaaggttacaagacaggtttaaggagaccaatagaaactgggcttgtcgagacagagaagactcttgcgtttctgataggcacctattggtcttactgacatccactttgcctttctctccacagggctattggacttcatgatcctactgctcacgcagaaattatggcacttagacaaggtggacttgttatgcagaactacaggcttatcgatgctactctttatgttacattcgagccatgtgtgatgtgcgctggagcaatgattcattctaggattggaagggttgtgttcggtgttagaaactctaagaggggagctgcaggttcacttatgaacgttttgaattatcctggtatgaaccacagagtggagattactgaaggtattttggcagatgaatgtgctgcacttttgtgcgatttttacagaatgcctagacaagtgttcaacgctcaaaagaaggcacaatcttctattaactctggcggctcaaaaagaaccgccgacggcagcgaattcgagcccaagaagaagaggaaagtcggaagcggagctactaacttcagcctgctgaagcaggctggagacgtggaggagaaccctggacctatggtgagcaagggcgaggagctgttcaccggggtggtgcccatcctggtcgagctggacggcgacgtaaacggccacaagttcagcgtgtccggcgagggcgagggcgatgccacctacggcaagctgaccctgaagttcatctgcaccaccggcaagctgcccgtgccctggcccaccctcgtgaccaccctgacctatggagtgcagtgcttcagccgctaccccgaccacatgaagcagcacgacttcttcaagtccgccatgcccgaaggctacgtccaggagcgcaccatcttcttcaaggacgacggcaactacaagacccgcgccgaggtgaagttcgagggcgacaccctggtgaaccgcatcgagctgaagggcatcgacttcaaggaggacggcaacatcctggggcacaagctggagtacaactacaacagccacaacgtctatatcatggccgacaagcagaagaacggcatcaaggtgaacttcaagatccgccacaacatcgaggacggcagcgtgcagctcgccgaccactaccagcagaacacccccatcggcgacggccccgtgctgctgcccgacaaccactacctgagcacccagtccgccctgagcaaagaccccaacgagaagcgcgatcacatggtcctgctggagttcgtgaccgccgccgggatcactctcggcatggacgagctgtacaagtctggtggttctcccaagaagaagaggaaagtctaaccggtcatcatcaccatcaccattgagtttaaacccgctgatcagcctcgactgtgccttctagttgccagccatctgttgtttgcccctcccccgtgccttccttgaccctggaaggtgccactcccactgtcctttcctaataaaatgaggaaattgcatcgcattgtctgagtaggtgtcattctattctggggggtggggtggggcaggacagcaagggggaggattgggaagacaatagcaggcatgctggggatgcggtgggctctatggcttctgaggcggaaagaaccagctggggctcgataccgtcgacctctagctagagcttggcgtaatcatggtcatagctgtttcctgtgtgaaattgttatccgctcacaattccacacaacatacgagccggaagcataaagtgtaaagcctagggtgcctaatgagtgagctaactcacattaattgcgttgcgctcactgcccgctttccagtcgggaaacctgtcgtgccagctgcattaatgaatcggccaacgcgcggggagaggcggtttgcgtattgggcgctcttccgcttcctcgctcactgactcgctgcgctcggtcgttcggctgcggcgagcggtatcagctcactcaaaggcggtaatacggttatccacagaatcaggggataacgcaggaaagaacatgtgagcaaaaggccagcaaaaggccaggaaccgtaaaaaggccgcgttgctggcgtttttccataggctccgcccccctgacgagcatcacaaaaatcgacgctcaagtcagaggtggcgaaacccgacaggactataaagataccaggcgtttccccctggaagctccctcgtgcgctctcctgttccgaccctgccgcttaccggatacctgtccgcctttctcccttcgggaagcgtggcgctttctcatagctcacgctgtaggtatctcagttcggtgtaggtcgttcgctccaagctgggctgtgtgcacgaaccccccgttcagcccgaccgctgcgccttatccggtaactatcgtcttgagtccaacccggtaagacacgacttatcgccactggcagcagccactggtaacaggattagcagagcgaggtatgtaggcggtgctacagagttcttgaagtggtggcctaactacggctacactagaagaacagtatttggtatctgcgctctgctgaagccagttaccttcggaaaaagagttggtagctcttgatccggcaaacaaaccaccgctggtagcggtggtttttttgtttgcaagcagcagattacgcgcagaaaaaaaggatctcaagaagatcctttgatcttttctacggggtctgacactcagtggaacgaaaactcacgttaagggattttggtcatgagattatcaaaaaggatcttcacctagatccttttaaattaaaaatgaagttttaaatcaatctaaagtatatatgagtaaacttggtctgacagttaccaatgcttaatcagtgaggcacctatctcagcgatctgtctatttcgttcatccatagttgcctgactccccgtcgtgtagataactacgatacgggagggcttaccatctggccccagtgctgcaatgataccgcgagacccacgctcaccggctccagatttatcagcaataaaccagccagccggaagggccgagcgcagaagtggtcctgcaactttatccgcctccatccagtctattaattgttgccgggaagctagagtaagtagttcgccagttaatagtttgcgcaacgttgttgccattgctacaggcatcgtggtgtcacgctcgtcgtttggtatggcttcattcagctccggttcccaacgatcaaggcgagttacatgatcccccatgttgtgcaaaaaagcggttagctccttcggtcctccgatcgttgtcagaagtaagttggccgcagtgttatcactcatggttatggcagcactgcataattctcttactgtcatgccatccgtaagatgcttttctgtgactggtgagtactcaaccaagtcattctgagaatagtgtatgcggcgaccgagttgctcttgcccggcgtcaatacgggataataccgcgccacatagcagaactttaaaagtgctcatcattggaaaacgttcttcggggcgaaaactctcaaggatcttaccgctgttgagatccagttcgatgtaacccactcgtgcacccaactgatcttcagcatcttttactttcaccagcgtttctgggtgagcaaaaacaggaaggcaaaatgccgcaaaaaagggaataagggcgacacggaaatgttgaatactcatactcttcctttttcaatattattgaagcatttatcagggttattgtctcatgagcggatacatatttgaatgtatttagaaaaataaacaaataggggttccgcgcacatttccccgaaaagtgccacctgacgtcgacggatcgggagatcgatctcccgatcccctagggtcgactctcagtacaatctgctctgatgccgcatagttaagccagtatctgctccctgcttgtgtgttggaggtcgctgagtagtgcgcgagcaaaatttaagctacaacaaggcaaggcttgaccgacaattgcatgaagaatctgcttagggttaggcgttttgcgctgcttcgcgatgtacgggccagatatacgcgtt

SEQ ID NO: 527 - DNA, 8794 bp, synthetic construct
  source 1..8794: mol_type = other DNA
gacattgattattgactagttattaatagtaatcaattacggggtcattagttcatagcccatatatggagttccgcgttacataacttacggtaaatggcccgcctggctgaccgcccaacgacccccgcccattgacgtcaataatgacgtatgttcccatagtaacgccaatagggactttccattgacgtcaatgggtggagtatttacggtaaactgcccacttggcagtacatcaagtgtatcatatgccaagtacgccccctattgacgtcaatgacggtaaatggcccgcctggcattatgcccagtacatgaccttatgggactttcctacttggcagtacatctacgtattagtcatcgctattaccatggtgatgcggttttggcagtacatcaatgggcgtggatagcggtttgactcacggggatttccaagtctccaccccattgacgtcaatgggagtttgttttggcaccaaaatcaacgggactttccaaaatgtcgtaacaactccgccccattgacgcaaatgggcggtaggcgtgtacggtgggaggtctatataagcagagctggtttagtgaaccgtcagatccgctagagatccgcggccgctaatacgactcactatagggagagccgccaccatgaaacggacagccgacggaagcgagttcgagtcaccaaagaagaagcggaaagtcggctataccagcgacgaggaggtgctggaagtcttccgcaacacactgaataagaatagcgagattttctcctccatcaagaagctcgagaagctctttaagaactttgacgagtacagctccgccgggattttcgtgaagaacgggccggcgatcagcaccatctccaaggacatctttggcgagtggaacgtcatcagggacaagtggaacgccgagtacgacgacatccacctgaagaagaaggcggtggtgaccgagaagtatgaggacgatcgcaggaagtccttcaaaaaaatcggctccttcagcctcgaacagctccaggagtatgccgatgcggatctgtccgtcgtcgagaagctgaaggaaatcatcattcagaaggtcgacgagatctataaagtgtacgggtccagcgagaagctgttcgacgccgactttgtgctcgagaagtccctcaaaaagaatgacgccgtggtggccattatgaaagacctgctcgactccgtgaagtccttcgaaaattacattaaagcgttctttggggaggggaaggaaactaacagggatgagtccttctatggcgactttgtcctcgcgtacgacatcctgctgaaggtcgaccacatttacgacgcgatccgcaactacgtgacacagaagccgtactccaaagacaagttcaagctgtacttccagaacccgcaatttatggggggctgggacaaggataaagagacagactaccgcgcgacaattctccgctatggctccaaatactatctggccatcatggacaagaagtacgcgaagtgcctgcagaagatcgacaaagacgacgtcaatggcaactatgaaaagatcaactacaagctgctgccgggcccgaacaagatgctcccgaaggtgttcttcagcaagaagtggatggcctactacaatccaagcgaggatattcagaaaatctataaaaacgggaccttcaagaagggggacatgtttaacctcaacgactgccacaagctcattgatttcttcaaggatagcatttcccgctacccgaaatggtccaatgcgtacgattttaacttctccgagacagaaaagtacaaagacatcgcgggcttttacagggaggtggaggagcaagggtataaagtttcttttgaatccgcgagcaagaaggaagtcgacaagctcgtcgaggagggcaagctctacatgttccaaatttataacaaggacttttccgacaagagccatgggaccccaaacctccacaccatgtacttcaaactgctctttgacgagaacaaccacgggcaaatcaggctgagcggcggcgccgaattattcatgcgcagggcctccctcaagaaggaagagctggtcgtccatccagccaattccccgatcgcgaacaagaacccggacaatccgaaaaagaccaccaccctgtcctacgacgtctacaaggacaaacgcttcagcgaagaccagtacgaattacacatcccaattgcgattaataagtgcccaaagaatatcttcaaaattaatacagaggtcagggtgctgctcaaacacgacgacaatccgtatgtcatcggcattgccaggggcgagcgcaatctgctctatatcgtggtcgtggatgggaagggcaatattgtggagcagtactccctgaacgagattatcaacaacttcaatgggattaggattaagaccgactatcacagcctgctcgacaagaaagaaaaagagaggtttgaggcccgccaaaactggacctccattgagaatatcaaagaattaaaggccggctatatttcccaagtcgtccacaagatctgcgagctggtggagaaatatgacgccgtgattgcgctcgaagacttaaattctgggttcaagaactcccgcgtgaaggtggaaaaacaggtgtatcagaaattcgagaaaatgctgatcgacaaactcaattatatggtggataagaagtccaacccgtgtgccacagggggcgcgctgaagggctatcagatcaccaacaagttcgagagcttcaagagcatgagcacccagaacgggtttattttctacatcccggcgtggctcacctccaagattgacccgagcaccggcttcgtgaacctcctgaagacaaagtatacctccattgccgacagcaagaagtttatctcctccttcgaccgcattatgtatgtgccggaggaggacctcttcgagttcgccctcgactacaaaaacttcagccgcacagatgcggattacatcaagaagtggaagctgtactcctacgggaacaggatccgcatcttcaggaatccaaaaaaaaataacgtctttgactgggaggaagtgtgcctgacatccgcctacaaggaactgttcaataaatacggcatcaattaccagcagggcgacattcgcgccctcctctgtgagcagtccgacaaagcgttttactccagcttcatggccctcatgtccctgatgctccaaatgaggaatagcatcacagggcgcaccgacgtcgacttcctcatcagcccggtgaagaactccgacgggatcttttacgactcccgcaactatgaggcgcaagagaatgcgatcctcccgaagaacgccgatgcgaacggggcctataatatcgccaggaaagtgctctgggccatcgggcagttcaaaaaggcggaggatgagaagctcgacaaggtgaaaattgccatttccaacaaggagtggctggagtacgcgcagacctccgtgaagcacggctcctctggcagctccggctctagcggctcctctggcagctccggctccaagctggagaagtttacaaactgttacagcctctccaaaaccctcaggtttaaagcgatcccggtgggcaagacccaggagaacatcgacaacaagaggctcctggtggaagacgagaagcgcgccgaagactacaagggcgtgaagaagctgctcgataggtactacctcagctttattaacgacgtgctgcacagcatcaaactcaagaatctcaacaactacatctccctcttccgcaaaaagacccgcaccgagaaggagaacaaggagctggagaacctggagatcaacctccgcaaggaaatcgccaaagcgttcaagggcaatgaagggtacaagagcctcttcaagaaagacatcatcgaaactatcctcccagagtttctcgatgacaaggacgagatcgcgctggtgaactcctttaacgggttcacaaccgcgtttaccggcttctttgataacagggaaaatatgttctccgaggaggccaagtccaccagcatcgccttcaggtgtatcaacgagaacctcacccgctacatttccaatatggacattttcgagaaggtggatgcgatcttcgataagcacgaggtgcaggagatcaaagagaagattctcaattccgattatgacgtcgaggatttcttcgaaggggagttctttaattttgtgctcacacaagagggcattgacgtgtacaacgcgattatcgggggcttcgtcacagagtccggggagaagattaaggggctgaatgagtacatcaatctgtacaatcagaagaccaagcagaaactgccgaaattcaagccgctctacaagcaagtcctgtccgatagggaaagcctctccttctacggcgagtctggtggttcttctggtggttctagcggcagcgagactcccgggacctcagagtccgccacacccgaaagttctggtggttcttctggtggttcttctgaggttgaattttcacatgagtattggatgagacacgctcttaccttggctaagagagcaagggatgagagagaagttccagtgggagcagttcttgtgttgaacaatagagttattggagagggttggaacaggtaagtatcaaggttacaagacaggtttaaggagaccaatagaaactgggcttgtcgagacagagaagactcttgcgtttctgataggcacctattggtcttactgacatccactttgcctttctctccacagggctattggacttcatgatcctactgctcacgcagaaattatggcacttagacaaggtggacttgttatgcagaactacaggcttatcgatgctactctttatgttacattcgagccatgtgtgatgtgcgctggagcaatgattcattctaggattggaagggttgtgttcggtgttagaaactctaagaggggagctgcaggttcacttatgaacgttttgaattatcctggtatgaaccacagagtggagattactgaaggtattttggcagatgaatgtgctgcacttttgtgcgatttttacagaatgcctagacaagtgttcaacgctcaaaagaaggcacaatcttctattaactctggcggctcaaaaagaaccgccgacggcagcgaattcgagcccaagaagaagaggaaagtcggaagcggagctactaacttcagcctgctgaagcaggctggagacgtggaggagaaccctggacctatggtgagcaagggcgaggagctgttcaccggggtggtgcccatcctggtcgagctggacggcgacgtaaacggccacaagttcagcgtgtccggcgagggcgagggcgatgccacctacggcaagctgaccctgaagttcatctgcaccaccggcaagctgcccgtgccctggcccaccctcgtgaccaccctgacctatggagtgcagtgcttcagccgctaccccgaccacatgaagcagcacgacttcttcaagtccgccatgcccgaaggctacgtccaggagcgcaccatcttcttcaaggacgacggcaactacaagacccgcgccgaggtgaagttcgagggcgacaccctggtgaaccgcatcgagctgaagggcatcgacttcaaggaggacggcaacatcctggggcacaagctggagtacaactacaacagccacaacgtctatatcatggccgacaagcagaagaacggcatcaaggtgaacttcaagatccgccacaacatcgaggacggcagcgtgcagctcgccgaccactaccagcagaacacccccatcggcgacggccccgtgctgctgcccgacaaccactacctgagcacccagtccgccctgagcaaagaccccaacgagaagcgcgatcacatggtcctgctggagttcgtgaccgccgccgggatcactctcggcatggacgagctgtacaagtctggtggttctcccaagaagaagaggaaagtctaaccggtcatcatcaccatcaccattgagtttaaacccgctgatcagcctcgactgtgccttctagttgccagccatctgttgtttgcccctcccccgtgccttccttgaccctggaaggtgccactcccactgtcctttcctaataaaatgaggaaattgcatcgcattgtctgagtaggtgtcattctattctggggggtggggtggggcaggacagcaagggggaggattgggaagacaatagcaggcatgctggggatgcggtgggctctatggcttctgaggcggaaagaaccagctggggctcgataccgtcgacctctagctagagcttggcgtaatcatggtcatagctgtttcctgtgtgaaattgttatccgctcacaattccacacaacatacgagccggaagcataaagtgtaaagcctagggtgcctaatgagtgagctaactcacattaattgcgttgcgctcactgcccgctttccagtcgggaaacctgtcgtgccagctgcattaatgaatcggccaacgcgcggggagaggcggtttgcgtattgggcgctcttccgcttcctcgctcactgactcgctgcgctcggtcgttcggctgcggcgagcggtatcagctcactcaaaggcggtaatacggttatccacagaatcaggggataacgcaggaaagaacatgtgagcaaaaggccagcaaaaggccaggaaccgtaaaaaggccgcgttgctggcgtttttccataggctccgcccccctgacgagcatcacaaaaatcgacgctcaagtcagaggtggcgaaacccgacaggactataaagataccaggcgtttccccctggaagctccctcgtgcgctctcctgttccgaccctgccgcttaccggatacctgtccgcctttctcccttcgggaagcgtggcgctttctcatagctcacgctgtaggtatctcagttcggtgtaggtcgttcgctccaagctgggctgtgtgcacgaaccccccgttcagcccgaccgctgcgccttatccggtaactatcgtcttgagtccaacccggtaagacacgacttatcgccactggcagcagccactggtaacaggattagcagagcgaggtatgtaggcggtgctacagagttcttgaagtggtggcctaactacggctacactagaagaacagtatttggtatctgcgctctgctgaagccagttaccttcggaaaaagagttggtagctcttgatccggcaaacaaaccaccgctggtagcggtggtttttttgtttgcaagcagcagattacgcgcagaaaaaaaggatctcaagaagatcctttgatcttttctacggggtctgacactcagtggaacgaaaactcacgttaagggattttggtcatgagattatcaaaaaggatcttcacctagatccttttaaattaaaaatgaagttttaaatcaatctaaagtatatatgagtaaacttggtctgacagttaccaatgcttaatcagtgaggcacctatctcagcgatctgtctatttcgttcatccatagttgcctgactccccgtcgtgtagataactacgatacgggagggcttaccatctggccccagtgctgcaatgataccgcgagacccacgctcaccggctccagatttatcagcaataaaccagccagccggaagggccgagcgcagaagtggtcctgcaactttatccgcctccatccagtctattaattgttgccgggaagctagagtaagtagttcgccagttaatagtttgcgcaacgttgttgccattgctacaggcatcgtggtgtcacgctcgtcgtttggtatggcttcattcagctccggttcccaacgatcaaggcgagttacatgatcccccatgttgtgcaaaaaagcggttagctccttcggtcctccgatcgttgtcagaagtaagttggccgcagtgttatcactcatggttatggcagcactgcataattctcttactgtcatgccatccgtaagatgcttttctgtgactggtgagtactcaaccaagtcattctgagaatagtgtatgcggcgaccgagttgctcttgcccggcgtcaatacgggataataccgcgccacatagcagaactttaaaagtgctcatcattggaaaacgttcttcggggcgaaaactctcaaggatcttaccgctgttgagatccagttcgatgtaacccactcgtgcacccaactgatcttcagcatcttttactttcaccagcgtttctgggtgagcaaaaacaggaaggcaaaatgccgcaaaaaagggaataagggcgacacggaaatgttgaatactcatactcttcctttttcaatattattgaagcatttatcagggttattgtctcatgagcggatacatatttgaatgtatttagaaaaataaacaaataggggttccgcgcacatttccccgaaaagtgccacctgacgtcgacggatcgggagatcgatctcccgatcccctagggtcgactctcagtacaatctgctctgatgccgcatagttaagccagtatctgctccctgcttgtgtgttggaggtcgctgagtagtgcgcgagcaaaatttaagctacaacaaggcaaggcttgaccgacaattgcatgaagaatctgcttagggttaggcgttttgcgctgcttcgcgatgtacgggccagatatacgcgtt

SEQ ID NO: 528 - DNA, 8794 bp, synthetic construct
  source 1..8794: mol_type = other DNA
gacattgattattgactagttattaatagtaatcaattacggggtcattagttcatagcccatatatggagttccgcgttacataacttacggtaaatggcccgcctggctgaccgcccaacgacccccgcccattgacgtcaataatgacgtatgttcccatagtaacgccaatagggactttccattgacgtcaatgggtggagtatttacggtaaactgcccacttggcagtacatcaagtgtatcatatgccaagtacgccccctattgacgtcaatgacggtaaatggcccgcctggcattatgcccagtacatgaccttatgggactttcctacttggcagtacatctacgtattagtcatcgctattaccatggtgatgcggttttggcagtacatcaatgggcgtggatagcggtttgactcacggggatttccaagtctccaccccattgacgtcaatgggagtttgttttggcaccaaaatcaacgggactttccaaaatgtcgtaacaactccgccccattgacgcaaatgggcggtaggcgtgtacggtgggaggtctatataagcagagctggtttagtgaaccgtcagatccgctagagatccgcggccgctaatacgactcactatagggagagccgccaccatgaaacggacagccgacggaagcgagttcgagtcaccaaagaagaagcggaaagtctccgacgggatcttttacgactcccgcaactatgaggcgcaagagaatgcgatcctcccgaagaacgccgatgcgaacggggcctataatatcgccaggaaagtgctctgggccatcgggcagttcaaaaaggcggaggatgagaagctcgacaaggtgaaaattgccatttccaacaaggagtggctggagtacgcgcagacctccgtgaagcacggctcctctggcagctccggctctagcggctcctctggcagctccggctccaagctggagaagtttacaaactgttacagcctctccaaaaccctcaggtttaaagcgatcccggtgggcaagacccaggagaacatcgacaacaagaggctcctggtggaagacgagaagcgcgccgaagactacaagggcgtgaagaagctgctcgataggtactacctcagctttattaacgacgtgctgcacagcatcaaactcaagaatctcaacaactacatctccctcttccgcaaaaagacccgcaccgagaaggagaacaaggagctggagaacctggagatcaacctccgcaaggaaatcgccaaagcgttcaagggcaatgaagggtacaagagcctcttcaagaaagacatcatcgaaactatcctcccagagtttctcgatgacaaggacgagatcgcgctggtgaactcctttaacgggttcacaaccgcgtttaccggcttctttgataacagggaaaatatgttctccgaggaggccaagtccaccagcatcgccttcaggtgtatcaacgagaacctcacccgctacatttccaatatggacattttcgagaaggtggatgcgatcttcgataagcacgaggtgcaggagatcaaagagaagattctcaattccgattatgacgtcgaggatttcttcgaaggggagttctttaattttgtgctcacacaagagggcattgacgtgtacaacgcgattatcgggggcttcgtcacagagtccggggagaagattaaggggctgaatgagtacatcaatctgtacaatcagaagaccaagcagaaactgccgaaattcaagccgctctacaagcaagtcctgtccgatagggaaagcctctccttctacggcgagggctataccagcgacgaggaggtgctggaagtcttccgcaacacactgaataagaatagcgagattttctcctccatcaagaagctcgagaagctctttaagaactttgacgagtacagctccgccgggattttcgtgaagaacgggccggcgatcagcaccatctccaaggacatctttggcgagtggaacgtcatcagggacaagtggaacgccgagtacgacgacatccacctgaagaagaaggcggtggtgaccgagaagtatgaggacgatcgcaggaagtccttcaaaaaaatcggctccttcagcctcgaacagctccaggagtatgccgatgcggatctgtccgtcgtcgagaagctgaaggaaatcatcattcagaaggtcgacgagatctataaagtgtacgggtccagcgagaagctgttcgacgccgactttgtgctcgagaagtccctcaaaaagaatgacgccgtggtggccattatgaaagacctgctcgactccgtgaagtccttcgaaaattacattaaagcgttctttggggaggggaaggaaactaacagggatgagtccttctatggcgactttgtcctcgcgtacgacatcctgctgaaggtcgaccacatttacgacgcgatccgcaactacgtgacacagaagccgtactccaaagacaagttcaagctgtacttccagaacccgcaatttatggggggctgggacaaggataaagagacagactaccgcgcgacaattctccgctatggctccaaatactatctggccatcatggacaagaagtacgcgaagtgcctgcagaagatcgacaaagacgacgtcaatggcaactatgaaaagatcaactacaagctgctgccgggcccgaacaagatgctcccgaaggtgttcttcagcaagaagtggatggcctactacaatccaagcgaggatattcagaaaatctataaaaacgggaccttcaagaagggggacatgtttaacctcaacgactgccacaagctcattgatttcttcaaggatagcatttcccgctacccgaaatggtccaatgcgtacgattttaacttctccgagacagaaaagtacaaagacatcgcgggcttttacagggaggtggaggagcaagggtataaagtttcttttgaatccgcgagcaagaaggaagtcgacaagctcgtcgaggagggcaagctctacatgttccaaatttataacaaggacttttccgacaagagccatgggaccccaaacctccacaccatgtacttcaaactgctctttgacgagaacaaccacgggcaaatcaggctgagcggcggcgccgaattattcatgcgcagggcctccctcaagaaggaagagctggtcgtccatccagccaattccccgatcgcgaacaagaacccggacaatccgaaaaagaccaccaccctgtcctacgacgtctacaaggacaaacgcttcagcgaagaccagtacgaattacacatcccaattgcgattaataagtgcccaaagaatatcttcaaaattaatacagaggtcagggtgctgctcaaacacgacgacaatccgtatgtcatcggcattgccaggggcgagcgcaatctgctctatatcgtggtcgtggatgggaagggcaatattgtggagcagtactccctgaacgagattatcaacaacttcaatgggattaggattaagaccgactatcacagcctgctcgacaagaaagaaaaagagaggtttgaggcccgccaaaactggacctccattgagaatatcaaagaattaaaggccggctatatttcccaagtcgtccacaagatctgcgagctggtggagaaatatgacgccgtgattgcgctcgaagacttaaattctgggttcaagaactcccgcgtgaaggtggaaaaacaggtgtatcagaaattcgagaaaatgctgatcgacaaactcaattatatggtggataagaagtccaacccgtgtgccacagggggcgcgctgaagggctatcagatcaccaacaagttcgagagcttcaagagcatgagcacccagaacgggtttattttctacatcccggcgtggctcacctccaagattgacccgagcaccggcttcgtgaacctcctgaagacaaagtatacctccattgccgacagcaagaagtttatctcctccttcgaccgcattatgtatgtgccggaggaggacctcttcgagttcgccctcgactacaaaaacttcagccgcacagatgcggattacatcaagaagtggaagctgtactcctacgggaacaggatccgcatcttcaggaatccaaaaaaaaataacgtctttgactgggaggaagtgtgcctgacatccgcctacaaggaactgttcaataaatacggcatcaattaccagcagggcgacattcgcgccctcctctgtgagcagtccgacaaagcgttttactccagcttcatggccctcatgtccctgatgctccaaatgaggaatagcatcacagggcgcaccgacgtcgacttcctcatcagcccggtgaagaactctggtggttcttctggtggttctagcggcagcgagactcccgggacctcagagtccgccacacccgaaagttctggtggttcttctggtggttcttctgaggttgaattttcacatgagtattggatgagacacgctcttaccttggctaagagagcaagggatgagagagaagttccagtgggagcagttcttgtgttgaacaatagagttattggagagggttggaacaggtaagtatcaaggttacaagacaggtttaaggagaccaatagaaactgggcttgtcgagacagagaagactcttgcgtttctgataggcacctattggtcttactgacatccactttgcctttctctccacagggctattggacttcatgatcctactgctcacgcagaaattatggcacttagacaaggtggacttgttatgcagaactacaggcttatcgatgctactctttatgttacattcgagccatgtgtgatgtgcgctggagcaatgattcattctaggattggaagggttgtgttcggtgttagaaactctaagaggggagctgcaggttcacttatgaacgttttgaattatcctggtatgaaccacagagtggagattactgaaggtattttggcagatgaatgtgctgcacttttgtgcgatttttacagaatgcctagacaagtgttcaacgctcaaaagaaggcacaatcttctattaactctggcggctcaaaaagaaccgccgacggcagcgaattcgagcccaagaagaagaggaaagtcggaagcggagctactaacttcagcctgctgaagcaggctggagacgtggaggagaaccctggacctatggtgagcaagggcgaggagctgttcaccggggtggtgcccatcctggtcgagctggacggcgacgtaaacggccacaagttcagcgtgtccggcgagggcgagggcgatgccacctacggcaagctgaccctgaagttcatctgcaccaccggcaagctgcccgtgccctggcccaccctcgtgaccaccctgacctatggagtgcagtgcttcagccgctaccccgaccacatgaagcagcacgacttcttcaagtccgccatgcccgaaggctacgtccaggagcgcaccatcttcttcaaggacgacggcaactacaagacccgcgccgaggtgaagttcgagggcgacaccctggtgaaccgcatcgagctgaagggcatcgacttcaaggaggacggcaacatcctggggcacaagctggagtacaactacaacagccacaacgtctatatcatggccgacaagcagaagaacggcatcaaggtgaacttcaagatccgccacaacatcgaggacggcagcgtgcagctcgccgaccactaccagcagaacacccccatcggcgacggccccgtgctgctgcccgacaaccactacctgagcacccagtccgccctgagcaaagaccccaacgagaagcgcgatcacatggtcctgctggagttcgtgaccgccgccgggatcactctcggcatggacgagctgtacaagtctggtggttctcccaagaagaagaggaaagtctaaccggtcatcatcaccatcaccattgagtttaaacccgctgatcagcctcgactgtgccttctagttgccagccatctgttgtttgcccctcccccgtgccttccttgaccctggaaggtgccactcccactgtcctttcctaataaaatgaggaaattgcatcgcattgtctgagtaggtgtcattctattctggggggtggggtggggcaggacagcaagggggaggattgggaagacaatagcaggcatgctggggatgcggtgggctctatggcttctgaggcggaaagaaccagctggggctcgataccgtcgacctctagctagagcttggcgtaatcatggtcatagctgtttcctgtgtgaaattgttatccgctcacaattccacacaacatacgagccggaagcataaagtgtaaagcctagggtgcctaatgagtgagctaactcacattaattgcgttgcgctcactgcccgctttccagtcgggaaacctgtcgtgccagctgcattaatgaatcggccaacgcgcggggagaggcggtttgcgtattgggcgctcttccgcttcctcgctcactgactcgctgcgctcggtcgttcggctgcggcgagcggtatcagctcactcaaaggcggtaatacggttatccacagaatcaggggataacgcaggaaagaacatgtgagcaaaaggccagcaaaaggccaggaaccgtaaaaaggccgcgttgctggcgtttttccataggctccgcccccctgacgagcatcacaaaaatcgacgctcaagtcagaggtggcgaaacccgacaggactataaagataccaggcgtttccccctggaagctccctcgtgcgctctcctgttccgaccctgccgcttaccggatacctgtccgcctttctcccttcgggaagcgtggcgctttctcatagctcacgctgtaggtatctcagttcggtgtaggtcgttcgctccaagctgggctgtgtgcacgaaccccccgttcagcccgaccgctgcgccttatccggtaactatcgtcttgagtccaacccggtaagacacgacttatcgccactggcagcagccactggtaacaggattagcagagcgaggtatgtaggcggtgctacagagttcttgaagtggtggcctaactacggctacactagaagaacagtatttggtatctgcgctctgctgaagccagttaccttcggaaaaagagttggtagctcttgatccggcaaacaaaccaccgctggtagcggtggtttttttgtttgcaagcagcagattacgcgcagaaaaaaaggatctcaagaagatcctttgatcttttctacggggtctgacactcagtggaacgaaaactcacgttaagggattttggtcatgagattatcaaaaaggatcttcacctagatccttttaaattaaaaatgaagttttaaatcaatctaaagtatatatgagtaaacttggtctgacagttaccaatgcttaatcagtgaggcacctatctcagcgatctgtctatttcgttcatccatagttgcctgactccccgtcgtgtagataactacgatacgggagggcttaccatctggccccagtgctgcaatgataccgcgagacccacgctcaccggctccagatttatcagcaataaaccagccagccggaagggccgagcgcagaagtggtcctgcaactttatccgcctccatccagtctattaattgttgccgggaagctagagtaagtagttcgccagttaatagtttgcgcaacgttgttgccattgctacaggcatcgtggtgtcacgctcgtcgtttggtatggcttcattcagctccggttcccaacgatcaaggcgagttacatgatcccccatgttgtgcaaaaaagcggttagctccttcggtcctccgatcgttgtcagaagtaagttggccgcagtgttatcactcatggttatggcagcactgcataattctcttactgtcatgccatccgtaagatgcttttctgtgactggtgagtactcaaccaagtcattctgagaatagtgtatgcggcgaccgagttgctcttgcccggcgtcaatacgggataataccgcgccacatagcagaactttaaaagtgctcatcattggaaaacgttcttcggggcgaaaactctcaaggatcttaccgctgttgagatccagttcgatgtaacccactcgtgcacccaactgatcttcagcatcttttactttcaccagcgtttctgggtgagcaaaaacaggaaggcaaaatgccgcaaaaaagggaataagggcgacacggaaatgttgaatactcatactcttcctttttcaatattattgaagcatttatcagggttattgtctcatgagcggatacatatttgaatgtatttagaaaaataaacaaataggggttccgcgcacatttccccgaaaagtgccacctgacgtcgacggatcgggagatcgatctcccgatcccctagggtcgactctcagtacaatctgctctgatgccgcatagttaagccagtatctgctccctgcttgtgtgttggaggtcgctgagtagtgcgcgagcaaaatttaagctacaacaaggcaaggcttgaccgacaattgcatgaagaatctgcttagggttaggcgttttgcgctgcttcgcgatgtacgggccagatatacgcgtt

SEQ ID NO: 529 - DNA, 8794 bp, synthetic construct
  source 1..8794: mol_type = other DNA
gacattgattattgactagttattaatagtaatcaattacggggtcattagttcatagcccatatatggagttccgcgttacataacttacggtaaatggcccgcctggctgaccgcccaacgacccccgcccattgacgtcaataatgacgtatgttcccatagtaacgccaatagggactttccattgacgtcaatgggtggagtatttacggtaaactgcccacttggcagtacatcaagtgtatcatatgccaagtacgccccctattgacgtcaatgacggtaaatggcccgcctggcattatgcccagtacatgaccttatgggactttcctacttggcagtacatctacgtattagtcatcgctattaccatggtgatgcggttttggcagtacatcaatgggcgtggatagcggtttgactcacggggatttccaagtctccaccccattgacgtcaatgggagtttgttttggcaccaaaatcaacgggactttccaaaatgtcgtaacaactccgccccattgacgcaaatgggcggtaggcgtgtacggtgggaggtctatataagcagagctggtttagtgaaccgtcagatccgctagagatccgcggccgctaatacgactcactatagggagagccgccaccatgaaacggacagccgacggaagcgagttcgagtcaccaaagaagaagcggaaagtcaaagacaagttcaagctgtacttccagaacccgcaatttatggggggctgggacaaggataaagagacagactaccgcgcgacaattctccgctatggctccaaatactatctggccatcatggacaagaagtacgcgaagtgcctgcagaagatcgacaaagacgacgtcaatggcaactatgaaaagatcaactacaagctgctgccgggcccgaacaagatgctcccgaaggtgttcttcagcaagaagtggatggcctactacaatccaagcgaggatattcagaaaatctataaaaacgggaccttcaagaagggggacatgtttaacctcaacgactgccacaagctcattgatttcttcaaggatagcatttcccgctacccgaaatggtccaatgcgtacgattttaacttctccgagacagaaaagtacaaagacatcgcgggcttttacagggaggtggaggagcaagggtataaagtttcttttgaatccgcgagcaagaaggaagtcgacaagctcgtcgaggagggcaagctctacatgttccaaatttataacaaggacttttccgacaagagccatgggaccccaaacctccacaccatgtacttcaaactgctctttgacgagaacaaccacgggcaaatcaggctgagcggcggcgccgaattattcatgcgcagggcctccctcaagaaggaagagctggtcgtccatccagccaattccccgatcgcgaacaagaacccggacaatccgaaaaagaccaccaccctgtcctacgacgtctacaaggacaaacgcttcagcgaagaccagtacgaattacacatcccaattgcgattaataagtgcccaaagaatatcttcaaaattaatacagaggtcagggtgctgctcaaacacgacgacaatccgtatgtcatcggcattgccaggggcgagcgcaatctgctctatatcgtggtcgtggatgggaagggcaatattgtggagcagtactccctgaacgagattatcaacaacttcaatgggattaggattaagaccgactatcacagcctgctcgacaagaaagaaaaagagaggtttgaggcccgccaaaactggacctccattgagaatatcaaagaattaaaggccggctatatttcccaagtcgtccacaagatctgcgagctggtggagaaatatgacgccgtgattgcgctcgaagacttaaattctgggttcaagaactcccgcgtgaaggtggaaaaacaggtgtatcagaaattcgagaaaatgctgatcgacaaactcaattatatggtggataagaagtccaacccgtgtgccacagggggcgcgctgaagggctatcagatcaccaacaagttcgagagcttcaagagcatgagcacccagaacgggtttattttctacatcccggcgtggctcacctccaagattgacccgagcaccggcttcgtgaacctcctgaagacaaagtatacctccattgccgacagcaagaagtttatctcctccttcgaccgcattatgtatgtgccggaggaggacctcttcgagttcgccctcgactacaaaaacttcagccgcacagatgcggattacatcaagaagtggaagctgtactcctacgggaacaggatccgcatcttcaggaatccaaaaaaaaataacgtctttgactgggaggaagtgtgcctgacatccgcctacaaggaactgttcaataaatacggcatcaattaccagcagggcgacattcgcgccctcctctgtgagcagtccgacaaagcgttttactccagcttcatggccctcatgtccctgatgctccaaatgaggaatagcatcacagggcgcaccgacgtcgacttcctcatcagcccggtgaagaactccgacgggatcttttacgactcccgcaactatgaggcgcaagagaatgcgatcctcccgaagaacgccgatgcgaacggggcctataatatcgccaggaaagtgctctgggccatcgggcagttcaaaaaggcggaggatgagaagctcgacaaggtgaaaattgccatttccaacaaggagtggctggagtacgcgcagacctccgtgaagcacggctcctctggcagctccggctctagcggctcctctggcagctccggctccaagctggagaagtttacaaactgttacagcctctccaaaaccctcaggtttaaagcgatcccggtgggcaagacccaggagaacatcgacaacaagaggctcctggtggaagacgagaagcgcgccgaagactacaagggcgtgaagaagctgctcgataggtactacctcagctttattaacgacgtgctgcacagcatcaaactcaagaatctcaacaactacatctccctcttccgcaaaaagacccgcaccgagaaggagaacaaggagctggagaacctggagatcaacctccgcaaggaaatcgccaaagcgttcaagggcaatgaagggtacaagagcctcttcaagaaagacatcatcgaaactatcctcccagagtttctcgatgacaaggacgagatcgcgctggtgaactcctttaacgggttcacaaccgcgtttaccggcttctttgataacagggaaaatatgttctccgaggaggccaagtccaccagcatcgccttcaggtgtatcaacgagaacctcacccgctacatttccaatatggacattttcgagaaggtggatgcgatcttcgataagcacgaggtgcaggagatcaaagagaagattctcaattccgattatgacgtcgaggatttcttcgaaggggagttctttaattttgtgctcacacaagagggcattgacgtgtacaacgcgattatcgggggcttcgtcacagagtccggggagaagattaaggggctgaatgagtacatcaatctgtacaatcagaagaccaagcagaaactgccgaaattcaagccgctctacaagcaagtcctgtccgatagggaaagcctctccttctacggcgagggctataccagcgacgaggaggtgctggaagtcttccgcaacacactgaataagaatagcgagattttctcctccatcaagaagctcgagaagctctttaagaactttgacgagtacagctccgccgggattttcgtgaagaacgggccggcgatcagcaccatctccaaggacatctttggcgagtggaacgtcatcagggacaagtggaacgccgagtacgacgacatccacctgaagaagaaggcggtggtgaccgagaagtatgaggacgatcgcaggaagtccttcaaaaaaatcggctccttcagcctcgaacagctccaggagtatgccgatgcggatctgtccgtcgtcgagaagctgaaggaaatcatcattcagaaggtcgacgagatctataaagtgtacgggtccagcgagaagctgttcgacgccgactttgtgctcgagaagtccctcaaaaagaatgacgccgtggtggccattatgaaagacctgctcgactccgtgaagtccttcgaaaattacattaaagcgttctttggggaggggaaggaaactaacagggatgagtccttctatggcgactttgtcctcgcgtacgacatcctgctgaaggtcgaccacatttacgacgcgatccgcaactacgtgacacagaagccgtactcctctggtggttcttctggtggttctagcggcagcgagactcccgggacctcagagtccgccacacccgaaagttctggtggttcttctggtggttcttctgaggttgaattttcacatgagtattggatgagacacgctcttaccttggctaagagagcaagggatgagagagaagttccagtgggagcagttcttgtgttgaacaatagagttattggagagggttggaacaggtaagtatcaaggttacaagacaggtttaaggagaccaatagaaactgggcttgtcgagacagagaagactcttgcgtttctgataggcacctattggtcttactgacatccactttgcctttctctccacagggctattggacttcatgatcctactgctcacgcagaaattatggcacttagacaaggtggacttgttatgcagaactacaggcttatcgatgctactctttatgttacattcgagccatgtgtgatgtgcgctggagcaatgattcattctaggattggaagggttgtgttcggtgttagaaactctaagaggggagctgcaggttcacttatgaacgttttgaattatcctggtatgaaccacagagtggagattactgaaggtattttggcagatgaatgtgctgcacttttgtgcgatttttacagaatgcctagacaagtgttcaacgctcaaaagaaggcacaatcttctattaactctggcggctcaaaaagaaccgccgacggcagcgaattcgagcccaagaagaagaggaaagtcggaagcggagctactaacttcagcctgctgaagcaggctggagacgtggaggagaaccctggacctatggtgagcaagggcgaggagctgttcaccggggtggtgcccatcctggtcgagctggacggcgacgtaaacggccacaagttcagcgtgtccggcgagggcgagggcgatgccacctacggcaagctgaccctgaagttcatctgcaccaccggcaagctgcccgtgccctggcccaccctcgtgaccaccctgacctatggagtgcagtgcttcagccgctaccccgaccacatgaagcagcacgacttcttcaagtccgccatgcccgaaggctacgtccaggagcgcaccatcttcttcaaggacgacggcaactacaagacccgcgccgaggtgaagttcgagggcgacaccctggtgaaccgcatcgagctgaagggcatcgacttcaaggaggacggcaacatcctggggcacaagctggagtacaactacaacagccacaacgtctatatcatggccgacaagcagaagaacggcatcaaggtgaacttcaagatccgccacaacatcgaggacggcagcgtgcagctcgccgaccactaccagcagaacacccccatcggcgacggccccgtgctgctgcccgacaaccactacctgagcacccagtccgccctgagcaaagaccccaacgagaagcgcgatcacatggtcctgctggagttcgtgaccgccgccgggatcactctcggcatggacgagctgtacaagtctggtggttctcccaagaagaagaggaaagtctaaccggtcatcatcaccatcaccattgagtttaaacccgctgatcagcctcgactgtgccttctagttgccagccatctgttgtttgcccctcccccgtgccttccttgaccctggaaggtgccactcccactgtcctttcctaataaaatgaggaaattgcatcgcattgtctgagtaggtgtcattctattctggggggtggggtggggcaggacagcaagggggaggattgggaagacaatagcaggcatgctggggatgcggtgggctctatggcttctgaggcggaaagaaccagctggggctcgataccgtcgacctctagctagagcttggcgtaatcatggtcatagctgtttcctgtgtgaaattgttatccgctcacaattccacacaacatacgagccggaagcataaagtgtaaagcctagggtgcctaatgagtgagctaactcacattaattgcgttgcgctcactgcccgctttccagtcgggaaacctgtcgtgccagctgcattaatgaatcggccaacgcgcggggagaggcggtttgcgtattgggcgctcttccgcttcctcgctcactgactcgctgcgctcggtcgttcggctgcggcgagcggtatcagctcactcaaaggcggtaatacggttatccacagaatcaggggataacgcaggaaagaacatgtgagcaaaaggccagcaaaaggccaggaaccgtaaaaaggccgcgttgctggcgtttttccataggctccgcccccctgacgagcatcacaaaaatcgacgctcaagtcagaggtggcgaaacccgacaggactataaagataccaggcgtttccccctggaagctccctcgtgcgctctcctgttccgaccctgccgcttaccggatacctgtccgcctttctcccttcgggaagcgtggcgctttctcatagctcacgctgtaggtatctcagttcggtgtaggtcgttcgctccaagctgggctgtgtgcacgaaccccccgttcagcccgaccgctgcgccttatccggtaactatcgtcttgagtccaacccggtaagacacgacttatcgccactggcagcagccactggtaacaggattagcagagcgaggtatgtaggcggtgctacagagttcttgaagtggtggcctaactacggctacactagaagaacagtatttggtatctgcgctctgctgaagccagttaccttcggaaaaagagttggtagctcttgatccggcaaacaaaccaccgctggtagcggtggtttttttgtttgcaagcagcagattacgcgcagaaaaaaaggatctcaagaagatcctttgatcttttctacggggtctgacactcagtggaacgaaaactcacgttaagggattttggtcatgagattatcaaaaaggatcttcacctagatccttttaaattaaaaatgaagttttaaatcaatctaaagtatatatgagtaaacttggtctgacagttaccaatgcttaatcagtgaggcacctatctcagcgatctgtctatttcgttcatccatagttgcctgactccccgtcgtgtagataactacgatacgggagggcttaccatctggccccagtgctgcaatgataccgcgagacccacgctcaccggctccagatttatcagcaataaaccagccagccggaagggccgagcgcagaagtggtcctgcaactttatccgcctccatccagtctattaattgttgccgggaagctagagtaagtagttcgccagttaatagtttgcgcaacgttgttgccattgctacaggcatcgtggtgtcacgctcgtcgtttggtatggcttcattcagctccggttcccaacgatcaaggcgagttacatgatcccccatgttgtgcaaaaaagcggttagctccttcggtcctccgatcgttgtcagaagtaagttggccgcagtgttatcactcatggttatggcagcactgcataattctcttactgtcatgccatccgtaagatgcttttctgtgactggtgagtactcaaccaagtcattctgagaatagtgtatgcggcgaccgagttgctcttgcccggcgtcaatacgggataataccgcgccacatagcagaactttaaaagtgctcatcattggaaaacgttcttcggggcgaaaactctcaaggatcttaccgctgttgagatccagttcgatgtaacccactcgtgcacccaactgatcttcagcatcttttactttcaccagcgtttctgggtgagcaaaaacaggaaggcaaaatgccgcaaaaaagggaataagggcgacacggaaatgttgaatactcatactcttcctttttcaatattattgaagcatttatcagggttattgtctcatgagcggatacatatttgaatgtatttagaaaaataaacaaataggggttccgcgcacatttccccgaaaagtgccacctgacgtcgacggatcgggagatcgatctcccgatcccctagggtcgactctcagtacaatctgctctgatgccgcatagttaagccagtatctgctccctgcttgtgtgttggaggtcgctgagtagtgcgcgagcaaaatttaagctacaacaaggcaaggcttgaccgacaattgcatgaagaatctgcttagggttaggcgttttgcgctgcttcgcgatgtacgggccagatatacgcgtt

SEQ ID NO: 530 - DNA, 8794 bp, synthetic construct
  source 1..8794: mol_type = other DNA
gacattgattattgactagttattaatagtaatcaattacggggtcattagttcatagcccatatatggagttccgcgttacataacttacggtaaatggcccgcctggctgaccgcccaacgacccccgcccattgacgtcaataatgacgtatgttcccatagtaacgccaatagggactttccattgacgtcaatgggtggagtatttacggtaaactgcccacttggcagtacatcaagtgtatcatatgccaagtacgccccctattgacgtcaatgacggtaaatggcccgcctggcattatgcccagtacatgaccttatgggactttcctacttggcagtacatctacgtattagtcatcgctattaccatggtgatgcggttttggcagtacatcaatgggcgtggatagcggtttgactcacggggatttccaagtctccaccccattgacgtcaatgggagtttgttttggcaccaaaatcaacgggactttccaaaatgtcgtaacaactccgccccattgacgcaaatgggcggtaggcgtgtacggtgggaggtctatataagcagagctggtttagtgaaccgtcagatccgctagagatccgcggccgctaatacgactcactatagggagagccgccaccatgaaacggacagccgacggaagcgagttcgagtcaccaaagaagaagcggaaagtcaagtccctcaaaaagaatgacgccgtggtggccattatgaaagacctgctcgactccgtgaagtccttcgaaaattacattaaagcgttctttggggaggggaaggaaactaacagggatgagtccttctatggcgactttgtcctcgcgtacgacatcctgctgaaggtcgaccacatttacgacgcgatccgcaactacgtgacacagaagccgtactccaaagacaagttcaagctgtacttccagaacccgcaatttatggggggctgggacaaggataaagagacagactaccgcgcgacaattctccgctatggctccaaatactatctggccatcatggacaagaagtacgcgaagtgcctgcagaagatcgacaaagacgacgtcaatggcaactatgaaaagatcaactacaagctgctgccgggcccgaacaagatgctcccgaaggtgttcttcagcaagaagtggatggcctactacaatccaagcgaggatattcagaaaatctataaaaacgggaccttcaagaagggggacatgtttaacctcaacgactgccacaagctcattgatttcttcaaggatagcatttcccgctacccgaaatggtccaatgcgtacgattttaacttctccgagacagaaaagtacaaagacatcgcgggcttttacagggaggtggaggagcaagggtataaagtttcttttgaatccgcgagcaagaaggaagtcgacaagctcgtcgaggagggcaagctctacatgttccaaatttataacaaggacttttccgacaagagccatgggaccccaaacctccacaccatgtacttcaaactgctctttgacgagaacaaccacgggcaaatcaggctgagcggcggcgccgaattattcatgcgcagggcctccctcaagaaggaagagctggtcgtccatccagccaattccccgatcgcgaacaagaacccggacaatccgaaaaagaccaccaccctgtcctacgacgtctacaaggacaaacgcttcagcgaagaccagtacgaattacacatcccaattgcgattaataagtgcccaaagaatatcttcaaaattaatacagaggtcagggtgctgctcaaacacgacgacaatccgtatgtcatcggcattgccaggggcgagcgcaatctgctctatatcgtggtcgtggatgggaagggcaatattgtggagcagtactccctgaacgagattatcaacaacttcaatgggattaggattaagaccgactatcacagcctgctcgacaagaaagaaaaagagaggtttgaggcccgccaaaactggacctccattgagaatatcaaagaattaaaggccggctatatttcccaagtcgtccacaagatctgcgagctggtggagaaatatgacgccgtgattgcgctcgaagacttaaattctgggttcaagaactcccgcgtgaaggtggaaaaacaggtgtatcagaaattcgagaaaatgctgatcgacaaactcaattatatggtggataagaagtccaacccgtgtgccacagggggcgcgctgaagggctatcagatcaccaacaagttcgagagcttcaagagcatgagcacccagaacgggtttattttctacatcccggcgtggctcacctccaagattgacccgagcaccggcttcgtgaacctcctgaagacaaagtatacctccattgccgacagcaagaagtttatctcctccttcgaccgcattatgtatgtgccggaggaggacctcttcgagttcgccctcgactacaaaaacttcagccgcacagatgcggattacatcaagaagtggaagctgtactcctacgggaacaggatccgcatcttcaggaatccaaaaaaaaataacgtctttgactgggaggaagtgtgcctgacatccgcctacaaggaactgttcaataaatacggcatcaattaccagcagggcgacattcgcgccctcctctgtgagcagtccgacaaagcgttttactccagcttcatggccctcatgtccctgatgctccaaatgaggaatagcatcacagggcgcaccgacgtcgacttcctcatcagcccggtgaagaactccgacgggatcttttacgactcccgcaactatgaggcgcaagagaatgcgatcctcccgaagaacgccgatgcgaacggggcctataatatcgccaggaaagtgctctgggccatcgggcagttcaaaaaggcggaggatgagaagctcgacaaggtgaaaattgccatttccaacaaggagtggctggagtacgcgcagacctccgtgaagcacggctcctctggcagctccggctctagcggctcctctggcagctccggctccaagctggagaagtttacaaactgttacagcctctccaaaaccctcaggtttaaagcgatcccggtgggcaagacccaggagaacatcgacaacaagaggctcctggtggaagacgagaagcgcgccgaagactacaagggcgtgaagaagctgctcgataggtactacctcagctttattaacgacgtgctgcacagcatcaaactcaagaatctcaacaactacatctccctcttccgcaaaaagacccgcaccgagaaggagaacaaggagctggagaacctggagatcaacctccgcaaggaaatcgccaaagcgttcaagggcaatgaagggtacaagagcctcttcaagaaagacatcatcgaaactatcctcccagagtttctcgatgacaaggacgagatcgcgctggtgaactcctttaacgggttcacaaccgcgtttaccggcttctttgataacagggaaaatatgttctccgaggaggccaagtccaccagcatcgccttcaggtgtatcaacgagaacctcacccgctacatttccaatatggacattttcgagaaggtggatgcgatcttcgataagcacgaggtgcaggagatcaaagagaagattctcaattccgattatgacgtcgaggatttcttcgaaggggagttctttaattttgtgctcacacaagagggcattgacgtgtacaacgcgattatcgggggcttcgtcacagagtccggggagaagattaaggggctgaatgagtacatcaatctgtacaatcagaagaccaagcagaaactgccgaaattcaagccgctctacaagcaagtcctgtccgatagggaaagcctctccttctacggcgagggctataccagcgacgaggaggtgctggaagtcttccgcaacacactgaataagaatagcgagattttctcctccatcaagaagctcgagaagctctttaagaactttgacgagtacagctccgccgggattttcgtgaagaacgggccggcgatcagcaccatctccaaggacatctttggcgagtggaacgtcatcagggacaagtggaacgccgagtacgacgacatccacctgaagaagaaggcggtggtgaccgagaagtatgaggacgatcgcaggaagtccttcaaaaaaatcggctccttcagcctcgaacagctccaggagtatgccgatgcggatctgtccgtcgtcgagaagctgaaggaaatcatcattcagaaggtcgacgagatctataaagtgtacgggtccagcgagaagctgttcgacgccgactttgtgctcgagtctggtggttcttctggtggttctagcggcagcgagactcccgggacctcagagtccgccacacccgaaagttctggtggttcttctggtggttcttctgaggttgaattttcacatgagtattggatgagacacgctcttaccttggctaagagagcaagggatgagagagaagttccagtgggagcagttcttgtgttgaacaatagagttattggagagggttggaacaggtaagtatcaaggttacaagacaggtttaaggagaccaatagaaactgggcttgtcgagacagagaagactcttgcgtttctgataggcacctattggtcttactgacatccactttgcctttctctccacagggctattggacttcatgatcctactgctcacgcagaaattatggcacttagacaaggtggacttgttatgcagaactacaggcttatcgatgctactctttatgttacattcgagccatgtgtgatgtgcgctggagcaatgattcattctaggattggaagggttgtgttcggtgttagaaactctaagaggggagctgcaggttcacttatgaacgttttgaattatcctggtatgaaccacagagtggagattactgaaggtattttggcagatgaatgtgctgcacttttgtgcgatttttacagaatgcctagacaagtgttcaacgctcaaaagaaggcacaatcttctattaactctggcggctcaaaaagaaccgccgacggcagcgaattcgagcccaagaagaagaggaaagtcggaagcggagctactaacttcagcctgctgaagcaggctggagacgtggaggagaaccctggacctatggtgagcaagggcgaggagctgttcaccggggtggtgcccatcctggtcgagctggacggcgacgtaaacggccacaagttcagcgtgtccggcgagggcgagggcgatgccacctacggcaagctgaccctgaagttcatctgcaccaccggcaagctgcccgtgccctggcccaccctcgtgaccaccctgacctatggagtgcagtgcttcagccgctaccccgaccacatgaagcagcacgacttcttcaagtccgccatgcccgaaggctacgtccaggagcgcaccatcttcttcaaggacgacggcaactacaagacccgcgccgaggtgaagttcgagggcgacaccctggtgaaccgcatcgagctgaagggcatcgacttcaaggaggacggcaacatcctggggcacaagctggagtacaactacaacagccacaacgtctatatcatggccgacaagcagaagaacggcatcaaggtgaacttcaagatccgccacaacatcgaggacggcagcgtgcagctcgccgaccactaccagcagaacacccccatcggcgacggccccgtgctgctgcccgacaaccactacctgagcacccagtccgccctgagcaaagaccccaacgagaagcgcgatcacatggtcctgctggagttcgtgaccgccgccgggatcactctcggcatggacgagctgtacaagtctggtggttctcccaagaagaagaggaaagtctaaccggtcatcatcaccatcaccattgagtttaaacccgctgatcagcctcgactgtgccttctagttgccagccatctgttgtttgcccctcccccgtgccttccttgaccctggaaggtgccactcccactgtcctttcctaataaaatgaggaaattgcatcgcattgtctgagtaggtgtcattctattctggggggtggggtggggcaggacagcaagggggaggattgggaagacaatagcaggcatgctggggatgcggtgggctctatggcttctgaggcggaaagaaccagctggggctcgataccgtcgacctctagctagagcttggcgtaatcatggtcatagctgtttcctgtgtgaaattgttatccgctcacaattccacacaacatacgagccggaagcataaagtgtaaagcctagggtgcctaatgagtgagctaactcacattaattgcgttgcgctcactgcccgctttccagtcgggaaacctgtcgtgccagctgcattaatgaatcggccaacgcgcggggagaggcggtttgcgtattgggcgctcttccgcttcctcgctcactgactcgctgcgctcggtcgttcggctgcggcgagcggtatcagctcactcaaaggcggtaatacggttatccacagaatcaggggataacgcaggaaagaacatgtgagcaaaaggccagcaaaaggccaggaaccgtaaaaaggccgcgttgctggcgtttttccataggctccgcccccctgacgagcatcacaaaaatcgacgctcaagtcagaggtggcgaaacccgacaggactataaagataccaggcgtttccccctggaagctccctcgtgcgctctcctgttccgaccctgccgcttaccggatacctgtccgcctttctcccttcgggaagcgtggcgctttctcatagctcacgctgtaggtatctcagttcggtgtaggtcgttcgctccaagctgggctgtgtgcacgaaccccccgttcagcccgaccgctgcgccttatccggtaactatcgtcttgagtccaacccggtaagacacgacttatcgccactggcagcagccactggtaacaggattagcagagcgaggtatgtaggcggtgctacagagttcttgaagtggtggcctaactacggctacactagaagaacagtatttggtatctgcgctctgctgaagccagttaccttcggaaaaagagttggtagctcttgatccggcaaacaaaccaccgctggtagcggtggtttttttgtttgcaagcagcagattacgcgcagaaaaaaaggatctcaagaagatcctttgatcttttctacggggtctgacactcagtggaacgaaaactcacgttaagggattttggtcatgagattatcaaaaaggatcttcacctagatccttttaaattaaaaatgaagttttaaatcaatctaaagtatatatgagtaaacttggtctgacagttaccaatgcttaatcagtgaggcacctatctcagcgatctgtctatttcgttcatccatagttgcctgactccccgtcgtgtagataactacgatacgggagggcttaccatctggccccagtgctgcaatgataccgcgagacccacgctcaccggctccagatttatcagcaataaaccagccagccggaagggccgagcgcagaagtggtcctgcaactttatccgcctccatccagtctattaattgttgccgggaagctagagtaagtagttcgccagttaatagtttgcgcaacgttgttgccattgctacaggcatcgtggtgtcacgctcgtcgtttggtatggcttcattcagctccggttcccaacgatcaaggcgagttacatgatcccccatgttgtgcaaaaaagcggttagctccttcggtcctccgatcgttgtcagaagtaagttggccgcagtgttatcactcatggttatggcagcactgcataattctcttactgtcatgccatccgtaagatgcttttctgtgactggtgagtactcaaccaagtcattctgagaatagtgtatgcggcgaccgagttgctcttgcccggcgtcaatacgggataataccgcgccacatagcagaactttaaaagtgctcatcattggaaaacgttcttcggggcgaaaactctcaaggatcttaccgctgttgagatccagttcgatgtaacccactcgtgcacccaactgatcttcagcatcttttactttcaccagcgtttctgggtgagcaaaaacaggaaggcaaaatgccgcaaaaaagggaataagggcgacacggaaatgttgaatactcatactcttcctttttcaatattattgaagcatttatcagggttattgtctcatgagcggatacatatttgaatgtatttagaaaaataaacaaataggggttccgcgcacatttccccgaaaagtgccacctgacgtcgacggatcgggagatcgatctcccgatcccctagggtcgactctcagtacaatctgctctgatgccgcatagttaagccagtatctgctccctgcttgtgtgttggaggtcgctgagtagtgcgcgagcaaaatttaagctacaacaaggcaaggcttgaccgacaattgcatgaagaatctgcttagggttaggcgttttgcgctgcttcgcgatgtacgggccagatatacgcgtt

SEQ ID NO: 531 - DNA, 8794 bp, synthetic construct
  source 1..8794: mol_type = other DNA
gacattgattattgactagttattaatagtaatcaattacggggtcattagttcatagcccatatatggagttccgcgttacataacttacggtaaatggcccgcctggctgaccgcccaacgacccccgcccattgacgtcaataatgacgtatgttcccatagtaacgccaatagggactttccattgacgtcaatgggtggagtatttacggtaaactgcccacttggcagtacatcaagtgtatcatatgccaagtacgccccctattgacgtcaatgacggtaaatggcccgcctggcattatgcccagtacatgaccttatgggactttcctacttggcagtacatctacgtattagtcatcgctattaccatggtgatgcggttttggcagtacatcaatgggcgtggatagcggtttgactcacggggatttccaagtctccaccccattgacgtcaatgggagtttgttttggcaccaaaatcaacgggactttccaaaatgtcgtaacaactccgccccattgacgcaaatgggcggtaggcgtgtacggtgggaggtctatataagcagagctggtttagtgaaccgtcagatccgctagagatccgcggccgctaatacgactcactatagggagagccgccaccatgaaacggacagccgacggaagcgagttcgagtcaccaaagaagaagcggaaagtctccgacaaagcgttttactccagcttcatggccctcatgtccctgatgctccaaatgaggaatagcatcacagggcgcaccgacgtcgacttcctcatcagcccggtgaagaactccgacgggatcttttacgactcccgcaactatgaggcgcaagagaatgcgatcctcccgaagaacgccgatgcgaacggggcctataatatcgccaggaaagtgctctgggccatcgggcagttcaaaaaggcggaggatgagaagctcgacaaggtgaaaattgccatttccaacaaggagtggctggagtacgcgcagacctccgtgaagcacggctcctctggcagctccggctctagcggctcctctggcagctccggctccaagctggagaagtttacaaactgttacagcctctccaaaaccctcaggtttaaagcgatcccggtgggcaagacccaggagaacatcgacaacaagaggctcctggtggaagacgagaagcgcgccgaagactacaagggcgtgaagaagctgctcgataggtactacctcagctttattaacgacgtgctgcacagcatcaaactcaagaatctcaacaactacatctccctcttccgcaaaaagacccgcaccgagaaggagaacaaggagctggagaacctggagatcaacctccgcaaggaaatcgccaaagcgttcaagggcaatgaagggtacaagagcctcttcaagaaagacatcatcgaaactatcctcccagagtttctcgatgacaaggacgagatcgcgctggtgaactcctttaacgggttcacaaccgcgtttaccggcttctttgataacagggaaaatatgttctccgaggaggccaagtccaccagcatcgccttcaggtgtatcaacgagaacctcacccgctacatttccaatatggacattttcgagaaggtggatgcgatcttcgataagcacgaggtgcaggagatcaaagagaagattctcaattccgattatgacgtcgaggatttcttcgaaggggagttctttaattttgtgctcacacaagagggcattgacgtgtacaacgcgattatcgggggcttcgtcacagagtccggggagaagattaaggggctgaatgagtacatcaatctgtacaatcagaagaccaagcagaaactgccgaaattcaagccgctctacaagcaagtcctgtccgatagggaaagcctctccttctacggcgagggctataccagcgacgaggaggtgctggaagtcttccgcaacacactgaataagaatagcgagattttctcctccatcaagaagctcgagaagctctttaagaactttgacgagtacagctccgccgggattttcgtgaagaacgggccggcgatcagcaccatctccaaggacatctttggcgagtggaacgtcatcagggacaagtggaacgccgagtacgacgacatccacctgaagaagaaggcggtggtgaccgagaagtatgaggacgatcgcaggaagtccttcaaaaaaatcggctccttcagcctcgaacagctccaggagtatgccgatgcggatctgtccgtcgtcgagaagctgaaggaaatcatcattcagaaggtcgacgagatctataaagtgtacgggtccagcgagaagctgttcgacgccgactttgtgctcgagaagtccctcaaaaagaatgacgccgtggtggccattatgaaagacctgctcgactccgtgaagtccttcgaaaattacattaaagcgttctttggggaggggaaggaaactaacagggatgagtccttctatggcgactttgtcctcgcgtacgacatcctgctgaaggtcgaccacatttacgacgcgatccgcaactacgtgacacagaagccgtactccaaagacaagttcaagctgtacttccagaacccgcaatttatggggggctgggacaaggataaagagacagactaccgcgcgacaattctccgctatggctccaaatactatctggccatcatggacaagaagtacgcgaagtgcctgcagaagatcgacaaagacgacgtcaatggcaactatgaaaagatcaactacaagctgctgccgggcccgaacaagatgctcccgaaggtgttcttcagcaagaagtggatggcctactacaatccaagcgaggatattcagaaaatctataaaaacgggaccttcaagaagggggacatgtttaacctcaacgactgccacaagctcattgatttcttcaaggatagcatttcccgctacccgaaatggtccaatgcgtacgattttaacttctccgagacagaaaagtacaaagacatcgcgggcttttacagggaggtggaggagcaagggtataaagtttcttttgaatccgcgagcaagaaggaagtcgacaagctcgtcgaggagggcaagctctacatgttccaaatttataacaaggacttttccgacaagagccatgggaccccaaacctccacaccatgtacttcaaactgctctttgacgagaacaaccacgggcaaatcaggctgagcggcggcgccgaattattcatgcgcagggcctccctcaagaaggaagagctggtcgtccatccagccaattccccgatcgcgaacaagaacccggacaatccgaaaaagaccaccaccctgtcctacgacgtctacaaggacaaacgcttcagcgaagaccagtacgaattacacatcccaattgcgattaataagtgcccaaagaatatcttcaaaattaatacagaggtcagggtgctgctcaaacacgacgacaatccgtatgtcatcggcattgccaggggcgagcgcaatctgctctatatcgtggtcgtggatgggaagggcaatattgtggagcagtactccctgaacgagattatcaacaacttcaatgggattaggattaagaccgactatcacagcctgctcgacaagaaagaaaaagagaggtttgaggcccgccaaaactggacctccattgagaatatcaaagaattaaaggccggctatatttcccaagtcgtccacaagatctgcgagctggtggagaaatatgacgccgtgattgcgctcgaagacttaaattctgggttcaagaactcccgcgtgaaggtggaaaaacaggtgtatcagaaattcgagaaaatgctgatcgacaaactcaattatatggtggataagaagtccaacccgtgtgccacagggggcgcgctgaagggctatcagatcaccaacaagttcgagagcttcaagagcatgagcacccagaacgggtttattttctacatcccggcgtggctcacctccaagattgacccgagcaccggcttcgtgaacctcctgaagacaaagtatacctccattgccgacagcaagaagtttatctcctccttcgaccgcattatgtatgtgccggaggaggacctcttcgagttcgccctcgactacaaaaacttcagccgcacagatgcggattacatcaagaagtggaagctgtactcctacgggaacaggatccgcatcttcaggaatccaaaaaaaaataacgtctttgactgggaggaagtgtgcctgacatccgcctacaaggaactgttcaataaatacggcatcaattaccagcagggcgacattcgcgccctcctctgtgagcagtctggtggttcttctggtggttctagcggcagcgagactcccgggacctcagagtccgccacacccgaaagttctggtggttcttctggtggttcttctgaggttgaattttcacatgagtattggatgagacacgctcttaccttggctaagagagcaagggatgagagagaagttccagtgggagcagttcttgtgttgaacaatagagttattggagagggttggaacaggtaagtatcaaggttacaagacaggtttaaggagaccaatagaaactgggcttgtcgagacagagaagactcttgcgtttctgataggcacctattggtcttactgacatccactttgcctttctctccacagggctattggacttcatgatcctactgctcacgcagaaattatggcacttagacaaggtggacttgttatgcagaactacaggcttatcgatgctactctttatgttacattcgagccatgtgtgatgtgcgctggagcaatgattcattctaggattggaagggttgtgttcggtgttagaaactctaagaggggagctgcaggttcacttatgaacgttttgaattatcctggtatgaaccacagagtggagattactgaaggtattttggcagatgaatgtgctgcacttttgtgcgatttttacagaatgcctagacaagtgttcaacgctcaaaagaaggcacaatcttctattaactctggcggctcaaaaagaaccgccgacggcagcgaattcgagcccaagaagaagaggaaagtcggaagcggagctactaacttcagcctgctgaagcaggctggagacgtggaggagaaccctggacctatggtgagcaagggcgaggagctgttcaccggggtggtgcccatcctggtcgagctggacggcgacgtaaacggccacaagttcagcgtgtccggcgagggcgagggcgatgccacctacggcaagctgaccctgaagttcatctgcaccaccggcaagctgcccgtgccctggcccaccctcgtgaccaccctgacctatggagtgcagtgcttcagccgctaccccgaccacatgaagcagcacgacttcttcaagtccgccatgcccgaaggctacgtccaggagcgcaccatcttcttcaaggacgacggcaactacaagacccgcgccgaggtgaagttcgagggcgacaccctggtgaaccgcatcgagctgaagggcatcgacttcaaggaggacggcaacatcctggggcacaagctggagtacaactacaacagccacaacgtctatatcatggccgacaagcagaagaacggcatcaaggtgaacttcaagatccgccacaacatcgaggacggcagcgtgcagctcgccgaccactaccagcagaacacccccatcggcgacggccccgtgctgctgcccgacaaccactacctgagcacccagtccgccctgagcaaagaccccaacgagaagcgcgatcacatggtcctgctggagttcgtgaccgccgccgggatcactctcggcatggacgagctgtacaagtctggtggttctcccaagaagaagaggaaagtctaaccggtcatcatcaccatcaccattgagtttaaacccgctgatcagcctcgactgtgccttctagttgccagccatctgttgtttgcccctcccccgtgccttccttgaccctggaaggtgccactcccactgtcctttcctaataaaatgaggaaattgcatcgcattgtctgagtaggtgtcattctattctggggggtggggtggggcaggacagcaagggggaggattgggaagacaatagcaggcatgctggggatgcggtgggctctatggcttctgaggcggaaagaaccagctggggctcgataccgtcgacctctagctagagcttggcgtaatcatggtcatagctgtttcctgtgtgaaattgttatccgctcacaattccacacaacatacgagccggaagcataaagtgtaaagcctagggtgcctaatgagtgagctaactcacattaattgcgttgcgctcactgcccgctttccagtcgggaaacctgtcgtgccagctgcattaatgaatcggccaacgcgcggggagaggcggtttgcgtattgggcgctcttccgcttcctcgctcactgactcgctgcgctcggtcgttcggctgcggcgagcggtatcagctcactcaaaggcggtaatacggttatccacagaatcaggggataacgcaggaaagaacatgtgagcaaaaggccagcaaaaggccaggaaccgtaaaaaggccgcgttgctggcgtttttccataggctccgcccccctgacgagcatcacaaaaatcgacgctcaagtcagaggtggcgaaacccgacaggactataaagataccaggcgtttccccctggaagctccctcgtgcgctctcctgttccgaccctgccgcttaccggatacctgtccgcctttctcccttcgggaagcgtggcgctttctcatagctcacgctgtaggtatctcagttcggtgtaggtcgttcgctccaagctgggctgtgtgcacgaaccccccgttcagcccgaccgctgcgccttatccggtaactatcgtcttgagtccaacccggtaagacacgacttatcgccactggcagcagccactggtaacaggattagcagagcgaggtatgtaggcggtgctacagagttcttgaagtggtggcctaactacggctacactagaagaacagtatttggtatctgcgctctgctgaagccagttaccttcggaaaaagagttggtagctcttgatccggcaaacaaaccaccgctggtagcggtggtttttttgtttgcaagcagcagattacgcgcagaaaaaaaggatctcaagaagatcctttgatcttttctacggggtctgacactcagtggaacgaaaactcacgttaagggattttggtcatgagattatcaaaaaggatcttcacctagatccttttaaattaaaaatgaagttttaaatcaatctaaagtatatatgagtaaacttggtctgacagttaccaatgcttaatcagtgaggcacctatctcagcgatctgtctatttcgttcatccatagttgcctgactccccgtcgtgtagataactacgatacgggagggcttaccatctggccccagtgctgcaatgataccgcgagacccacgctcaccggctccagatttatcagcaataaaccagccagccggaagggccgagcgcagaagtggtcctgcaactttatccgcctccatccagtctattaattgttgccgggaagctagagtaagtagttcgccagttaatagtttgcgcaacgttgttgccattgctacaggcatcgtggtgtcacgctcgtcgtttggtatggcttcattcagctccggttcccaacgatcaaggcgagttacatgatcccccatgttgtgcaaaaaagcggttagctccttcggtcctccgatcgttgtcagaagtaagttggccgcagtgttatcactcatggttatggcagcactgcataattctcttactgtcatgccatccgtaagatgcttttctgtgactggtgagtactcaaccaagtcattctgagaatagtgtatgcggcgaccgagttgctcttgcccggcgtcaatacgggataataccgcgccacatagcagaactttaaaagtgctcatcattggaaaacgttcttcggggcgaaaactctcaaggatcttaccgctgttgagatccagttcgatgtaacccactcgtgcacccaactgatcttcagcatcttttactttcaccagcgtttctgggtgagcaaaaacaggaaggcaaaatgccgcaaaaaagggaataagggcgacacggaaatgttgaatactcatactcttcctttttcaatattattgaagcatttatcagggttattgtctcatgagcggatacatatttgaatgtatttagaaaaataaacaaataggggttccgcgcacatttccccgaaaagtgccacctgacgtcgacggatcgggagatcgatctcccgatcccctagggtcgactctcagtacaatctgctctgatgccgcatagttaagccagtatctgctccctgcttgtgtgttggaggtcgctgagtagtgcgcgagcaaaatttaagctacaacaaggcaaggcttgaccgacaattgcatgaagaatctgcttagggttaggcgttttgcgctgcttcgcgatgtacgggccagatatacgcgtt

SEQ ID NO: 532 - DNA, 8746 bp, synthetic construct
  source 1..8746: mol_type = other DNA
gacattgattattgactagttattaatagtaatcaattacggggtcattagttcatagcccatatatggagttccgcgttacataacttacggtaaatggcccgcctggctgaccgcccaacgacccccgcccattgacgtcaataatgacgtatgttcccatagtaacgccaatagggactttccattgacgtcaatgggtggagtatttacggtaaactgcccacttggcagtacatcaagtgtatcatatgccaagtacgccccctattgacgtcaatgacggtaaatggcccgcctggcattatgcccagtacatgaccttatgggactttcctacttggcagtacatctacgtattagtcatcgctattaccatggtgatgcggttttggcagtacatcaatgggcgtggatagcggtttgactcacggggatttccaagtctccaccccattgacgtcaatgggagtttgttttggcaccaaaatcaacgggactttccaaaatgtcgtaacaactccgccccattgacgcaaatgggcggtaggcgtgtacggtgggaggtctatataagcagagctggtttagtgaaccgtcagatccgctagagatccgcggccgctaatacgactcactatagggagagccgccaccatgaaacggacagccgacggaagcgagttcgagtcaccaaagaagaagcggaaagtctctgaggttgaattttcacatgagtattggatgagacacgctcttaccttggctaagagagcaagggatgagagagaagttccagtgggagcagttcttgtgttgaacaatagagttattggagagggttggaacaggtaagtatcaaggttacaagacaggtttaaggagaccaatagaaactgggcttgtcgagacagagaagactcttgcgtttctgataggcacctattggtcttactgacatccactttgcctttctctccacagggctattggacttcatgatcctactgctcacgcagaaattatggcacttagacaaggtggacttgttatgcagaactacaggcttatcgatgctactctttatgttacattcgagccatgtgtgatgtgcgctggagcaatgattcattctaggattggaagggttgtgttcggtgttagaaactctaagaggggagctgcaggttcacttatgaacgttttgaattatcctggtatgaaccacagagtggagattactgaaggtattttggcagatgaatgtgctgcacttttgtgcgatttttacagaatgcctagacaagtgttcaacgctcaaaagaaggcacaatcttctattaactctggtggttcttctggtggttctagcggcagcgagactcccgggacctcagagtccgccacacccgaaagttctggtggttcttctggtggttcttccaagctggagaagtttacaaactgttacagcctctccaaaaccctcaggtttaaagcgatcccggtgggcaagacccaggagaacatcgacaacaagaggctcctggtggaagacgagaagcgcgccgaagactacaagggcgtgaagaagctgctcgataggtactacctcagctttattaacgacgtgctgcacagcatcaaactcaagaatctcaacaactacatctccctcttccgcaaaaagacccgcaccgagaaggagaacaaggagctggagaacctggagatcaacctccgcaaggaaatcgccaaagcgttcaagggcaatgaagggtacaagagcctcttcaagaaagacatcatcgaaactatcctcccagagtttctcgatgacaaggacgagatcgcgctggtgaactcctttaacgggttcacaaccgcgtttaccggcttctttgataacagggaaaatatgttctccgaggaggccaagtccaccagcatcgccttcaggtgtatcaacgagaacctcacccgctacatttccaatatggacattttcgagaaggtggatgcgatcttcgataagcacgaggtgcaggagatcaaagagaagattctcaattccgattatgacgtcgaggatttcttcgaaggggagttctttaattttgtgctcacacaagagggcattgacgtgtacaacgcgattatcgggggcttcgtcacagagtccggggagaagattaaggggctgaatgagtacatcaatctgtacaatcagaagaccaagcagaaactgccgaaattcaagccgctctacaagcaagtcctgtccgatagggaaagcctctccttctacggcgagggctataccagcgacgaggaggtgctggaagtcttccgcaacacactgaataagaatagcgagattttctcctccatcaagaagctcgagaagctctttaagaactttgacgagtacagctccgccgggattttcgtgaagaacgggccggcgatcagcaccatctccaaggacatctttggcgagtggaacgtcatcagggacaagtggaacgccgagtacgacgacatccacctgaagaagaaggcggtggtgaccgagaagtatgaggacgatcgcaggaagtccttcaaaaaaatcggctccttcagcctcgaacagctccaggagtatgccgatgcggatctgtccgtcgtcgagaagctgaaggaaatcatcattcagaaggtcgacgagatctataaagtgtacgggtccagcgagaagctgttcgacgccgactttgtgctcgagaagtccctcaaaaagaatgacgccgtggtggccattatgaaagacctgctcgactccgtgaagtccttcgaaaattacattaaagcgttctttggggaggggaaggaaactaacagggatgagtccttctatggcgactttgtcctcgcgtacgacatcctgctgaaggtcgaccacatttacgacgcgatccgcaactacgtgacacagaagccgtactccaaagacaagttcaagctgtacttccagaacccgcaatttatggggggctgggacaaggataaagagacagactaccgcgcgacaattctccgctatggctccaaatactatctggccatcatggacaagaagtacgcgaagtgcctgcagaagatcgacaaagacgacgtcaatggcaactatgaaaagatcaactacaagctgctgccgggcccgaacaagatgctcccgaaggtgttcttcagcaagaagtggatggcctactacaatccaagcgaggatattcagaaaatctataaaaacgggaccttcaagaagggggacatgtttaacctcaacgactgccacaagctcattgatttcttcaaggatagcatttcccgctacccgaaatggtccaatgcgtacgattttaacttctccgagacagaaaagtacaaagacatcgcgggcttttacagggaggtggaggagcaagggtataaagtttcttttgaatccgcgagcaagaaggaagtcgacaagctcgtcgaggagggcaagctctacatgttccaaatttataacaaggacttttccgacaagagccatgggaccccaaacctccacaccatgtacttcaaactgctctttgacgagaacaaccacgggcaaatcaggctgagcggcggcgccgaattattcatgcgcagggcctccctcaagaaggaagagctggtcgtccatccagccaattccccgatcgcgaacaagaacccggacaatccgaaaaagaccaccaccctgtcctacgacgtctacaaggacaaacgcttcagcgaagaccagtacgaattacacatcccaattgcgattaataagtgcccaaagaatatcttcaaaattaatacagaggtcagggtgctgctcaaacacgacgacaatccgtatgtcatcggcattgccaggggcgagcgcaatctgctctatatcgtggtcgtggatgggaagggcaatattgtggagcagtactccctgaacgagattatcaacaacttcaatgggattaggattaagaccgactatcacagcctgctcgacaagaaagaaaaagagaggtttgaggcccgccaaaactggacctccattgagaatatcaaagaattaaaggccggctatatttcccaagtcgtccacaagatctgcgagctggtggagaaatatgacgccgtgattgcgctcgaagacttaaattctgggttcaagaactcccgcgtgaaggtggaaaaacaggtgtatcagaaattcgagaaaatgctgatcgacaaactcaattatatggtggataagaagtccaacccgtgtgccacagggggcgcgctgaagggctatcagatcaccaacaagttcgagagcttcaagagcatgagcacccagaacgggtttattttctacatcccggcgtggctcacctccaagattgacccgagcaccggcttcgtgaacctcctgaagacaaagtatacctccattgccgacagcaagaagtttatctcctccttcgaccgcattatgtatgtgccggaggaggacctcttcgagttcgccctcgactacaaaaacttcagccgcacagatgcggattacatcaagaagtggaagctgtactcctacgggaacaggatccgcatcttcaggaatccaaaaaaaaataacgtctttgactgggaggaagtgtgcctgacatccgcctacaaggaactgttcaataaatacggcatcaattaccagcagggcgacattcgcgccctcctctgtgagcagtccgacaaagcgttttactccagcttcatggccctcatgtccctgatgctccaaatgaggaatagcatcacagggcgcaccgacgtcgacttcctcatcagcccggtgaagaactccgacgggatcttttacgactcccgcaactatgaggcgcaagagaatgcgatcctcccgaagaacgccgatgcgaacggggcctataatatcgccaggaaagtgctctgggccatcgggcagttcaaaaaggcggaggatgagaagctcgacaaggtgaaaattgccatttccaacaaggagtggctggagtacgcgcagacctccgtgaagcactctggcggctcaaaaagaaccgccgacggcagcgaattcgagcccaagaagaagaggaaagtcggaagcggagctactaacttcagcctgctgaagcaggctggagacgtggaggagaaccctggacctatggtgagcaagggcgaggagctgttcaccggggtggtgcccatcctggtcgagctggacggcgacgtaaacggccacaagttcagcgtgtccggcgagggcgagggcgatgccacctacggcaagctgaccctgaagttcatctgcaccaccggcaagctgcccgtgccctggcccaccctcgtgaccaccctgacctatggagtgcagtgcttcagccgctaccccgaccacatgaagcagcacgacttcttcaagtccgccatgcccgaaggctacgtccaggagcgcaccatcttcttcaaggacgacggcaactacaagacccgcgccgaggtgaagttcgagggcgacaccctggtgaaccgcatcgagctgaagggcatcgacttcaaggaggacggcaacatcctggggcacaagctggagtacaactacaacagccacaacgtctatatcatggccgacaagcagaagaacggcatcaaggtgaacttcaagatccgccacaacatcgaggacggcagcgtgcagctcgccgaccactaccagcagaacacccccatcggcgacggccccgtgctgctgcccgacaaccactacctgagcacccagtccgccctgagcaaagaccccaacgagaagcgcgatcacatggtcctgctggagttcgtgaccgccgccgggatcactctcggcatggacgagctgtacaagtctggtggttctcccaagaagaagaggaaagtctaaccggtcatcatcaccatcaccattgagtttaaacccgctgatcagcctcgactgtgccttctagttgccagccatctgttgtttgcccctcccccgtgccttccttgaccctggaaggtgccactcccactgtcctttcctaataaaatgaggaaattgcatcgcattgtctgagtaggtgtcattctattctggggggtggggtggggcaggacagcaagggggaggattgggaagacaatagcaggcatgctggggatgcggtgggctctatggcttctgaggcggaaagaaccagctggggctcgataccgtcgacctctagctagagcttggcgtaatcatggtcatagctgtttcctgtgtgaaattgttatccgctcacaattccacacaacatacgagccggaagcataaagtgtaaagcctagggtgcctaatgagtgagctaactcacattaattgcgttgcgctcactgcccgctttccagtcgggaaacctgtcgtgccagctgcattaatgaatcggccaacgcgcggggagaggcggtttgcgtattgggcgctcttccgcttcctcgctcactgactcgctgcgctcggtcgttcggctgcggcgagcggtatcagctcactcaaaggcggtaatacggttatccacagaatcaggggataacgcaggaaagaacatgtgagcaaaaggccagcaaaaggccaggaaccgtaaaaaggccgcgttgctggcgtttttccataggctccgcccccctgacgagcatcacaaaaatcgacgctcaagtcagaggtggcgaaacccgacaggactataaagataccaggcgtttccccctggaagctccctcgtgcgctctcctgttccgaccctgccgcttaccggatacctgtccgcctttctcccttcgggaagcgtggcgctttctcatagctcacgctgtaggtatctcagttcggtgtaggtcgttcgctccaagctgggctgtgtgcacgaaccccccgttcagcccgaccgctgcgccttatccggtaactatcgtcttgagtccaacccggtaagacacgacttatcgccactggcagcagccactggtaacaggattagcagagcgaggtatgtaggcggtgctacagagttcttgaagtggtggcctaactacggctacactagaagaacagtatttggtatctgcgctctgctgaagccagttaccttcggaaaaagagttggtagctcttgatccggcaaacaaaccaccgctggtagcggtggtttttttgtttgcaagcagcagattacgcgcagaaaaaaaggatctcaagaagatcctttgatcttttctacggggtctgacactcagtggaacgaaaactcacgttaagggattttggtcatgagattatcaaaaaggatcttcacctagatccttttaaattaaaaatgaagttttaaatcaatctaaagtatatatgagtaaacttggtctgacagttaccaatgcttaatcagtgaggcacctatctcagcgatctgtctatttcgttcatccatagttgcctgactccccgtcgtgtagataactacgatacgggagggcttaccatctggccccagtgctgcaatgataccgcgagacccacgctcaccggctccagatttatcagcaataaaccagccagccggaagggccgagcgcagaagtggtcctgcaactttatccgcctccatccagtctattaattgttgccgggaagctagagtaagtagttcgccagttaatagtttgcgcaacgttgttgccattgctacaggcatcgtggtgtcacgctcgtcgtttggtatggcttcattcagctccggttcccaacgatcaaggcgagttacatgatcccccatgttgtgcaaaaaagcggttagctccttcggtcctccgatcgttgtcagaagtaagttggccgcagtgttatcactcatggttatggcagcactgcataattctcttactgtcatgccatccgtaagatgcttttctgtgactggtgagtactcaaccaagtcattctgagaatagtgtatgcggcgaccgagttgctcttgcccggcgtcaatacgggataataccgcgccacatagcagaactttaaaagtgctcatcattggaaaacgttcttcggggcgaaaactctcaaggatcttaccgctgttgagatccagttcgatgtaacccactcgtgcacccaactgatcttcagcatcttttactttcaccagcgtttctgggtgagcaaaaacaggaaggcaaaatgccgcaaaaaagggaataagggcgacacggaaatgttgaatactcatactcttcctttttcaatattattgaagcatttatcagggttattgtctcatgagcggatacatatttgaatgtatttagaaaaataaacaaataggggttccgcgcacatttccccgaaaagtgccacctgacgtcgacggatcgggagatcgatctcccgatcccctagggtcgactctcagtacaatctgctctgatgccgcatagttaagccagtatctgctccctgcttgtgtgttggaggtcgctgagtagtgcgcgagcaaaatttaagctacaacaaggcaaggcttgaccgacaattgcatgaagaatctgcttagggttaggcgttttgcgctgcttcgcgatgtacgggccagatatacgcgtt

SEQ ID NO: 533 - DNA, 8746 bp, synthetic construct
  source 1..8746: mol_type = other DNA
gacattgattattgactagttattaatagtaatcaattacggggtcattagttcatagcccatatatggagttccgcgttacataacttacggtaaatggcccgcctggctgaccgcccaacgacccccgcccattgacgtcaataatgacgtatgttcccatagtaacgccaatagggactttccattgacgtcaatgggtggagtatttacggtaaactgcccacttggcagtacatcaagtgtatcatatgccaagtacgccccctattgacgtcaatgacggtaaatggcccgcctggcattatgcccagtacatgaccttatgggactttcctacttggcagtacatctacgtattagtcatcgctattaccatggtgatgcggttttggcagtacatcaatgggcgtggatagcggtttgactcacggggatttccaagtctccaccccattgacgtcaatgggagtttgttttggcaccaaaatcaacgggactttccaaaatgtcgtaacaactccgccccattgacgcaaatgggcggtaggcgtgtacggtgggaggtctatataagcagagctggtttagtgaaccgtcagatccgctagagatccgcggccgctaatacgactcactatagggagagccgccaccatgaaacggacagccgacggaagcgagttcgagtcaccaaagaagaagcggaaagtctccaagctggagaagtttacaaactgttacagcctctccaaaaccctcaggtttaaagcgatcccggtgggcaagacccaggagaacatcgacaacaagaggctcctggtggaagacgagaagcgcgccgaagactacaagggcgtgaagaagctgctcgataggtactacctcagctttattaacgacgtgctgcacagcatcaaactcaagaatctcaacaactacatctccctcttccgcaaaaagacccgcaccgagaaggagaacaaggagctggagaacctggagatcaacctccgcaaggaaatcgccaaagcgttcaagggcaatgaagggtacaagagcctcttcaagaaagacatcatcgaaactatcctcccagagtttctcgatgacaaggacgagatcgcgctggtgaactcctttaacgggttcacaaccgcgtttaccggcttctttgataacagggaaaatatgttctccgaggaggccaagtccaccagcatcgccttcaggtgtatcaacgagaacctcacccgctacatttccaatatggacattttcgagaaggtggatgcgatcttcgataagcacgaggtgcaggagatcaaagagaagattctcaattccgattatgacgtcgaggatttcttcgaaggggagttctttaattttgtgctcacacaagagggcattgacgtgtacaacgcgattatcgggggcttcgtcacagagtccggggagaagattaaggggctgaatgagtacatcaatctgtacaatcagaagaccaagcagaaactgccgaaattcaagccgctctacaagcaagtcctgtccgatagggaaagcctctccttctacggcgagggctataccagcgacgaggaggtgctggaagtcttccgcaacacactgaataagaatagcgagattttctcctccatcaagaagctcgagaagctctttaagaactttgacgagtacagctccgccgggattttcgtgaagaacgggccggcgatcagcaccatctccaaggacatctttggcgagtggaacgtcatcagggacaagtggaacgccgagtacgacgacatccacctgaagaagaaggcggtggtgaccgagaagtatgaggacgatcgcaggaagtccttcaaaaaaatcggctccttcagcctcgaacagctccaggagtatgccgatgcggatctgtccgtcgtcgagaagctgaaggaaatcatcattcagaaggtcgacgagatctataaagtgtacgggtccagcgagaagctgttcgacgccgactttgtgctcgagaagtccctcaaaaagaatgacgccgtggtggccattatgaaagacctgctcgactccgtgaagtccttcgaaaattacattaaagcgttctttggggaggggaaggaaactaacagggatgagtccttctatggcgactttgtcctcgcgtacgacatcctgctgaaggtcgaccacatttacgacgcgatccgcaactacgtgacacagaagccgtactccaaagacaagttcaagctgtacttccagaacccgcaatttatggggggctgggacaaggataaagagacagactaccgcgcgacaattctccgctatggctccaaatactatctggccatcatggacaagaagtacgcgaagtgcctgcagaagatcgacaaagacgacgtcaatggcaactatgaaaagatcaactacaagctgctgccgggcccgaacaagatgctcccgaaggtgttcttcagcaagaagtggatggcctactacaatccaagcgaggatattcagaaaatctataaaaacgggaccttcaagaagggggacatgtttaacctcaacgactgccacaagctcattgatttcttcaaggatagcatttcccgctacccgaaatggtccaatgcgtacgattttaacttctccgagacagaaaagtacaaagacatcgcgggcttttacagggaggtggaggagcaagggtataaagtttcttttgaatccgcgagcaagaaggaagtcgacaagctcgtcgaggagggcaagctctacatgttccaaatttataacaaggacttttccgacaagagccatgggaccccaaacctccacaccatgtacttcaaactgctctttgacgagaacaaccacgggcaaatcaggctgagcggcggcgccgaattattcatgcgcagggcctccctcaagaaggaagagctggtcgtccatccagccaattccccgatcgcgaacaagaacccggacaatccgaaaaagaccaccaccctgtcctacgacgtctacaaggacaaacgcttcagcgaagaccagtacgaattacacatcccaattgcgattaataagtgcccaaagaatatcttcaaaattaatacagaggtcagggtgctgctcaaacacgacgacaatccgtatgtcatcggcattgccaggggcgagcgcaatctgctctatatcgtggtcgtggatgggaagggcaatattgtggagcagtactccctgaacgagattatcaacaacttcaatgggattaggattaagaccgactatcacagcctgctcgacaagaaagaaaaagagaggtttgaggcccgccaaaactggacctccattgagaatatcaaagaattaaaggccggctatatttcccaagtcgtccacaagatctgcgagctggtggagaaatatgacgccgtgattgcgctcgaagacttaaattctgggttcaagaactcccgcgtgaaggtggaaaaacaggtgtatcagaaattcgagaaaatgctgatcgacaaactcaattatatggtggataagaagtccaacccgtgtgccacagggggcgcgctgaagggctatcagatcaccaacaagttcgagagcttcaagagcatgagcacccagaacgggtttattttctacatcccggcgtggctcacctccaagattgacccgagcaccggcttcgtgaacctcctgaagacaaagtatacctccattgccgacagcaagaagtttatctcctccttcgaccgcattatgtatgtgccggaggaggacctcttcgagttcgccctcgactacaaaaacttcagccgcacagatgcggattacatcaagaagtggaagctgtactcctacgggaacaggatccgcatcttcaggaatccaaaaaaaaataacgtctttgactgggaggaagtgtgcctgacatccgcctacaaggaactgttcaataaatacggcatcaattaccagcagggcgacattcgcgccctcctctgtgagcagtccgacaaagcgttttactccagcttcatggccctcatgtccctgatgctccaaatgaggaatagcatcacagggcgcaccgacgtcgacttcctcatcagcccggtgaagaactccgacgggatcttttacgactcccgcaactatgaggcgcaagagaatgcgatcctcccgaagaacgccgatgcgaacggggcctataatatcgccaggaaagtgctctgggccatcgggcagttcaaaaaggcggaggatgagaagctcgacaaggtgaaaattgccatttccaacaaggagtggctggagtacgcgcagacctccgtgaagcactctggtggttcttctggtggttctagcggcagcgagactcccgggacctcagagtccgccacacccgaaagttctggtggttcttctggtggttcttctgaggttgaattttcacatgagtattggatgagacacgctcttaccttggctaagagagcaagggatgagagagaagttccagtgggagcagttcttgtgttgaacaatagagttattggagagggttggaacaggtaagtatcaaggttacaagacaggtttaaggagaccaatagaaactgggcttgtcgagacagagaagactcttgcgtttctgataggcacctattggtcttactgacatccactttgcctttctctccacagggctattggacttcatgatcctactgctcacgcagaaattatggcacttagacaaggtggacttgttatgcagaactacaggcttatcgatgctactctttatgttacattcgagccatgtgtgatgtgcgctggagcaatgattcattctaggattggaagggttgtgttcggtgttagaaactctaagaggggagctgcaggttcacttatgaacgttttgaattatcctggtatgaaccacagagtggagattactgaaggtattttggcagatgaatgtgctgcacttttgtgcgatttttacagaatgcctagacaagtgttcaacgctcaaaagaaggcacaatcttctattaactctggcggctcaaaaagaaccgccgacggcagcgaattcgagcccaagaagaagaggaaagtcggaagcggagctactaacttcagcctgctgaagcaggctggagacgtggaggagaaccctggacctatggtgagcaagggcgaggagctgttcaccggggtggtgcccatcctggtcgagctggacggcgacgtaaacggccacaagttcagcgtgtccggcgagggcgagggcgatgccacctacggcaagctgaccctgaagttcatctgcaccaccggcaagctgcccgtgccctggcccaccctcgtgaccaccctgacctatggagtgcagtgcttcagccgctaccccgaccacatgaagcagcacgacttcttcaagtccgccatgcccgaaggctacgtccaggagcgcaccatcttcttcaaggacgacggcaactacaagacccgcgccgaggtgaagttcgagggcgacaccctggtgaaccgcatcgagctgaagggcatcgacttcaaggaggacggcaacatcctggggcacaagctggagtacaactacaacagccacaacgtctatatcatggccgacaagcagaagaacggcatcaaggtgaacttcaagatccgccacaacatcgaggacggcagcgtgcagctcgccgaccactaccagcagaacacccccatcggcgacggccccgtgctgctgcccgacaaccactacctgagcacccagtccgccctgagcaaagaccccaacgagaagcgcgatcacatggtcctgctggagttcgtgaccgccgccgggatcactctcggcatggacgagctgtacaagtctggtggttctcccaagaagaagaggaaagtctaaccggtcatcatcaccatcaccattgagtttaaacccgctgatcagcctcgactgtgccttctagttgccagccatctgttgtttgcccctcccccgtgccttccttgaccctggaaggtgccactcccactgtcctttcctaataaaatgaggaaattgcatcgcattgtctgagtaggtgtcattctattctggggggtggggtggggcaggacagcaagggggaggattgggaagacaatagcaggcatgctggggatgcggtgggctctatggcttctgaggcggaaagaaccagctggggctcgataccgtcgacctctagctagagcttggcgtaatcatggtcatagctgtttcctgtgtgaaattgttatccgctcacaattccacacaacatacgagccggaagcataaagtgtaaagcctagggtgcctaatgagtgagctaactcacattaattgcgttgcgctcactgcccgctttccagtcgggaaacctgtcgtgccagctgcattaatgaatcggccaacgcgcggggagaggcggtttgcgtattgggcgctcttccgcttcctcgctcactgactcgctgcgctcggtcgttcggctgcggcgagcggtatcagctcactcaaaggcggtaatacggttatccacagaatcaggggataacgcaggaaagaacatgtgagcaaaaggccagcaaaaggccaggaaccgtaaaaaggccgcgttgctggcgtttttccataggctccgcccccctgacgagcatcacaaaaatcgacgctcaagtcagaggtggcgaaacccgacaggactataaagataccaggcgtttccccctggaagctccctcgtgcgctctcctgttccgaccctgccgcttaccggatacctgtccgcctttctcccttcgggaagcgtggcgctttctcatagctcacgctgtaggtatctcagttcggtgtaggtcgttcgctccaagctgggctgtgtgcacgaaccccccgttcagcccgaccgctgcgccttatccggtaactatcgtcttgagtccaacccggtaagacacgacttatcgccactggcagcagccactggtaacaggattagcagagcgaggtatgtaggcggtgctacagagttcttgaagtggtggcctaactacggctacactagaagaacagtatttggtatctgcgctctgctgaagccagttaccttcggaaaaagagttggtagctcttgatccggcaaacaaaccaccgctggtagcggtggtttttttgtttgcaagcagcagattacgcgcagaaaaaaaggatctcaagaagatcctttgatcttttctacggggtctgacactcagtggaacgaaaactcacgttaagggattttggtcatgagattatcaaaaaggatcttcacctagatccttttaaattaaaaatgaagttttaaatcaatctaaagtatatatgagtaaacttggtctgacagttaccaatgcttaatcagtgaggcacctatctcagcgatctgtctatttcgttcatccatagttgcctgactccccgtcgtgtagataactacgatacgggagggcttaccatctggccccagtgctgcaatgataccgcgagacccacgctcaccggctccagatttatcagcaataaaccagccagccggaagggccgagcgcagaagtggtcctgcaactttatccgcctccatccagtctattaattgttgccgggaagctagagtaagtagttcgccagttaatagtttgcgcaacgttgttgccattgctacaggcatcgtggtgtcacgctcgtcgtttggtatggcttcattcagctccggttcccaacgatcaaggcgagttacatgatcccccatgttgtgcaaaaaagcggttagctccttcggtcctccgatcgttgtcagaagtaagttggccgcagtgttatcactcatggttatggcagcactgcataattctcttactgtcatgccatccgtaagatgcttttctgtgactggtgagtactcaaccaagtcattctgagaatagtgtatgcggcgaccgagttgctcttgcccggcgtcaatacgggataataccgcgccacatagcagaactttaaaagtgctcatcattggaaaacgttcttcggggcgaaaactctcaaggatcttaccgctgttgagatccagttcgatgtaacccactcgtgcacccaactgatcttcagcatcttttactttcaccagcgtttctgggtgagcaaaaacaggaaggcaaaatgccgcaaaaaagggaataagggcgacacggaaatgttgaatactcatactcttcctttttcaatattattgaagcatttatcagggttattgtctcatgagcggatacatatttgaatgtatttagaaaaataaacaaataggggttccgcgcacatttccccgaaaagtgccacctgacgtcgacggatcgggagatcgatctcccgatcccctagggtcgactctcagtacaatctgctctgatgccgcatagttaagccagtatctgctccctgcttgtgtgttggaggtcgctgagtagtgcgcgagcaaaatttaagctacaacaaggcaaggcttgaccgacaattgcatgaagaatctgcttagggttaggcgttttgcgctgcttcgcgatgtacgggccagatatacgcgtt

SEQ ID NO: 534 - DNA, 8613 bp, synthetic construct
  source 1..8613: mol_type = other DNA
gacattgattattgactagttattaatagtaatcaattacggggtcattagttcatagcccatatatggagttccgcgttacataacttacggtaaatggcccgcctggctgaccgcccaacgacccccgcccattgacgtcaataatgacgtatgttcccatagtaacgccaatagggactttccattgacgtcaatgggtggagtatttacggtaaactgcccacttggcagtacatcaagtgtatcatatgccaagtacgccccctattgacgtcaatgacggtaaatggcccgcctggcattatgcccagtacatgaccttatgggactttcctacttggcagtacatctacgtattagtcatcgctattaccatggtgatgcggttttggcagtacatcaatgggcgtggatagcggtttgactcacggggatttccaagtctccaccccattgacgtcaatgggagtttgttttggcaccaaaatcaacgggactttccaaaatgtcgtaacaactccgccccattgacgcaaatgggcggtaggcgtgtacggtgggaggtctatataagcagagctggtttagtgaaccgtcagatccgctagagatccgcggccgctaatacgactcactatagggagagccgccaccatgaaacggacagccgacggaagcgagttcgagtcaccaaagaagaagcggaaagtctctgaggttgaattttcacatgagtattggatgagacacgctcttaccttggctaagagagcaagggatgagagagaagttccagtgggagcagttcttgtgttgaacaatagagttattggagagggttggaacagggctattggacttcatgatcctactgctcacgcagaaattatggcacttagacaaggtggacttgttatgcagaactacaggcttatcgatgctactctttatgttacattcgagccatgtgtgatgtgcgctggagcaatgattcattctaggattggaagggttgtgttcggtgttagaaactctaagaggggagctgcaggttcacttatgaacgttttgaattatcctggtatgaaccacagagtggagattactgaaggtattttggcagatgaatgtgctgcacttttgtgcgatttttacagaatgcctagacaagtgttcaacgctcaaaagaaggcacaatcttctattaactctggaggatctagcggaggatcctctggcagcgagacaccaggaacaagcgagtcagcaacaccagagagcagtggcggcagcagcggcggcagctccaagctggagaagtttacaaactgttacagcctctccaaaaccctcaggtttaaagcgatcccggtgggcaagacccaggagaacatcgacaacaagaggctcctggtggaagacgagaagcgcgccgaagactacaagggcgtgaagaagctgctcgataggtactacctcagctttattaacgacgtgctgcacagcatcaaactcaagaatctcaacaactacatctccctcttccgcaaaaagacccgcaccgagaaggagaacaaggagctggagaacctggagatcaacctccgcaaggaaatcgccaaagcgttcaagggcaatgaagggtacaagagcctcttcaagaaagacatcatcgaaactatcctcccagagtttctcgatgacaaggacgagatcgcgctggtgaactcctttaacgggttcacaaccgcgtttaccggcttctttgataacagggaaaatatgttctccgaggaggccaagtccaccagcatcgccttcaggtgtatcaacgagaacctcacccgctacatttccaatatggacattttcgagaaggtggatgcgatcttcgataagcacgaggtgcaggagatcaaagagaagattctcaattccgattatgacgtcgaggatttcttcgaaggggagttctttaattttgtgctcacacaagagggcattgacgtgtacaacgcgattatcgggggcttcgtcacagagtccggggagaagattaaggggctgaatgagtacatcaatctgtacaatcagaagaccaagcagaaactgccgaaattcaagccgctctacaagcaagtcctgtccgatagggaaagcctctccttctacggcgagggctataccagcgacgaggaggtgctggaagtcttccgcaacacactgaataagaatagcgagattttctcctccatcaagaagctcgagaagctctttaagaactttgacgagtacagctccgccgggattttcgtgaagaacgggccggcgatcagcaccatctccaaggacatctttggcgagtggaacgtcatcagggacaagtggaacgccgagtacgacgacatccacctgaagaagaaggcggtggtgaccgagaagtatgaggacgatcgcaggaagtccttcaaaaaaatcggctccttcagcctcgaacagctccaggagtatgccgatgcggatctgtccgtcgtcgagaagctgaaggaaatcatcattcagaaggtcgacgagatctataaagtgtacgggtccagcgagaagctgttcgacgccgactttgtgctcgagaagtccctcaaaaagaatgacgccgtggtggccattatgaaagacctgctcgactccgtgaagtccttcgaaaattacattaaagcgttctttggggaggggaaggaaactaacagggatgagtccttctatggcgactttgtcctcgcgtacgacatcctgctgaaggtcgaccacatttacgacgcgatccgcaactacgtgacacagaagccgtactccaaagacaagttcaagctgtacttccagaacccgcaatttatggggggctgggacaaggataaagagacagactaccgcgcgacaattctccgctatggctccaaatactatctggccatcatggacaagaagtacgcgaagtgcctgcagaagatcgacaaagacgacgtcaatggcaactatgaaaagatcaactacaagctgctgccgggcccgaacaagatgctcccgaaggtgttcttcagcaagaagtggatggcctactacaatccaagcgaggatattcagaaaatctataaaaacgggaccttcaagaagggggacatgtttaacctcaacgactgccacaagctcattgatttcttcaaggatagcatttcccgctacccgaaatggtccaatgcgtacgattttaacttctccgagacagaaaagtacaaagacatcgcgggcttttacagggaggtggaggagcaagggtataaagtttcttttgaatccgcgagcaagaaggaagtcgacaagctcgtcgaggagggcaagctctacatgttccaaatttataacaaggacttttccgacaagagccatgggaccccaaacctccacaccatgtacttcaaactgctctttgacgagaacaaccacgggcaaatcaggctgagcggcggcgccgaattattcatgcgcagggcctccctcaagaaggaagagctggtcgtccatccagccaattccccgatcgcgaacaagaacccggacaatccgaaaaagaccaccaccctgtcctacgacgtctacaaggacaaacgcttcagcgaagaccagtacgaattacacatcccaattgcgattaataagtgcccaaagaatatcttcaaaattaatacagaggtcagggtgctgctcaaacacgacgacaatccgtatgtcatcggcattgccaggggcgagcgcaatctgctctatatcgtggtcgtggatgggaagggcaatattgtggagcagtactccctgaacgagattatcaacaacttcaatgggattaggattaagaccgactatcacagcctgctcgacaagaaagaaaaagagaggtttgaggcccgccaaaactggacctccattgagaatatcaaagaattaaaggccggctatatttcccaagtcgtccacaagatctgcgagctggtggagaaatatgacgccgtgattgcgctcgaagacttaaattctgggttcaagaactcccgcgtgaaggtggaaaaacaggtgtatcagaaattcgagaaaatgctgatcgacaaactcaattatatggtggataagaagtccaacccgtgtgccacagggggcgcgctgaagggctatcagatcaccaacaagttcgagagcttcaagagcatgagcacccagaacgggtttattttctacatcccggcgtggctcacctccaagattgacccgagcaccggcttcgtgaacctcctgaagacaaagtatacctccattgccgacagcaagaagtttatctcctccttcgaccgcattatgtatgtgccggaggaggacctcttcgagttcgccctcgactacaaaaacttcagccgcacagatgcggattacatcaagaagtggaagctgtactcctacgggaacaggatccgcatcttcaggaatccaaaaaaaaataacgtctttgactgggaggaagtgtgcctgacatccgcctacaaggaactgttcaataaatacggcatcaattaccagcagggcgacattcgcgccctcctctgtgagcagtccgacaaagcgttttactccagcttcatggccctcatgtccctgatgctccaaatgaggaatagcatcacagggcgcaccgacgtcgacttcctcatcagcccggtgaagaactccgacgggatcttttacgactcccgcaactatgaggcgcaagagaatgcgatcctcccgaagaacgccgatgcgaacggggcctataatatcgccaggaaagtgctctgggccatcgggcagttcaaaaaggcggaggatgagaagctcgacaaggtgaaaattgccatttccaacaaggagtggctggagtacgcgcagacctccgtgaagcactctggcggctcaaaaagaaccgccgacggcagcgaattcgagcccaagaagaagaggaaagtcggaagcggagctactaacttcagcctgctgaagcaggctggagacgtggaggagaaccctggacctatggtgagcaagggcgaggagctgttcaccggggtggtgcccatcctggtcgagctggacggcgacgtaaacggccacaagttcagcgtgtccggcgagggcgagggcgatgccacctacggcaagctgaccctgaagttcatctgcaccaccggcaagctgcccgtgccctggcccaccctcgtgaccaccctgacctatggagtgcagtgcttcagccgctaccccgaccacatgaagcagcacgacttcttcaagtccgccatgcccgaaggctacgtccaggagcgcaccatcttcttcaaggacgacggcaactacaagacccgcgccgaggtgaagttcgagggcgacaccctggtgaaccgcatcgagctgaagggcatcgacttcaaggaggacggcaacatcctggggcacaagctggagtacaactacaacagccacaacgtctatatcatggccgacaagcagaagaacggcatcaaggtgaacttcaagatccgccacaacatcgaggacggcagcgtgcagctcgccgaccactaccagcagaacacccccatcggcgacggccccgtgctgctgcccgacaaccactacctgagcacccagtccgccctgagcaaagaccccaacgagaagcgcgatcacatggtcctgctggagttcgtgaccgccgccgggatcactctcggcatggacgagctgtacaagtctggtggttctcccaagaagaagaggaaagtctaaccggtcatcatcaccatcaccattgagtttaaacccgctgatcagcctcgactgtgccttctagttgccagccatctgttgtttgcccctcccccgtgccttccttgaccctggaaggtgccactcccactgtcctttcctaataaaatgaggaaattgcatcgcattgtctgagtaggtgtcattctattctggggggtggggtggggcaggacagcaagggggaggattgggaagacaatagcaggcatgctggggatgcggtgggctctatggcttctgaggcggaaagaaccagctggggctcgataccgtcgacctctagctagagcttggcgtaatcatggtcatagctgtttcctgtgtgaaattgttatccgctcacaattccacacaacatacgagccggaagcataaagtgtaaagcctagggtgcctaatgagtgagctaactcacattaattgcgttgcgctcactgcccgctttccagtcgggaaacctgtcgtgccagctgcattaatgaatcggccaacgcgcggggagaggcggtttgcgtattgggcgctcttccgcttcctcgctcactgactcgctgcgctcggtcgttcggctgcggcgagcggtatcagctcactcaaaggcggtaatacggttatccacagaatcaggggataacgcaggaaagaacatgtgagcaaaaggccagcaaaaggccaggaaccgtaaaaaggccgcgttgctggcgtttttccataggctccgcccccctgacgagcatcacaaaaatcgacgctcaagtcagaggtggcgaaacccgacaggactataaagataccaggcgtttccccctggaagctccctcgtgcgctctcctgttccgaccctgccgcttaccggatacctgtccgcctttctcccttcgggaagcgtggcgctttctcatagctcacgctgtaggtatctcagttcggtgtaggtcgttcgctccaagctgggctgtgtgcacgaaccccccgttcagcccgaccgctgcgccttatccggtaactatcgtcttgagtccaacccggtaagacacgacttatcgccactggcagcagccactggtaacaggattagcagagcgaggtatgtaggcggtgctacagagttcttgaagtggtggcctaactacggctacactagaagaacagtatttggtatctgcgctctgctgaagccagttaccttcggaaaaagagttggtagctcttgatccggcaaacaaaccaccgctggtagcggtggtttttttgtttgcaagcagcagattacgcgcagaaaaaaaggatctcaagaagatcctttgatcttttctacggggtctgacactcagtggaacgaaaactcacgttaagggattttggtcatgagattatcaaaaaggatcttcacctagatccttttaaattaaaaatgaagttttaaatcaatctaaagtatatatgagtaaacttggtctgacagttaccaatgcttaatcagtgaggcacctatctcagcgatctgtctatttcgttcatccatagttgcctgactccccgtcgtgtagataactacgatacgggagggcttaccatctggccccagtgctgcaatgataccgcgagacccacgctcaccggctccagatttatcagcaataaaccagccagccggaagggccgagcgcagaagtggtcctgcaactttatccgcctccatccagtctattaattgttgccgggaagctagagtaagtagttcgccagttaatagtttgcgcaacgttgttgccattgctacaggcatcgtggtgtcacgctcgtcgtttggtatggcttcattcagctccggttcccaacgatcaaggcgagttacatgatcccccatgttgtgcaaaaaagcggttagctccttcggtcctccgatcgttgtcagaagtaagttggccgcagtgttatcactcatggttatggcagcactgcataattctcttactgtcatgccatccgtaagatgcttttctgtgactggtgagtactcaaccaagtcattctgagaatagtgtatgcggcgaccgagttgctcttgcccggcgtcaatacgggataataccgcgccacatagcagaactttaaaagtgctcatcattggaaaacgttcttcggggcgaaaactctcaaggatcttaccgctgttgagatccagttcgatgtaacccactcgtgcacccaactgatcttcagcatcttttactttcaccagcgtttctgggtgagcaaaaacaggaaggcaaaatgccgcaaaaaagggaataagggcgacacggaaatgttgaatactcatactcttcctttttcaatattattgaagcatttatcagggttattgtctcatgagcggatacatatttgaatgtatttagaaaaataaacaaataggggttccgcgcacatttccccgaaaagtgccacctgacgtcgacggatcgggagatcgatctcccgatcccctagggtcgactctcagtacaatctgctctgatgccgcatagttaagccagtatctgctccctgcttgtgtgttggaggtcgctgagtagtgcgcgagcaaaatttaagctacaacaaggcaaggcttgaccgacaattgcatgaagaatctgcttagggttaggcgttttgcgctgcttcgcgatgtacgggccagatatacgcgtt

SEQ ID NO: 535 - DNA, 7794 bp, synthetic construct
  source 1..7794: mol_type = other DNA
tgcacccaactgatcttcagcatcttttactttcaccagcgtttctgggtgagcaaaaacaggaaggcaaaatgccgcaaaaaagggaataagggcgacacggaaatgttgaatactcatactcttcctttttcaatattattgaagcatttatcagggttattgtctcatgagcggatacatatttgaatgtatttagaaaaataaacaaataggggttccgcgcacatttccccgaaaagtgccacctgacgtcgacggatcgggagatcgatctcccgatcccctagggtcgactctcagtacaatctgctctgatgccgcatagttaagccagtatctgctccctgcttgtgtgttggaggtcgctgagtagtgcgcgagcaaaatttaagctacaacaaggcaaggcttgaccgacaattgcatgaagaatctgcttagggttaggcgttttgcgctgcttcgcgatgtacgggccagatatacgcgttgacattgattattgactagttattaatagtaatcaattacggggtcattagttcatagcccatatatggagttccgcgttacataacttacggtaaatggcccgcctggctgaccgcccaacgacccccgcccattgacgtcaataatgacgtatgttcccatagtaacgccaatagggactttccattgacgtcaatgggtggagtatttacggtaaactgcccacttggcagtacatcaagtgtatcatatgccaagtacgccccctattgacgtcaatgacggtaaatggcccgcctggcattatgcccagtacatgaccttatgggactttcctacttggcagtacatctacgtattagtcatcgctattaccatggtgatgcggttttggcagtacatcaatgggcgtggatagcggtttgactcacggggatttccaagtctccaccccattgacgtcaatgggagtttgttttggcaccaaaatcaacgggactttccaaaatgtcgtaacaactccgccccattgacgcaaatgggcggtaggcgtgtacggtgggaggtctatataagcagagctggtttagtgaaccgtcagatccgctagagatccgcggccgctaatacgactcactatagggagagccgccaccatgaaacggacagccgacggaagcgagttcgagtcaccaaagaagaagcggaaagtctctgaggtggagttttcccacgagtactggatgagacatgccctgaccctggccaagagggcacgggatgagagggaggtgcctgtgggagccgtgctggtgctgaacaatagagtgatcggcgagggctggaacagagccatcggcctgcacgacccaacagcccatgccgaaattatggccctgagacagggcggcctggtcatgcagaactacagactgattgacgccaccctgtacgtgacattcgagccttgcgtgatgtgcgccggcgccatgatccactctaggatcggccgcgtggtgtttggcgtgaggaactcaaaaagaggcgccgcaggctccctgatgaacgtgctgaactaccccggcatgaatcaccgcgtcgaaattaccgagggaatcctggcagatgaatgtgccgccctgctgtgcgatttctatcggatgcctagacaggtgttcaatgctcagaagaaggcccagagctccatcaactccggaggatctagcggaggatcctctggcagcgagacaccaggaacaagcgagtcagcaacaccagagagcagtggcggcagcagcggcggcagcagcaagctggagaagtttacaaactgctactccctgtctaagaccctgaggttcaaggccatccctgtgggcaagacccaggagaacatcgacaataagcggctgctggtggaggacgagaagagagccgaggattataagggcgtgaagaagctgctggatcgctactatctgtcttttatcaacgacgtgctgcacagcatcaagctgaagaatctgaacaattacatcagcctgttccggaagaaaaccagaaccgagaaggagaataaggagctggagaacctggagatcaatctgcggaaggagatcgccaaggccttcaagggcaacgagggctacaagtccctgtttaagaaggatatcatcgagacaatcctgccagagttcctggacgataaggacgagatcgccctggtgaacagcttcaatggctttaccacagccttcaccggcttctttgataacagagagaatatgttttccgaggaggccaagagcacatccatcgccttcaggtgtatcaacgagaatctgacccgctacatctctaatatggacatcttcgagaaggtggacgccatctttgataagcacgaggtgcaggagatcaaggagaagatcctgaacagcgactatgatgtggaggatttctttgagggcgagttctttaactttgtgctgacacaggagggcatcgacgtgtataacgccatcatcggcggcttcgtgaccgagagcggcgagaagatcaagggcctgaacgagtacatcaacctgtataatcagaaaaccaagcagaagctgcctaagtttaagccactgtataagcaggtgctgagcgatcgggagtctctgagcttctacggcgagggctatacatccgatgaggaggtgctggaggtgtttagaaacaccctgaacaagaacagcgagatcttcagctccatcaagaagctggagaagctgttcaagaattttgacgagtactctagcgccggcatctttgtgaagaacggccccgccatcagcacaatctccaaggatatcttcggcgagtggaacgtgatccgggacaagtggaatgccgagtatgacgatatccacctgaagaagaaggccgtggtgaccgagaagtacgaggacgatcggagaaagtccttcaagaagatcggctccttttctctggagcagctgcaggagtacgccgacgccgatctgtctgtggtggagaagctgaaggagatcatcatccagaaggtggatgagatctacaaggtgtatggctcctctgagaagctgttcgacgccgattttgtgctggagaagagcctgaagaagaacgacgccgtggtggccatcatgaaggacctgctggattctgtgaagagcttcgagaattacatcaaggccttctttggcgagggcaaggagacaaacagggacgagtccttctatggcgattttgtgctggcctacgacatcctgctgaaggtggaccacatctacgatgccatccgcaattatgtgacccagaagccctactctaaggataagttcaagctgtattttcagaaccctcagttcatgggcggctgggacaaggataaggagacagactatcgggccaccatcctgagatacggctccaagtactatctggccatcatggataagaagtacgccaagtgcctgcagaagatcgacaaggacgatgtgaacggcaattacgagaagatcaactataagctgctgcccggccctaataagatgctgccaaaggtgttcttttctaagaagtggatggcctactataaccccagcgaggacatccagaagatctacaagaatggcacattcaagaagggcgatatgtttaacctgaatgactgtcacaagctgatcgacttctttaaggatagcatctcccggtatccaaagtggtccaatgcctacgatttcaacttttctgagacagagaagtataaggacatcgccggcttttacagagaggtggaggagcagggctataaggtgagcttcgagtctgccagcaagaaggaggtggataagctggtggaggagggcaagctgtatatgttccagatctataacaaggacttttccgataagtctcacggcacacccaatctgcacaccatgtacttcaagctgctgtttgacgagaacaatcacggacagatcaggctgagcggaggagcagagctgttcatgaggcgcgcctccctgaagaaggaggagctggtggtgcacccagccaactcccctatcgccaacaagaatccagataatcccaagaaaaccacaaccctgtcctacgacgtgtataaggataagaggttttctgaggaccagtacgagctgcacatcccaatcgccatcaataagtgccccaagaacatcttcaagatcaatacagaggtgcgcgtgctgctgaagcacgacgataacccctatgtgatcggcatcgccaggggtgagcgcaatctgctgtatatcgtggtggtggacggcaagggcaacatcgtggagcagtattccctgaacgagatcatcaacaacttcaacggcatcaggatcaagacagattaccactctctgctggacaagaaggagaaggagaggttcgaggcccgccagaactggacctccatcgagaatatcaaggagctgaaggccggctatatctctcaggtggtgcacaagatctgcgagctggtggagaagtacgatgccgtgatcgccctggaggacctgaactctggctttaagaatagccgcgtgaaggtggagaagcaggtgtatcagaagttcgagaagatgctgatcgataagctgaactacatggtggacaagaagtctaatccttgtgcaacaggcggcgccctgaagggctatcagatcaccaataagttcgagagctttaagtccatgtctacccagaacggcttcatcttttacatccctgcctggctgacatccaagatcgatccatctaccggctttgtgaacctgctgaaaaccaagtataccagcatcgccgattccaagaagttcatcagctcctttgacaggatcatgtacgtgcccgaggaggatctgttcgagtttgccctggactataagaacttctctcgcacagacgccgattacatcaagaagtggaagctgtactcctacggcaaccggatcagaatcttccggaatcctaagaagaacaacgtgttcgactgggaggaggtgtgcctgaccagcgcctataaggagctgttcaacaagtacggcatcaattatcagcagggcgatatcagagccctgctgtgcgagcagtccgacaaggccttctactctagctttatggccctgatgagcctgatgctgcagatgcggaacagcatcacaggccgcaccgacgtggattttctgatcagccctgtgaagaactccgacggcatcttctacgatagccggaactatgaggcccaggagaatgccatcctgccaaagaacgccgacgccaatggcgcctataacatcgccagaaaggtgctgtgggccatcggccagttcaagaaggccgaggacgagaagctggataaggtgaagatcgccatctctaacaaggagtggctggagtacgcccagaccagcgtgaagtctggcggctcaaaaagaaccgccgacggcagcgaattcgagcccaagaagaagaggaaagtctaaccggtcatcatcaccatcaccattgagtttaaacccgctgatcagcctcgactgtgccttctagttgccagccatctgttgtttgcccctcccccgtgccttccttgaccctggaaggtgccactcccactgtcctttcctaataaaatgaggaaattgcatcgcattgtctgagtaggtgtcattctattctggggggtggggtggggcaggacagcaagggggaggattgggaagacaatagcaggcatgctggggatgcggtgggctctatggcttctgaggcggaaagaaccagctggggctcgataccgtcgacctctagctagagcttggcgtaatcatggtcatagctgtttcctgtgtgaaattgttatccgctcacaattccacacaacatacgagccggaagcataaagtgtaaagcctagggtgcctaatgagtgagctaactcacattaattgcgttgcgctcactgcccgctttccagtcgggaaacctgtcgtgccagctgcattaatgaatcggccaacgcgcggggagaggcggtttgcgtattgggcgctcttccgcttcctcgctcactgactcgctgcgctcggtcgttcggctgcggcgagcggtatcagctcactcaaaggcggtaatacggttatccacagaatcaggggataacgcaggaaagaacatgtgagcaaaaggccagcaaaaggccaggaaccgtaaaaaggccgcgttgctggcgtttttccataggctccgcccccctgacgagcatcacaaaaatcgacgctcaagtcagaggtggcgaaacccgacaggactataaagataccaggcgtttccccctggaagctccctcgtgcgctctcctgttccgaccctgccgcttaccggatacctgtccgcctttctcccttcgggaagcgtggcgctttctcatagctcacgctgtaggtatctcagttcggtgtaggtcgttcgctccaagctgggctgtgtgcacgaaccccccgttcagcccgaccgctgcgccttatccggtaactatcgtcttgagtccaacccggtaagacacgacttatcgccactggcagcagccactggtaacaggattagcagagcgaggtatgtaggcggtgctacagagttcttgaagtggtggcctaactacggctacactagaagaacagtatttggtatctgcgctctgctgaagccagttaccttcggaaaaagagttggtagctcttgatccggcaaacaaaccaccgctggtagcggtggtttttttgtttgcaagcagcagattacgcgcagaaaaaaaggatctcaagaagatcctttgatcttttctacggggtctgacactcagtggaacgaaaactcacgttaagggattttggtcatgagattatcaaaaaggatcttcacctagatccttttaaattaaaaatgaagttttaaatcaatctaaagtatatatgagtaaacttggtctgacagttaccaatgcttaatcagtgaggcacctatctcagcgatctgtctatttcgttcatccatagttgcctgactccccgtcgtgtagataactacgatacgggagggcttaccatctggccccagtgctgcaatgataccgcgagacccacgctcaccggctccagatttatcagcaataaaccagccagccggaagggccgagcgcagaagtggtcctgcaactttatccgcctccatccagtctattaattgttgccgggaagctagagtaagtagttcgccagttaatagtttgcgcaacgttgttgccattgctacaggcatcgtggtgtcacgctcgtcgtttggtatggcttcattcagctccggttcccaacgatcaaggcgagttacatgatcccccatgttgtgcaaaaaagcggttagctccttcggtcctccgatcgttgtcagaagtaagttggccgcagtgttatcactcatggttatggcagcactgcataattctcttactgtcatgccatccgtaagatgcttttctgtgactggtgagtactcaaccaagtcattctgagaatagtgtatgcggcgaccgagttgctcttgcccggcgtcaatacgggataataccgcgccacatagcagaactttaaaagtgctcatcattggaaaacgttcttcggggcgaaaactctcaaggatcttaccgctgttgagatccagttcgatgtaacccactcg

SEQ ID NO: 536 - DNA, 9045 bp, synthetic construct
  source 1..9045: mol_type = other DNA
gacattgattattgactagttattaatagtaatcaattacggggtcattagttcatagcccatatatggagttccgcgttacataacttacggtaaatggcccgcctggctgaccgcccaacgacccccgcccattgacgtcaataatgacgtatgttcccatagtaacgccaatagggactttccattgacgtcaatgggtggagtatttacggtaaactgcccacttggcagtacatcaagtgtatcatatgccaagtacgccccctattgacgtcaatgacggtaaatggcccgcctggcattatgcccagtacatgaccttatgggactttcctacttggcagtacatctacgtattagtcatcgctattaccatggtgatgcggttttggcagtacatcaatgggcgtggatagcggtttgactcacggggatttccaagtctccaccccattgacgtcaatgggagtttgttttggcaccaaaatcaacgggactttccaaaatgtcgtaacaactccgccccattgacgcaaatgggcggtaggcgtgtacggtgggaggtctatataagcagagctggtttagtgaaccgtcagatccgctagagatccgcggccgctaatacgactcactatagggagagccgccaccatgaaacggacagccgacggaagcgagttcgagtcaccaaagaagaagcggaaagtctctgaggttgaattttcacatgagtattggatgagacacgctcttaccttggctaagagagcaagggatgagagagaagttccagtgggagcagttcttgtgttgaacaatagagttattggagagggttggaacagggctattggacttcatgatcctactgctcacgcagaaattatggcacttagacaaggtggacttgttatgcagaactacaggcttatcgatgctactctttatgttacattcgagccatgtgtgatgtgcgctggagcaatgattcattctaggattggaagggttgtgttcggtgttagaaactctaagaggggagctgcaggttcacttatgaacgttttgaattatcctggtatgaaccacagagtggagattactgaaggtattttggcagatgaatgtgctgcacttttgtgcgatttttacagaatgcctagacaagtgttcaacgctcaaaagaaggcacaatcttctattaactctggaggatctagcggaggatcctctggcagcgagacaccaggaacaagcgagtcagcaacaccagagagcagtggcggcagcagcggcggcagctccaagctggagaagtttacaaactgttacagcctctccaaaaccctcaggtttaaagcgatcccggtgggcaagacccaggagaacatcgacaacaagaggctcctggtggaagacgagaagcgcgccgaagactacaagggcgtgaagaagctgctcgataggtactacctcagctttattaacgacgtgctgcacagcatcaaactcaagaatctcaacaactacatctccctcttccgcaaaaagacccgcaccgagaaggagaacaaggagctggagaacctggagatcaacctccgcaaggaaatcgccaaagcgttcaagggcaatgaagggtacaagagcctcttcaagaaagacatcatcgaaactatcctcccagagtttctcgatgacaaggacgagatcgcgctggtgaactcctttaacgggttcacaaccgcgtttaccggcttctttgataacagggaaaatatgttctccgaggaggccaagtccaccagcatcgccttcaggtgtatcaacgagaacctcacccgctacatttccaatatggacattttcgagaaggtggatgcgatcttcgataagcacgaggtgcaggagatcaaagagaagattctcaattccgattatgacgtcgaggatttcttcgaaggggagttctttaattttgtgctcacacaagagggcattgacgtgtacaacgcgattatcgggggcttcgtcacagagtccggggagaagattaaggggctgaatgagtacatcaatctgtacaatcagaagaccaagcagaaactgccgaaattcaagccgctctacaagcaagtcctgtccgatagggaaagcctctccttctacggcgagaaccagaccacccagaagggacagaagaacagccgcgagagaatgaagcggatcgaagagggcatcaaagagctgggcagccagatcctgaaagaacaccccgtggaaaacacccagctgcagaacgagaagctgtacctgtactacctgcagaatgggcgggatatgtacgtggaccaggaactggacatcaaccggctgtccgactacgatgtggaccatatcgtgcctcagagctttctgaaggacgactccatcgacaacaaggtgctgaccagaagcgacaagaaccggggcaagagcgacaacgtgccctccgaagaggtcgtgaagaagatgaagaactactggcggcagctgctgaacgccaagctgattacccagagaaagttcgacaatctgaccaaggccgagagaggcggcctgagcgagggctataccagcgacgaggaggtgctggaagtcttccgcaacacactgaataagaatagcgagattttctcctccatcaagaagctcgagaagctctttaagaactttgacgagtacagctccgccgggattttcgtgaagaacgggccggcgatcagcaccatctccaaggacatctttggcgagtggaacgtcatcagggacaagtggaacgccgagtacgacgacatccacctgaagaagaaggcggtggtgaccgagaagtatgaggacgatcgcaggaagtccttcaaaaaaatcggctccttcagcctcgaacagctccaggagtatgccgatgcggatctgtccgtcgtcgagaagctgaaggaaatcatcattcagaaggtcgacgagatctataaagtgtacgggtccagcgagaagctgttcgacgccgactttgtgctcgagaagtccctcaaaaagaatgacgccgtggtggccattatgaaagacctgctcgactccgtgaagtccttcgaaaattacattaaagcgttctttggggaggggaaggaaactaacagggatgagtccttctatggcgactttgtcctcgcgtacgacatcctgctgaaggtcgaccacatttacgacgcgatccgcaactacgtgacacagaagccgtactccaaagacaagttcaagctgtacttccagaacccgcaatttatggggggctgggacaaggataaagagacagactaccgcgcgacaattctccgctatggctccaaatactatctggccatcatggacaagaagtacgcgaagtgcctgcagaagatcgacaaagacgacgtcaatggcaactatgaaaagatcaactacaagctgctgccgggcccgaacaagatgctcccgaaggtgttcttcagcaagaagtggatggcctactacaatccaagcgaggatattcagaaaatctataaaaacgggaccttcaagaagggggacatgtttaacctcaacgactgccacaagctcattgatttcttcaaggatagcatttcccgctacccgaaatggtccaatgcgtacgattttaacttctccgagacagaaaagtacaaagacatcgcgggcttttacagggaggtggaggagcaagggtataaagtttcttttgaatccgcgagcaagaaggaagtcgacaagctcgtcgaggagggcaagctctacatgttccaaatttataacaaggacttttccgacaagagccatgggaccccaaacctccacaccatgtacttcaaactgctctttgacgagaacaaccacgggcaaatcaggctgagcggcggcgccgaattattcatgcgcagggcctccctcaagaaggaagagctggtcgtccatccagccaattccccgatcgcgaacaagaacccggacaatccgaaaaagaccaccaccctgtcctacgacgtctacaaggacaaacgcttcagcgaagaccagtacgaattacacatcccaattgcgattaataagtgcccaaagaatatcttcaaaattaatacagaggtcagggtgctgctcaaacacgacgacaatccgtatgtcatcggcattgccaggggcgagcgcaatctgctctatatcgtggtcgtggatgggaagggcaatattgtggagcagtactccctgaacgagattatcaacaacttcaatgggattaggattaagaccgactatcacagcctgctcgacaagaaagaaaaagagaggtttgaggcccgccaaaactggacctccattgagaatatcaaagaattaaaggccggctatatttcccaagtcgtccacaagatctgcgagctggtggagaaatatgacgccgtgattgcgctcgaagacttaaattctgggttcaagaactcccgcgtgaaggtggaaaaacaggtgtatcagaaattcgagaaaatgctgatcgacaaactcaattatatggtggataagaagtccaacccgtgtgccacagggggcgcgctgaagggctatcagatcaccaacaagttcgagagcttcaagagcatgagcacccagaacgggtttattttctacatcccggcgtggctcacctccaagattgacccgagcaccggcttcgtgaacctcctgaagacaaagtatacctccattgccgacagcaagaagtttatctcctccttcgaccgcattatgtatgtgccggaggaggacctcttcgagttcgccctcgactacaaaaacttcagccgcacagatgcggattacatcaagaagtggaagctgtactcctacgggaacaggatccgcatcttcaggaatccaaaaaaaaataacgtctttgactgggaggaagtgtgcctgacatccgcctacaaggaactgttcaataaatacggcatcaattaccagcagggcgacattcgcgccctcctctgtgagcagtccgacaaagcgttttactccagcttcatggccctcatgtccctgatgctccaaatgaggaatagcatcacagggcgcaccgacgtcgacttcctcatcagcccggtgaagaactccgacgggatcttttacgactcccgcaactatgaggcgcaagagaatgcgatcctcccgaagaacgccgatgcgaacggggcctataatatcgccaggaaagtgctctgggccatcgggcagttcaaaaaggcggaggatgagaagctcgacaaggtgaaaattgccatttccaacaaggagtggctggagtacgcgcagacctccgtgaagcactctggcggctcaaaaagaaccgccgacggcagcgaattcgagcccaagaagaagaggaaagtcggaagcggagctactaacttcagcctgctgaagcaggctggagacgtggaggagaaccctggacctatggtgagcaagggcgaggagctgttcaccggggtggtgcccatcctggtcgagctggacggcgacgtaaacggccacaagttcagcgtgtccggcgagggcgagggcgatgccacctacggcaagctgaccctgaagttcatctgcaccaccggcaagctgcccgtgccctggcccaccctcgtgaccaccctgacctatggagtgcagtgcttcagccgctaccccgaccacatgaagcagcacgacttcttcaagtccgccatgcccgaaggctacgtccaggagcgcaccatcttcttcaaggacgacggcaactacaagacccgcgccgaggtgaagttcgagggcgacaccctggtgaaccgcatcgagctgaagggcatcgacttcaaggaggacggcaacatcctggggcacaagctggagtacaactacaacagccacaacgtctatatcatggccgacaagcagaagaacggcatcaaggtgaacttcaagatccgccacaacatcgaggacggcagcgtgcagctcgccgaccactaccagcagaacacccccatcggcgacggccccgtgctgctgcccgacaaccactacctgagcacccagtccgccctgagcaaagaccccaacgagaagcgcgatcacatggtcctgctggagttcgtgaccgccgccgggatcactctcggcatggacgagctgtacaagtctggtggttctcccaagaagaagaggaaagtctaaccggtcatcatcaccatcaccattgagtttaaacccgctgatcagcctcgactgtgccttctagttgccagccatctgttgtttgcccctcccccgtgccttccttgaccctggaaggtgccactcccactgtcctttcctaataaaatgaggaaattgcatcgcattgtctgagtaggtgtcattctattctggggggtggggtggggcaggacagcaagggggaggattgggaagacaatagcaggcatgctggggatgcggtgggctctatggcttctgaggcggaaagaaccagctggggctcgataccgtcgacctctagctagagcttggcgtaatcatggtcatagctgtttcctgtgtgaaattgttatccgctcacaattccacacaacatacgagccggaagcataaagtgtaaagcctagggtgcctaatgagtgagctaactcacattaattgcgttgcgctcactgcccgctttccagtcgggaaacctgtcgtgccagctgcattaatgaatcggccaacgcgcggggagaggcggtttgcgtattgggcgctcttccgcttcctcgctcactgactcgctgcgctcggtcgttcggctgcggcgagcggtatcagctcactcaaaggcggtaatacggttatccacagaatcaggggataacgcaggaaagaacatgtgagcaaaaggccagcaaaaggccaggaaccgtaaaaaggccgcgttgctggcgtttttccataggctccgcccccctgacgagcatcacaaaaatcgacgctcaagtcagaggtggcgaaacccgacaggactataaagataccaggcgtttccccctggaagctccctcgtgcgctctcctgttccgaccctgccgcttaccggatacctgtccgcctttctcccttcgggaagcgtggcgctttctcatagctcacgctgtaggtatctcagttcggtgtaggtcgttcgctccaagctgggctgtgtgcacgaaccccccgttcagcccgaccgctgcgccttatccggtaactatcgtcttgagtccaacccggtaagacacgacttatcgccactggcagcagccactggtaacaggattagcagagcgaggtatgtaggcggtgctacagagttcttgaagtggtggcctaactacggctacactagaagaacagtatttggtatctgcgctctgctgaagccagttaccttcggaaaaagagttggtagctcttgatccggcaaacaaaccaccgctggtagcggtggtttttttgtttgcaagcagcagattacgcgcagaaaaaaaggatctcaagaagatcctttgatcttttctacggggtctgacactcagtggaacgaaaactcacgttaagggattttggtcatgagattatcaaaaaggatcttcacctagatccttttaaattaaaaatgaagttttaaatcaatctaaagtatatatgagtaaacttggtctgacagttaccaatgcttaatcagtgaggcacctatctcagcgatctgtctatttcgttcatccatagttgcctgactccccgtcgtgtagataactacgatacgggagggcttaccatctggccccagtgctgcaatgataccgcgagacccacgctcaccggctccagatttatcagcaataaaccagccagccggaagggccgagcgcagaagtggtcctgcaactttatccgcctccatccagtctattaattgttgccgggaagctagagtaagtagttcgccagttaatagtttgcgcaacgttgttgccattgctacaggcatcgtggtgtcacgctcgtcgtttggtatggcttcattcagctccggttcccaacgatcaaggcgagttacatgatcccccatgttgtgcaaaaaagcggttagctccttcggtcctccgatcgttgtcagaagtaagttggccgcagtgttatcactcatggttatggcagcactgcataattctcttactgtcatgccatccgtaagatgcttttctgtgactggtgagtactcaaccaagtcattctgagaatagtgtatgcggcgaccgagttgctcttgcccggcgtcaatacgggataataccgcgccacatagcagaactttaaaagtgctcatcattggaaaacgttcttcggggcgaaaactctcaaggatcttaccgctgttgagatccagttcgatgtaacccactcgtgcacccaactgatcttcagcatcttttactttcaccagcgtttctgggtgagcaaaaacaggaaggcaaaatgccgcaaaaaagggaataagggcgacacggaaatgttgaatactcatactcttcctttttcaatattattgaagcatttatcagggttattgtctcatgagcggatacatatttgaatgtatttagaaaaataaacaaataggggttccgcgcacatttccccgaaaagtgccacctgacgtcgacggatcgggagatcgatctcccgatcccctagggtcgactctcagtacaatctgctctgatgccgcatagttaagccagtatctgctccctgcttgtgtgttggaggtcgctgagtagtgcgcgagcaaaatttaagctacaacaaggcaaggcttgaccgacaattgcatgaagaatctgcttagggttaggcgttttgcgctgcttcgcgatgtacgggccagatatacgcgtt

SEQ ID NO: 537 - protein, 1243 aa, synthetic construct
KTRTEKENKELENLEINLRKEIAKAFKGNEGYKSLFKKDIIETILPEFLDDKDEIALVNSFNGFTTAFTGFFDNRENMFSEEAKSTSIAFRCINENLTRYISNMDIFEKVDAIFDKHEVQEIKEKILNSDYDVEDFFEGEFFNFVLTQEGIDVYNAIIGGFVTESGEKIKGLNEYINLYNQKTKQKLPKFKPLYKQVLSDRESLSFYGEGYTSDEEVLEVFRNTLNKNSEIFSSIKKLEKLFKNFDEYSSAGIFVKNGPAISTISKDIFGEWNVIRDKWNAEYDDIHLKKKAVVTEKYEDDRRKSFKKIGSFSLEQLQEYADADLSVVEKLKEIIIQKVDEIYKVYGSSEKLFDADFVLEKSLKKNDAVVAIMKDLLDSVKSFENYIKAFFGEGKETNRDESFYGDFVLAYDILLKVDHIYDAIRNYVTQKPYSKDKFKLYFQNPQFMGGWDKDKETDYRATILRYGSKYYLAIMDKKYAKCLQKIDKDDVNGNYEKINYKLLPGPNKMLPKVFFSKKWMAYYNPSEDIQKIYKNGTFKKGDMFNLNDCHKLIDFFKDSISRYPKWSNAYDFNFSETEKYKDIAGFYREVEEQGYKVSFESASKKEVDKLVEEGKLYMFQIYNKDFSDKSHGTPNLHTMYFKLLFDENNHGQIRLSGGAELFMRRASLKKEELVVHPANSPIANKNPDNPKKTTTLSYDVYKDKRFSEDQYELHIPIAINKCPKNIFKINTEVRVLLKHDDNPYVIGIDRGERNLLYIVVVDGKGNIVEQYSLNEIINNFNGIRIKTDYHSLLDKKEKERFEARQNWTSIENIKELKAGYISQVVHKICELVEKYDAVIALEDLNSGFKNSRVKVEKQVYQKFEKMLIDKLNYMVDKKSNPCATGGALKGYQITNKFESFKSMSTQNGFIFYIPAWLTSKIDPSTGFVNLLKTKYTSIADSKKFISSFDRIMYVPEEDLFEFALDYKNFSRTDADYIKKWKLYSYGNRIRIFRNPKKNNVFDWEEVCLTSAYKELFNKYGINYQQGDIRALLCEQSDKAFYSSFMALMSLMLQMRNSITGRTDVDFLISPVKNSDGIFYDSRNYEAQENAILPKNADANGAYNIARKVLWAIGQFKKAEDEKLDKVKIAISNKEWLEYAQTSVKHGSSGSSGSSGSSGSSGSKLEKFTNCYSLSKTLRFKAIPVGKTQENIDNKRLLVEDEKRAEDYKGVKKLLDRYYLSFINDVLHSIKLKNLNNYISLFRK

SEQ ID NO: 538 - protein, 1243 aa, synthetic construct
TRTEKENKELENLEINLRKEIAKAFKGNEGYKSLFKKDIIETILPEFLDDKDEIALVNSFNGFTTAFTGFFDNRENMFSEEAKSTSIAFRCINENLTRYISNMDIFEKVDAIFDKHEVQEIKEKILNSDYDVEDFFEGEFFNFVLTQEGIDVYNAIIGGFVTESGEKIKGLNEYINLYNQKTKQKLPKFKPLYKQVLSDRESLSFYGEGYTSDEEVLEVFRNTLNKNSEIFSSIKKLEKLFKNFDEYSSAGIFVKNGPAISTISKDIFGEWNVIRDKWNAEYDDIHLKKKAVVTEKYEDDRRKSFKKIGSFSLEQLQEYADADLSVVEKLKEIIIQKVDEIYKVYGSSEKLFDADFVLEKSLKKNDAVVAIMKDLLDSVKSFENYIKAFFGEGKETNRDESFYGDFVLAYDILLKVDHIYDAIRNYVTQKPYSKDKFKLYFQNPQFMGGWDKDKETDYRATILRYGSKYYLAIMDKKYAKCLQKIDKDDVNGNYEKINYKLLPGPNKMLPKVFFSKKWMAYYNPSEDIQKIYKNGTFKKGDMFNLNDCHKLIDFFKDSISRYPKWSNAYDFNFSETEKYKDIAGFYREVEEQGYKVSFESASKKEVDKLVEEGKLYMFQIYNKDFSDKSHGTPNLHTMYFKLLFDENNHGQIRLSGGAELFMRRASLKKEELVVHPANSPIANKNPDNPKKTTTLSYDVYKDKRFSEDQYELHIPIAINKCPKNIFKINTEVRVLLKHDDNPYVIGIDRGERNLLYIVVVDGKGNIVEQYSLNEIINNFNGIRIKTDYHSLLDKKEKERFEARQNWTSIENIKELKAGYISQVVHKICELVEKYDAVIALEDLNSGFKNSRVKVEKQVYQKFEKMLIDKLNYMVDKKSNPCATGGALKGYQITNKFESFKSMSTQNGFIFYIPAWLTSKIDPSTGFVNLLKTKYTSIADSKKFISSFDRIMYVPEEDLFEFALDYKNFSRTDADYIKKWKLYSYGNRIRIFRNPKKNNVFDWEEVCLTSAYKELFNKYGINYQQGDIRALLCEQSDKAFYSSFMALMSLMLQMRNSITGRTDVDFLISPVKNSDGIFYDSRNYEAQENAILPKNADANGAYNIARKVLWAIGQFKKAEDEKLDKVKIAISNKEWLEYAQTSVKHGSSGSSGSSGSSGSSGSKLEKFTNCYSLSKTLRFKAIPVGKTQENIDNKRLLVEDEKRAEDYKGVKKLLDRYYLSFINDVLHSIKLKNLNNYISLFRKK

SEQ ID NO: 539 - protein, 1243 aa, synthetic construct
EKENKELENLEINLRKEIAKAFKGNEGYKSLFKKDIIETILPEFLDDKDEIALVNSFNGFTTAFTGFFDNRENMFSEEAKSTSIAFRCINENLTRYISNMDIFEKVDAIFDKHEVQEIKEKILNSDYDVEDFFEGEFFNFVLTQEGIDVYNAIIGGFVTESGEKIKGLNEYINLYNQKTKQKLPKFKPLYKQVLSDRESLSFYGEGYTSDEEVLEVFRNTLNKNSEIFSSIKKLEKLFKNFDEYSSAGIFVKNGPAISTISKDIFGEWNVIRDKWNAEYDDIHLKKKAVVTEKYEDDRRKSFKKIGSFSLEQLQEYADADLSVVEKLKEIIIQKVDEIYKVYGSSEKLFDADFVLEKSLKKNDAVVAIMKDLLDSVKSFENYIKAFFGEGKETNRDESFYGDFVLAYDILLKVDHIYDAIRNYVTQKPYSKDKFKLYFQNPQFMGGWDKDKETDYRATILRYGSKYYLAIMDKKYAKCLQKIDKDDVNGNYEKINYKLLPGPNKMLPKVFFSKKWMAYYNPSEDIQKIYKNGTFKKGDMFNLNDCHKLIDFFKDSISRYPKWSNAYDFNFSETEKYKDIAGFYREVEEQGYKVSFESASKKEVDKLVEEGKLYMFQIYNKDFSDKSHGTPNLHTMYFKLLFDENNHGQIRLSGGAELFMRRASLKKEELVVHPANSPIANKNPDNPKKTTTLSYDVYKDKRFSEDQYELHIPIAINKCPKNIFKINTEVRVLLKHDDNPYVIGIDRGERNLLYIVVVDGKGNIVEQYSLNEIINNFNGIRIKTDYHSLLDKKEKERFEARQNWTSIENIKELKAGYISQVVHKICELVEKYDAVIALEDLNSGFKNSRVKVEKQVYQKFEKMLIDKLNYMVDKKSNPCATGGALKGYQITNKFESFKSMSTQNGFIFYIPAWLTSKIDPSTGFVNLLKTKYTSIADSKKFISSFDRIMYVPEEDLFEFALDYKNFSRTDADYIKKWKLYSYGNRIRIFRNPKKNNVFDWEEVCLTSAYKELFNKYGINYQQGDIRALLCEQSDKAFYSSFMALMSLMLQMRNSITGRTDVDFLISPVKNSDGIFYDSRNYEAQENAILPKNADANGAYNIARKVLWAIGQFKKAEDEKLDKVKIAISNKEWLEYAQTSVKHGSSGSSGSSGSSGSSGSKLEKFTNCYSLSKTLRFKAIPVGKTQENIDNKRLLVEDEKRAEDYKGVKKLLDRYYLSFINDVLHSIKLKNLNNYISLFRKKTRT

SEQ ID NO: 540 - protein, 1243 aa, synthetic construct
KENKELENLEINLRKEIAKAFKGNEGYKSLFKKDIIETILPEFLDDKDEIALVNSFNGFTTAFTGFFDNRENMFSEEAKSTSIAFRCINENLTRYISNMDIFEKVDAIFDKHEVQEIKEKILNSDYDVEDFFEGEFFNFVLTQEGIDVYNAIIGGFVTESGEKIKGLNEYINLYNQKTKQKLPKFKPLYKQVLSDRESLSFYGEGYTSDEEVLEVFRNTLNKNSEIFSSIKKLEKLFKNFDEYSSAGIFVKNGPAISTISKDIFGEWNVIRDKWNAEYDDIHLKKKAVVTEKYEDDRRKSFKKIGSFSLEQLQEYADADLSVVEKLKEIIIQKVDEIYKVYGSSEKLFDADFVLEKSLKKNDAVVAIMKDLLDSVKSFENYIKAFFGEGKETNRDESFYGDFVLAYDILLKVDHIYDAIRNYVTQKPYSKDKFKLYFQNPQFMGGWDKDKETDYRATILRYGSKYYLAIMDKKYAKCLQKIDKDDVNGNYEKINYKLLPGPNKMLPKVFFSKKWMAYYNPSEDIQKIYKNGTFKKGDMFNLNDCHKLIDFFKDSISRYPKWSNAYDFNFSETEKYKDIAGFYREVEEQGYKVSFESASKKEVDKLVEEGKLYMFQIYNKDFSDKSHGTPNLHTMYFKLLFDENNHGQIRLSGGAELFMRRASLKKEELVVHPANSPIANKNPDNPKKTTTLSYDVYKDKRFSEDQYELHIPIAINKCPKNIFKINTEVRVLLKHDDNPYVIGIDRGERNLLYIVVVDGKGNIVEQYSLNEIINNFNGIRIKTDYHSLLDKKEKERFEARQNWTSIENIKELKAGYISQVVHKICELVEKYDAVIALEDLNSGFKNSRVKVEKQVYQKFEKMLIDKLNYMVDKKSNPCATGGALKGYQITNKFESFKSMSTQNGFIFYIPAWLTSKIDPSTGFVNLLKTKYTSIADSKKFISSFDRIMYVPEEDLFEFALDYKNFSRTDADYIKKWKLYSYGNRIRIFRNPKKNNVFDWEEVCLTSAYKELFNKYGINYQQGDIRALLCEQSDKAFYSSFMALMSLMLQMRNSITGRTDVDFLISPVKNSDGIFYDSRNYEAQENAILPKNADANGAYNIARKVLWAIGQFKKAEDEKLDKVKIAISNKEWLEYAQTSVKHGSSGSSGSSGSSGSSGSKLEKFTNCYSLSKTLRFKAIPVGKTQENIDNKRLLVEDEKRAEDYKGVKKLLDRYYLSFINDVLHSIKLKNLNNYISLFRKKTRTE

SEQ ID NO: 541 - protein, 1243 aa, synthetic construct
QKLPKFKPLYKQVLSDRESLSFYGEGYTSDEEVLEVFRNTLNKNSEIFSSIKKLEKLFKNFDEYSSAGIFVKNGPAISTISKDIFGEWNVIRDKWNAEYDDIHLKKKAVVTEKYEDDRRKSFKKIGSFSLEQLQEYADADLSVVEKLKEIIIQKVDEIYKVYGSSEKLFDADFVLEKSLKKNDAVVAIMKDLLDSVKSFENYIKAFFGEGKETNRDESFYGDFVLAYDILLKVDHIYDAIRNYVTQKPYSKDKFKLYFQNPQFMGGWDKDKETDYRATILRYGSKYYLAIMDKKYAKCLQKIDKDDVNGNYEKINYKLLPGPNKMLPKVFFSKKWMAYYNPSEDIQKIYKNGTFKKGDMFNLNDCHKLIDFFKDSISRYPKWSNAYDFNFSETEKYKDIAGFYREVEEQGYKVSFESASKKEVDKLVEEGKLYMFQIYNKDFSDKSHGTPNLHTMYFKLLFDENNHGQIRLSGGAELFMRRASLKKEELVVHPANSPIANKNPDNPKKTTTLSYDVYKDKRFSEDQYELHIPIAINKCPKNIFKINTEVRVLLKHDDNPYVIGIDRGERNLLYIVVVDGKGNIVEQYSLNEIINNFNGIRIKTDYHSLLDKKEKERFEARQNWTSIENIKELKAGYISQVVHKICELVEKYDAVIALEDLNSGFKNSRVKVEKQVYQKFEKMLIDKLNYMVDKKSNPCATGGALKGYQITNKFESFKSMSTQNGFIFYIPAWLTSKIDPSTGFVNLLKTKYTSIADSKKFISSFDRIMYVPEEDLFEFALDYKNFSRTDADYIKKWKLYSYGNRIRIFRNPKKNNVFDWEEVCLTSAYKELFNKYGINYQQGDIRALLCEQSDKAFYSSFMALMSLMLQMRNSITGRTDVDFLISPVKNSDGIFYDSRNYEAQENAILPKNADANGAYNIARKVLWAIGQFKKAEDEKLDKVKIAISNKEWLEYAQTSVKHGSSGSSGSSGSSGSSGSKLEKFTNCYSLSKTLRFKAIPVGKTQENIDNKRLLVEDEKRAEDYKGVKKLLDRYYLSFINDVLHSIKLKNLNNYISLFRKKTRTEKENKELENLEINLRKEIAKAFKGNEGYKSLFKKDIIETILPEFLDDKDEIALVNSFNGFTTAFTGFFDNRENMFSEEAKSTSIAFRCINENLTRYISNMDIFEKVDAIFDKHEVQEIKEKILNSDYDVEDFFEGEFFNFVLTQEGIDVYNAIIGGFVTESGEKIKGLNEYINLYNQKTK

SEQ ID NO: 542 - protein, 1243 aa, synthetic construct
VLSDRESLSFYGEGYTSDEEVLEVFRNTLNKNSEIFSSIKKLEKLFKNFDEYSSAGIFVKNGPAISTISKDIFGEWNVIRDKWNAEYDDIHLKKKAVVTEKYEDDRRKSFKKIGSFSLEQLQEYADADLSVVEKLKEIIIQKVDEIYKVYGSSEKLFDADFVLEKSLKKNDAVVAIMKDLLDSVKSFENYIKAFFGEGKETNRDESFYGDFVLAYDILLKVDHIYDAIRNYVTQKPYSKDKFKLYFQNPQFMGGWDKDKETDYRATILRYGSKYYLAIMDKKYAKCLQKIDKDDVNGNYEKINYKLLPGPNKMLPKVFFSKKWMAYYNPSEDIQKIYKNGTFKKGDMFNLNDCHKLIDFFKDSISRYPKWSNAYDFNFSETEKYKDIAGFYREVEEQGYKVSFESASKKEVDKLVEEGKLYMFQIYNKDFSDKSHGTPNLHTMYFKLLFDENNHGQIRLSGGAELFMRRASLKKEELVVHPANSPIANKNPDNPKKTTTLSYDVYKDKRFSEDQYELHIPIAINKCPKNIFKINTEVRVLLKHDDNPYVIGIDRGERNLLYIVVVDGKGNIVEQYSLNEIINNFNGIRIKTDYHSLLDKKEKERFEARQNWTSIENIKELKAGYISQVVHKICELVEKYDAVIALEDLNSGFKNSRVKVEKQVYQKFEKMLIDKLNYMVDKKSNPCATGGALKGYQITNKFESFKSMSTQNGFIFYIPAWLTSKIDPSTGFVNLLKTKYTSIADSKKFISSFDRIMYVPEEDLFEFALDYKNFSRTDADYIKKWKLYSYGNRIRIFRNPKKNNVFDWEEVCLTSAYKELFNKYGINYQQGDIRALLCEQSDKAFYSSFMALMSLMLQMRNSITGRTDVDFLISPVKNSDGIFYDSRNYEAQENAILPKNADANGAYNIARKVLWAIGQFKKAEDEKLDKVKIAISNKEWLEYAQTSVKHGSSGSSGSSGSSGSSGSKLEKFTNCYSLSKTLRFKAIPVGKTQENIDNKRLLVEDEKRAEDYKGVKKLLDRYYLSFINDVLHSIKLKNLNNYISLFRKKTRTEKENKELENLEINLRKEIAKAFKGNEGYKSLFKKDIIETILPEFLDDKDEIALVNSFNGFTTAFTGFFDNRENMFSEEAKSTSIAFRCINENLTRYISNMDIFEKVDAIFDKHEVQEIKEKILNSDYDVEDFFEGEFFNFVLTQEGIDVYNAIIGGFVTESGEKIKGLNEYINLYNQKTKQKLPKFKPLYKQ

SEQ ID NO: 543 - protein, 1243 aa, synthetic construct
TSDEEVLEVFRNTLNKNSEIFSSIKKLEKLFKNFDEYSSAGIFVKNGPAISTISKDIFGEWNVIRDKWNAEYDDIHLKKKAVVTEKYEDDRRKSFKKIGSFSLEQLQEYADADLSVVEKLKEIIIQKVDEIYKVYGSSEKLFDADFVLEKSLKKNDAVVAIMKDLLDSVKSFENYIKAFFGEGKETNRDESFYGDFVLAYDILLKVDHIYDAIRNYVTQKPYSKDKFKLYFQNPQFMGGWDKDKETDYRATILRYGSKYYLAIMDKKYAKCLQKIDKDDVNGNYEKINYKLLPGPNKMLPKVFFSKKWMAYYNPSEDIQKIYKNGTFKKGDMFNLNDCHKLIDFFKDSISRYPKWSNAYDFNFSETEKYKDIAGFYREVEEQGYKVSFESASKKEVDKLVEEGKLYMFQIYNKDFSDKSHGTPNLHTMYFKLLFDENNHGQIRLSGGAELFMRRASLKKEELVVHPANSPIANKNPDNPKKTTTLSYDVYKDKRFSEDQYELHIPIAINKCPKNIFKINTEVRVLLKHDDNPYVIGIDRGERNLLYIVVVDGKGNIVEQYSLNEIINNFNGIRIKTDYHSLLDKKEKERFEARQNWTSIENIKELKAGYISQVVHKICELVEKYDAVIALEDLNSGFKNSRVKVEKQVYQKFEKMLIDKLNYMVDKKSNPCATGGALKGYQITNKFESFKSMSTQNGFIFYIPAWLTSKIDPSTGFVNLLKTKYTSIADSKKFISSFDRIMYVPEEDLFEFALDYKNFSRTDADYIKKWKLYSYGNRIRIFRNPKKNNVFDWEEVCLTSAYKELFNKYGINYQQGDIRALLCEQSDKAFYSSFMALMSLMLQMRNSITGRTDVDFLISPVKNSDGIFYDSRNYEAQENAILPKNADANGAYNIARKVLWAIGQFKKAEDEKLDKVKIAISNKEWLEYAQTSVKHGSSGSSGSSGSSGSSGSKLEKFTNCYSLSKTLRFKAIPVGKTQENIDNKRLLVEDEKRAEDYKGVKKLLDRYYLSFINDVLHSIKLKNLNNYISLFRKKTRTEKENKELENLEINLRKEIAKAFKGNEGYKSLFKKDIIETILPEFLDDKDEIALVNSFNGFTTAFTGFFDNRENMFSEEAKSTSIAFRCINENLTRYISNMDIFEKVDAIFDKHEVQEIKEKILNSDYDVEDFFEGEFFNFVLTQEGIDVYNAIIGGFVTESGEKIKGLNEYINLYNQKTKQKLPKFKPLYKQVLSDRESLSFYGEGY

SEQ ID NO: 544 - protein, 1243 aa, synthetic construct
DEEVLEVFRNTLNKNSEIFSSIKKLEKLFKNFDEYSSAGIFVKNGPAISTISKDIFGEWNVIRDKWNAEYDDIHLKKKAVVTEKYEDDRRKSFKKIGSFSLEQLQEYADADLSVVEKLKEIIIQKVDEIYKVYGSSEKLFDADFVLEKSLKKNDAVVAIMKDLLDSVKSFENYIKAFFGEGKETNRDESFYGDFVLAYDILLKVDHIYDAIRNYVTQKPYSKDKFKLYFQNPQFMGGWDKDKETDYRATILRYGSKYYLAIMDKKYAKCLQKIDKDDVNGNYEKINYKLLPGPNKMLPKVFFSKKWMAYYNPSEDIQKIYKNGTFKKGDMFNLNDCHKLIDFFKDSISRYPKWSNAYDFNFSETEKYKDIAGFYREVEEQGYKVSFESASKKEVDKLVEEGKLYMFQIYNKDFSDKSHGTPNLHTMYFKLLFDENNHGQIRLSGGAELFMRRASLKKEELVVHPANSPIANKNPDNPKKTTTLSYDVYKDKRFSEDQYELHIPIAINKCPKNIFKINTEVRVLLKHDDNPYVIGIDRGERNLLYIVVVDGKGNIVEQYSLNEIINNFNGIRIKTDYHSLLDKKEKERFEARQNWTSIENIKELKAGYISQVVHKICELVEKYDAVIALEDLNSGFKNSRVKVEKQVYQKFEKMLIDKLNYMVDKKSNPCATGGALKGYQITNKFESFKSMSTQNGFIFYIPAWLTSKIDPSTGFVNLLKTKYTSIADSKKFISSFDRIMYVPEEDLFEFALDYKNFSRTDADYIKKWKLYSYGNRIRIFRNPKKNNVFDWEEVCLTSAYKELFNKYGINYQQGDIRALLCEQSDKAFYSSFMALMSLMLQMRNSITGRTDVDFLISPVKNSDGIFYDSRNYEAQENAILPKNADANGAYNIARKVLWAIGQFKKAEDEKLDKVKIAISNKEWLEYAQTSVKHGSSGSSGSSGSSGSSGSKLEKFTNCYSLSKTLRFKAIPVGKTQENIDNKRLLVEDEKRAEDYKGVKKLLDRYYLSFINDVLHSIKLKNLNNYISLFRKKTRTEKENKELENLEINLRKEIAKAFKGNEGYKSLFKKDIIETILPEFLDDKDEIALVNSFNGFTTAFTGFFDNRENMFSEEAKSTSIAFRCINENLTRYISNMDIFEKVDAIFDKHEVQEIKEKILNSDYDVEDFFEGEFFNFVLTQEGIDVYNAIIGGFVTESGEKIKGLNEYINLYNQKTKQKLPKFKPLYKQVLSDRESLSFYGEGYTS

SEQ ID NO: 545 - protein, 1243 aa, synthetic construct
NSDGIFYDSRNYEAQENAILPKNADANGAYNIARKVLWAIGQFKKAEDEKLDKVKIAISNKEWLEYAQTSVKHGSSGSSGSSGSSGSSGSKLEKFTNCYSLSKTLRFKAIPVGKTQENIDNKRLLVEDEKRAEDYKGVKKLLDRYYLSFINDVLHSIKLKNLNNYISLFRKKTRTEKENKELENLEINLRKEIAKAFKGNEGYKSLFKKDIIETILPEFLDDKDEIALVNSFNGFTTAFTGFFDNRENMFSEEAKSTSIAFRCINENLTRYISNMDIFEKVDAIFDKHEVQEIKEKILNSDYDVEDFFEGEFFNFVLTQEGIDVYNAIIGGFVTESGEKIKGLNEYINLYNQKTKQKLPKFKPLYKQVLSDRESLSFYGEGYTSDEEVLEVFRNTLNKNSEIFSSIKKLEKLFKNFDEYSSAGIFVKNGPAISTISKDIFGEWNVIRDKWNAEYDDIHLKKKAVVTEKYEDDRRKSFKKIGSFSLEQLQEYADADLSVVEKLKEIIIQKVDEIYKVYGSSEKLFDADFVLEKSLKKNDAVVAIMKDLLDSVKSFENYIKAFFGEGKETNRDESFYGDFVLAYDILLKVDHIYDAIRNYVTQKPYSKDKFKLYFQNPQFMGGWDKDKETDYRATILRYGSKYYLAIMDKKYAKCLQKIDKDDVNGNYEKINYKLLPGPNKMLPKVFFSKKWMAYYNPSEDIQKIYKNGTFKKGDMFNLNDCHKLIDFFKDSISRYPKWSNAYDFNFSETEKYKDIAGFYREVEEQGYKVSFESASKKEVDKLVEEGKLYMFQIYNKDFSDKSHGTPNLHTMYFKLLFDENNHGQIRLSGGAELFMRRASLKKEELVVHPANSPIANKNPDNPKKTTTLSYDVYKDKRFSEDQYELHIPIAINKCPKNIFKINTEVRVLLKHDDNPYVIGIDRGERNLLYIVVVDGKGNIVEQYSLNEIINNFNGIRIKTDYHSLLDKKEKERFEARQNWTSIENIKELKAGYISQVVHKICELVEKYDAVIALEDLNSGFKNSRVKVEKQVYQKFEKMLIDKLNYMVDKKSNPCATGGALKGYQITNKFESFKSMSTQNGFIFYIPAWLTSKIDPSTGFVNLLKTKYTSIADSKKFISSFDRIMYVPEEDLFEFALDYKNFSRTDADYIKKWKLYSYGNRIRIFRNPKKNNVFDWEEVCLTSAYKELFNKYGINYQQGDIRALLCEQSDKAFYSSFMALMSLMLQMRNSITGRTDVDFLISPVK

SEQ ID NO: 546 - protein, 1243 aa, synthetic construct
IFYDSRNYEAQENAILPKNADANGAYNIARKVLWAIGQFKKAEDEKLDKVKIAISNKEWLEYAQTSVKHGSSGSSGSSGSSGSSGSKLEKFTNCYSLSKTLRFKAIPVGKTQENIDNKRLLVEDEKRAEDYKGVKKLLDRYYLSFINDVLHSIKLKNLNNYISLFRKKTRTEKENKELENLEINLRKEIAKAFKGNEGYKSLFKKDIIETILPEFLDDKDEIALVNSFNGFTTAFTGFFDNRENMFSEEAKSTSIAFRCINENLTRYISNMDIFEKVDAIFDKHEVQEIKEKILNSDYDVEDFFEGEFFNFVLTQEGIDVYNAIIGGFVTESGEKIKGLNEYINLYNQKTKQKLPKFKPLYKQVLSDRESLSFYGEGYTSDEEVLEVFRNTLNKNSEIFSSIKKLEKLFKNFDEYSSAGIFVKNGPAISTISKDIFGEWNVIRDKWNAEYDDIHLKKKAVVTEKYEDDRRKSFKKIGSFSLEQLQEYADADLSVVEKLKEIIIQKVDEIYKVYGSSEKLFDADFVLEKSLKKNDAVVAIMKDLLDSVKSFENYIKAFFGEGKETNRDESFYGDFVLAYDILLKVDHIYDAIRNYVTQKPYSKDKFKLYFQNPQFMGGWDKDKETDYRATILRYGSKYYLAIMDKKYAKCLQKIDKDDVNGNYEKINYKLLPGPNKMLPKVFFSKKWMAYYNPSEDIQKIYKNGTFKKGDMFNLNDCHKLIDFFKDSISRYPKWSNAYDFNFSETEKYKDIAGFYREVEEQGYKVSFESASKKEVDKLVEEGKLYMFQIYNKDFSDKSHGTPNLHTMYFKLLFDENNHGQIRLSGGAELFMRRASLKKEELVVHPANSPIANKNPDNPKKTTTLSYDVYKDKRFSEDQYELHIPIAINKCPKNIFKINTEVRVLLKHDDNPYVIGIDRGERNLLYIVVVDGKGNIVEQYSLNEIINNFNGIRIKTDYHSLLDKKEKERFEARQNWTSIENIKELKAGYISQVVHKICELVEKYDAVIALEDLNSGFKNSRVKVEKQVYQKFEKMLIDKLNYMVDKKSNPCATGGALKGYQITNKFESFKSMSTQNGFIFYIPAWLTSKIDPSTGFVNLLKTKYTSIADSKKFISSFDRIMYVPEEDLFEFALDYKNFSRTDADYIKKWKLYSYGNRIRIFRNPKKNNVFDWEEVCLTSAYKELFNKYGINYQQGDIRALLCEQSDKAFYSSFMALMSLMLQMRNSITGRTDVDFLISPVKNSDG

SEQ ID NO: 547 - protein, 1243 aa, synthetic construct
DGIFYDSRNYEAQENAILPKNADANGAYNIARKVLWAIGQFKKAEDEKLDKVKIAISNKEWLEYAQTSVKHGSSGSSGSSGSSGSSGSKLEKFTNCYSLSKTLRFKAIPVGKTQENIDNKRLLVEDEKRAEDYKGVKKLLDRYYLSFINDVLHSIKLKNLNNYISLFRKKTRTEKENKELENLEINLRKEIAKAFKGNEGYKSLFKKDIIETILPEFLDDKDEIALVNSFNGFTTAFTGFFDNRENMFSEEAKSTSIAFRCINENLTRYISNMDIFEKVDAIFDKHEVQEIKEKILNSDYDVEDFFEGEFFNFVLTQEGIDVYNAIIGGFVTESGEKIKGLNEYINLYNQKTKQKLPKFKPLYKQVLSDRESLSFYGEGYTSDEEVLEVFRNTLNKNSEIFSSIKKLEKLFKNFDEYSSAGIFVKNGPAISTISKDIFGEWNVIRDKWNAEYDDIHLKKKAVVTEKYEDDRRKSFKKIGSFSLEQLQEYADADLSVVEKLKEIIIQKVDEIYKVYGSSEKLFDADFVLEKSLKKNDAVVAIMKDLLDSVKSFENYIKAFFGEGKETNRDESFYGDFVLAYDILLKVDHIYDAIRNYVTQKPYSKDKFKLYFQNPQFMGGWDKDKETDYRATILRYGSKYYLAIMDKKYAKCLQKIDKDDVNGNYEKINYKLLPGPNKMLPKVFFSKKWMAYYNPSEDIQKIYKNGTFKKGDMFNLNDCHKLIDFFKDSISRYPKWSNAYDFNFSETEKYKDIAGFYREVEEQGYKVSFESASKKEVDKLVEEGKLYMFQIYNKDFSDKSHGTPNLHTMYFKLLFDENNHGQIRLSGGAELFMRRASLKKEELVVHPANSPIANKNPDNPKKTTTLSYDVYKDKRFSEDQYELHIPIAINKCPKNIFKINTEVRVLLKHDDNPYVIGIDRGERNLLYIVVVDGKGNIVEQYSLNEIINNFNGIRIKTDYHSLLDKKEKERFEARQNWTSIENIKELKAGYISQVVHKICELVEKYDAVIALEDLNSGFKNSRVKVEKQVYQKFEKMLIDKLNYMVDKKSNPCATGGALKGYQITNKFESFKSMSTQNGFIFYIPAWLTSKIDPSTGFVNLLKTKYTSIADSKKFISSFDRIMYVPEEDLFEFALDYKNFSRTDADYIKKWKLYSYGNRIRIFRNPKKNNVFDWEEVCLTSAYKELFNKYGINYQQGDIRALLCEQSDKAFYSSFMALMSLMLQMRNSITGRTDVDFLISPVKNS

SEQ ID NO: 548 - protein, 1243 aa, synthetic construct
YDSRNYEAQENAILPKNADANGAYNIARKVLWAIGQFKKAEDEKLDKVKIAISNKEWLEYAQTSVKHGSSGSSGSSGSSGSSGSKLEKFTNCYSLSKTLRFKAIPVGKTQENIDNKRLLVEDEKRAEDYKGVKKLLDRYYLSFINDVLHSIKLKNLNNYISLFRKKTRTEKENKELENLEINLRKEIAKAFKGNEGYKSLFKKDIIETILPEFLDDKDEIALVNSFNGFTTAFTGFFDNRENMFSEEAKSTSIAFRCINENLTRYISNMDIFEKVDAIFDKHEVQEIKEKILNSDYDVEDFFEGEFFNFVLTQEGIDVYNAIIGGFVTESGEKIKGLNEYINLYNQKTKQKLPKFKPLYKQVLSDRESLSFYGEGYTSDEEVLEVFRNTLNKNSEIFSSIKKLEKLFKNFDEYSSAGIFVKNGPAISTISKDIFGEWNVIRDKWNAEYDDIHLKKKAVVTEKYEDDRRKSFKKIGSFSLEQLQEYADADLSVVEKLKEIIIQKVDEIYKVYGSSEKLFDADFVLEKSLKKNDAVVAIMKDLLDSVKSFENYIKAFFGEGKETNRDESFYGDFVLAYDILLKVDHIYDAIRNYVTQKPYSKDKFKLYFQNPQFMGGWDKDKETDYRATILRYGSKYYLAIMDKKYAKCLQKIDKDDVNGNYEKINYKLLPGPNKMLPKVFFSKKWMAYYNPSEDIQKIYKNGTFKKGDMFNLNDCHKLIDFFKDSISRYPKWSNAYDFNFSETEKYKDIAGFYREVEEQGYKVSFESASKKEVDKLVEEGKLYMFQIYNKDFSDKSHGTPNLHTMYFKLLFDENNHGQIRLSGGAELFMRRASLKKEELVVHPANSPIANKNPDNPKKTTTLSYDVYKDKRFSEDQYELHIPIAINKCPKNIFKINTEVRVLLKHDDNPYVIGIDRGERNLLYIVVVDGKGNIVEQYSLNEIINNFNGIRIKTDYHSLLDKKEKERFEARQNWTSIENIKELKAGYISQVVHKICELVEKYDAVIALEDLNSGFKNSRVKVEKQVYQKFEKMLIDKLNYMVDKKSNPCATGGALKGYQITNKFESFKSMSTQNGFIFYIPAWLTSKIDPSTGFVNLLKTKYTSIADSKKFISSFDRIMYVPEEDLFEFALDYKNFSRTDADYIKKWKLYSYGNRIRIFRNPKKNNVFDWEEVCLTSAYKELFNKYGINYQQGDIRALLCEQSDKAFYSSFMALMSLMLQMRNSITGRTDVDFLISPVKNSDGIF

SEQ ID NO: 549 - protein, 1243 aa, synthetic construct
QKPYSKDKFKLYFQNPQFMGGWDKDKETDYRATILRYGSKYYLAIMDKKYAKCLQKIDKDDVNGNYEKINYKLLPGPNKMLPKVFFSKKWMAYYNPSEDIQKIYKNGTFKKGDMFNLNDCHKLIDFFKDSISRYPKWSNAYDFNFSETEKYKDIAGFYREVEEQGYKVSFESASKKEVDKLVEEGKLYMFQIYNKDFSDKSHGTPNLHTMYFKLLFDENNHGQIRLSGGAELFMRRASLKKEELVVHPANSPIANKNPDNPKKTTTLSYDVYKDKRFSEDQYELHIPIAINKCPKNIFKINTEVRVLLKHDDNPYVIGIDRGERNLLYIVVVDGKGNIVEQYSLNEIINNFNGIRIKTDYHSLLDKKEKERFEARQNWTSIENIKELKAGYISQVVHKICELVEKYDAVIALEDLNSGFKNSRVKVEKQVYQKFEKMLIDKLNYMVDKKSNPCATGGALKGYQITNKFESFKSMSTQNGFIFYIPAWLTSKIDPSTGFVNLLKTKYTSIADSKKFISSFDRIMYVPEEDLFEFALDYKNFSRTDADYIKKWKLYSYGNRIRIFRNPKKNNVFDWEEVCLTSAYKELFNKYGINYQQGDIRALLCEQSDKAFYSSFMALMSLMLQMRNSITGRTDVDFLISPVKNSDGIFYDSRNYEAQENAILPKNADANGAYNIARKVLWAIGQFKKAEDEKLDKVKIAISNKEWLEYAQTSVKHGSSGSSGSSGSSGSSGSKLEKFTNCYSLSKTLRFKAIPVGKTQENIDNKRLLVEDEKRAEDYKGVKKLLDRYYLSFINDVLHSIKLKNLNNYISLFRKKTRTEKENKELENLEINLRKEIAKAFKGNEGYKSLFKKDIIETILPEFLDDKDEIALVNSFNGFTTAFTGFFDNRENMFSEEAKSTSIAFRCINENLTRYISNMDIFEKVDAIFDKHEVQEIKEKILNSDYDVEDFFEGEFFNFVLTQEGIDVYNAIIGGFVTESGEKIKGLNEYINLYNQKTKQKLPKFKPLYKQVLSDRESLSFYGEGYTSDEEVLEVFRNTLNKNSEIFSSIKKLEKLFKNFDEYSSAGIFVKNGPAISTISKDIFGEWNVIRDKWNAEYDDIHLKKKAVVTEKYEDDRRKSFKKIGSFSLEQLQEYADADLSVVEKLKEIIIQKVDEIYKVYGSSEKLFDADFVLEKSLKKNDAVVAIMKDLLDSVKSFENYIKAFFGEGKETNRDESFYGDFVLAYDILLKVDHIYDAIRNYVT

SEQ ID NO: 550 - protein, 1243 aa, synthetic construct
YSKDKFKLYFQNPQFMGGWDKDKETDYRATILRYGSKYYLAIMDKKYAKCLQKIDKDDVNGNYEKINYKLLPGPNKMLPKVFFSKKWMAYYNPSEDIQKIYKNGTFKKGDMFNLNDCHKLIDFFKDSISRYPKWSNAYDFNFSETEKYKDIAGFYREVEEQGYKVSFESASKKEVDKLVEEGKLYMFQIYNKDFSDKSHGTPNLHTMYFKLLFDENNHGQIRLSGGAELFMRRASLKKEELVVHPANSPIANKNPDNPKKTTTLSYDVYKDKRFSEDQYELHIPIAINKCPKNIFKINTEVRVLLKHDDNPYVIGIDRGERNLLYIVVVDGKGNIVEQYSLNEIINNFNGIRIKTDYHSLLDKKEKERFEARQNWTSIENIKELKAGYISQVVHKICELVEKYDAVIALEDLNSGFKNSRVKVEKQVYQKFEKMLIDKLNYMVDKKSNPCATGGALKGYQITNKFESFKSMSTQNGFIFYIPAWLTSKIDPSTGFVNLLKTKYTSIADSKKFISSFDRIMYVPEEDLFEFALDYKNFSRTDADYIKKWKLYSYGNRIRIFRNPKKNNVFDWEEVCLTSAYKELFNKYGINYQQGDIRALLCEQSDKAFYSSFMALMSLMLQMRNSITGRTDVDFLISPVKNSDGIFYDSRNYEAQENAILPKNADANGAYNIARKVLWAIGQFKKAEDEKLDKVKIAISNKEWLEYAQTSVKHGSSGSSGSSGSSGSSGSKLEKFTNCYSLSKTLRFKAIPVGKTQENIDNKRLLVEDEKRAEDYKGVKKLLDRYYLSFINDVLHSIKLKNLNNYISLFRKKTRTEKENKELENLEINLRKEIAKAFKGNEGYKSLFKKDIIETILPEFLDDKDEIALVNSFNGFTTAFTGFFDNRENMFSEEAKSTSIAFRCINENLTRYISNMDIFEKVDAIFDKHEVQEIKEKILNSDYDVEDFFEGEFFNFVLTQEGIDVYNAIIGGFVTESGEKIKGLNEYINLYNQKTKQKLPKFKPLYKQVLSDRESLSFYGEGYTSDEEVLEVFRNTLNKNSEIFSSIKKLEKLFKNFDEYSSAGIFVKNGPAISTISKDIFGEWNVIRDKWNAEYDDIHLKKKAVVTEKYEDDRRKSFKKIGSFSLEQLQEYADADLSVVEKLKEIIIQKVDEIYKVYGSSEKLFDADFVLEKSLKKNDAVVAIMKDLLDSVKSFENYIKAFFGEGKETNRDESFYGDFVLAYDILLKVDHIYDAIRNYVTQKP

SEQ ID NO: 551 - protein, 1243 aa, synthetic construct
KFKLYFQNPQFMGGWDKDKETDYRATILRYGSKYYLAIMDKKYAKCLQKIDKDDVNGNYEKINYKLLPGPNKMLPKVFFSKKWMAYYNPSEDIQKIYKNGTFKKGDMFNLNDCHKLIDFFKDSISRYPKWSNAYDFNFSETEKYKDIAGFYREVEEQGYKVSFESASKKEVDKLVEEGKLYMFQIYNKDFSDKSHGTPNLHTMYFKLLFDENNHGQIRLSGGAELFMRRASLKKEELVVHPANSPIANKNPDNPKKTTTLSYDVYKDKRFSEDQYELHIPIAINKCPKNIFKINTEVRVLLKHDDNPYVIGIDRGERNLLYIVVVDGKGNIVEQYSLNEIINNFNGIRIKTDYHSLLDKKEKERFEARQNWTSIENIKELKAGYISQVVHKICELVEKYDAVIALEDLNSGFKNSRVKVEKQVYQKFEKMLIDKLNYMVDKKSNPCATGGALKGYQITNKFESFKSMSTQNGFIFYIPAWLTSKIDPSTGFVNLLKTKYTSIADSKKFISSFDRIMYVPEEDLFEFALDYKNFSRTDADYIKKWKLYSYGNRIRIFRNPKKNNVFDWEEVCLTSAYKELFNKYGINYQQGDIRALLCEQSDKAFYSSFMALMSLMLQMRNSITGRTDVDFLISPVKNSDGIFYDSRNYEAQENAILPKNADANGAYNIARKVLWAIGQFKKAEDEKLDKVKIAISNKEWLEYAQTSVKHGSSGSSGSSGSSGSSGSKLEKFTNCYSLSKTLRFKAIPVGKTQENIDNKRLLVEDEKRAEDYKGVKKLLDRYYLSFINDVLHSIKLKNLNNYISLFRKKTRTEKENKELENLEINLRKEIAKAFKGNEGYKSLFKKDIIETILPEFLDDKDEIALVNSFNGFTTAFTGFFDNRENMFSEEAKSTSIAFRCINENLTRYISNMDIFEKVDAIFDKHEVQEIKEKILNSDYDVEDFFEGEFFNFVLTQEGIDVYNAIIGGFVTESGEKIKGLNEYINLYNQKTKQKLPKFKPLYKQVLSDRESLSFYGEGYTSDEEVLEVFRNTLNKNSEIFSSIKKLEKLFKNFDEYSSAGIFVKNGPAISTISKDIFGEWNVIRDKWNAEYDDIHLKKKAVVTEKYEDDRRKSFKKIGSFSLEQLQEYADADLSVVEKLKEIIIQKVDEIYKVYGSSEKLFDADFVLEKSLKKNDAVVAIMKDLLDSVKSFENYIKAFFGEGKETNRDESFYGDFVLAYDILLKVDHIYDAIRNYVTQKPYSKD

SEQ ID NO: 552 - protein, 1243 aa, synthetic construct
KLYFQNPQFMGGWDKDKETDYRATILRYGSKYYLAIMDKKYAKCLQKIDKDDVNGNYEKINYKLLPGPNKMLPKVFFSKKWMAYYNPSEDIQKIYKNGTFKKGDMFNLNDCHKLIDFFKDSISRYPKWSNAYDFNFSETEKYKDIAGFYREVEEQGYKVSFESASKKEVDKLVEEGKLYMFQIYNKDFSDKSHGTPNLHTMYFKLLFDENNHGQIRLSGGAELFMRRASLKKEELVVHPANSPIANKNPDNPKKTTTLSYDVYKDKRFSEDQYELHIPIAINKCPKNIFKINTEVRVLLKHDDNPYVIGIDRGERNLLYIVVVDGKGNIVEQYSLNEIINNFNGIRIKTDYHSLLDKKEKERFEARQNWTSIENIKELKAGYISQVVHKICELVEKYDAVIALEDLNSGFKNSRVKVEKQVYQKFEKMLIDKLNYMVDKKSNPCATGGALKGYQITNKFESFKSMSTQNGFIFYIPAWLTSKIDPSTGFVNLLKTKYTSIADSKKFISSFDRIMYVPEEDLFEFALDYKNFSRTDADYIKKWKLYSYGNRIRIFRNPKKNNVFDWEEVCLTSAYKELFNKYGINYQQGDIRALLCEQSDKAFYSSFMALMSLMLQMRNSITGRTDVDFLISPVKNSDGIFYDSRNYEAQENAILPKNADANGAYNIARKVLWAIGQFKKAEDEKLDKVKIAISNKEWLEYAQTSVKHGSSGSSGSSGSSGSSGSKLEKFTNCYSLSKTLRFKAIPVGKTQENIDNKRLLVEDEKRAEDYKGVKKLLDRYYLSFINDVLHSIKLKNLNNYISLFRKKTRTEKENKELENLEINLRKEIAKAFKGNEGYKSLFKKDIIETILPEFLDDKDEIALVNSFNGFTTAFTGFFDNRENMFSEEAKSTSIAFRCINENLTRYISNMDIFEKVDAIFDKHEVQEIKEKILNSDYDVEDFFEGEFFNFVLTQEGIDVYNAIIGGFVTESGEKIKGLNEYINLYNQKTKQKLPKFKPLYKQVLSDRESLSFYGEGYTSDEEVLEVFRNTLNKNSEIFSSIKKLEKLFKNFDEYSSAGIFVKNGPAISTISKDIFGEWNVIRDKWNAEYDDIHLKKKAVVTEKYEDDRRKSFKKIGSFSLEQLQEYADADLSVVEKLKEIIIQKVDEIYKVYGSSEKLFDADFVLEKSLKKNDAVVAIMKDLLDSVKSFENYIKAFFGEGKETNRDESFYGDFVLAYDILLKVDHIYDAIRNYVTQKPYSKDKF

SEQ ID NO: 553 - protein, 1243 aa, synthetic construct
ADFVLEKSLKKNDAVVAIMKDLLDSVKSFENYIKAFFGEGKETNRDESFYGDFVLAYDILLKVDHIYDAIRNYVTQKPYSKDKFKLYFQNPQFMGGWDKDKETDYRATILRYGSKYYLAIMDKKYAKCLQKIDKDDVNGNYEKINYKLLPGPNKMLPKVFFSKKWMAYYNPSEDIQKIYKNGTFKKGDMFNLNDCHKLIDFFKDSISRYPKWSNAYDFNFSETEKYKDIAGFYREVEEQGYKVSFESASKKEVDKLVEEGKLYMFQIYNKDFSDKSHGTPNLHTMYFKLLFDENNHGQIRLSGGAELFMRRASLKKEELVVHPANSPIANKNPDNPKKTTTLSYDVYKDKRFSEDQYELHIPIAINKCPKNIFKINTEVRVLLKHDDNPYVIGIDRGERNLLYIVVVDGKGNIVEQYSLNEIINNFNGIRIKTDYHSLLDKKEKERFEARQNWTSIENIKELKAGYISQVVHKICELVEKYDAVIALEDLNSGFKNSRVKVEKQVYQKFEKMLIDKLNYMVDKKSNPCATGGALKGYQITNKFESFKSMSTQNGFIFYIPAWLTSKIDPSTGFVNLLKTKYTSIADSKKFISSFDRIMYVPEEDLFEFALDYKNFSRTDADYIKKWKLYSYGNRIRIFRNPKKNNVFDWEEVCLTSAYKELFNKYGINYQQGDIRALLCEQSDKAFYSSFMALMSLMLQMRNSITGRTDVDFLISPVKNSDGIFYDSRNYEAQENAILPKNADANGAYNIARKVLWAIGQFKKAEDEKLDKVKIAISNKEWLEYAQTSVKHGSSGSSGSSGSSGSSGSKLEKFTNCYSLSKTLRFKAIPVGKTQENIDNKRLLVEDEKRAEDYKGVKKLLDRYYLSFINDVLHSIKLKNLNNYISLFRKKTRTEKENKELENLEINLRKEIAKAFKGNEGYKSLFKKDIIETILPEFLDDKDEIALVNSFNGFTTAFTGFFDNRENMFSEEAKSTSIAFRCINENLTRYISNMDIFEKVDAIFDKHEVQEIKEKILNSDYDVEDFFEGEFFNFVLTQEGIDVYNAIIGGFVTESGEKIKGLNEYINLYNQKTKQKLPKFKPLYKQVLSDRESLSFYGEGYTSDEEVLEVFRNTLNKNSEIFSSIKKLEKLFKNFDEYSSAGIFVKNGPAISTISKDIFGEWNVIRDKWNAEYDDIHLKKKAVVTEKYEDDRRKSFKKIGSFSLEQLQEYADADLSVVEKLKEIIIQKVDEIYKVYGSSEKLFD

SEQ ID NO: 554 - protein, 1243 aa, synthetic construct
LEKSLKKNDAVVAIMKDLLDSVKSFENYIKAFFGEGKETNRDESFYGDFVLAYDILLKVDHIYDAIRNYVTQKPYSKDKFKLYFQNPQFMGGWDKDKETDYRATILRYGSKYYLAIMDKKYAKCLQKIDKDDVNGNYEKINYKLLPGPNKMLPKVFFSKKWMAYYNPSEDIQKIYKNGTFKKGDMFNLNDCHKLIDFFKDSISRYPKWSNAYDFNFSETEKYKDIAGFYREVEEQGYKVSFESASKKEVDKLVEEGKLYMFQIYNKDFSDKSHGTPNLHTMYFKLLFDENNHGQIRLSGGAELFMRRASLKKEELVVHPANSPIANKNPDNPKKTTTLSYDVYKDKRFSEDQYELHIPIAINKCPKNIFKINTEVRVLLKHDDNPYVIGIDRGERNLLYIVVVDGKGNIVEQYSLNEIINNFNGIRIKTDYHSLLDKKEKERFEARQNWTSIENIKELKAGYISQVVHKICELVEKYDAVIALEDLNSGFKNSRVKVEKQVYQKFEKMLIDKLNYMVDKKSNPCATGGALKGYQITNKFESFKSMSTQNGFIFYIPAWLTSKIDPSTGFVNLLKTKYTSIADSKKFISSFDRIMYVPEEDLFEFALDYKNFSRTDADYIKKWKLYSYGNRIRIFRNPKKNNVFDWEEVCLTSAYKELFNKYGINYQQGDIRALLCEQSDKAFYSSFMALMSLMLQMRNSITGRTDVDFLISPVKNSDGIFYDSRNYEAQENAILPKNADANGAYNIARKVLWAIGQFKKAEDEKLDKVKIAISNKEWLEYAQTSVKHGSSGSSGSSGSSGSSGSKLEKFTNCYSLSKTLRFKAIPVGKTQENIDNKRLLVEDEKRAEDYKGVKKLLDRYYLSFINDVLHSIKLKNLNNYISLFRKKTRTEKENKELENLEINLRKEIAKAFKGNEGYKSLFKKDIIETILPEFLDDKDEIALVNSFNGFTTAFTGFFDNRENMFSEEAKSTSIAFRCINENLTRYISNMDIFEKVDAIFDKHEVQEIKEKILNSDYDVEDFFEGEFFNFVLTQEGIDVYNAIIGGFVTESGEKIKGLNEYINLYNQKTKQKLPKFKPLYKQVLSDRESLSFYGEGYTSDEEVLEVFRNTLNKNSEIFSSIKKLEKLFKNFDEYSSAGIFVKNGPAISTISKDIFGEWNVIRDKWNAEYDDIHLKKKAVVTEKYEDDRRKSFKKIGSFSLEQLQEYADADLSVVEKLKEIIIQKVDEIYKVYGSSEKLFDADFV

SEQ ID NO: 555 - protein, 1243 aa, synthetic construct
KKNDAVVAIMKDLLDSVKSFENYIKAFFGEGKETNRDESFYGDFVLAYDILLKVDHIYDAIRNYVTQKPYSKDKFKLYFQNPQFMGGWDKDKETDYRATILRYGSKYYLAIMDKKYAKCLQKIDKDDVNGNYEKINYKLLPGPNKMLPKVFFSKKWMAYYNPSEDIQKIYKNGTFKKGDMFNLNDCHKLIDFFKDSISRYPKWSNAYDFNFSETEKYKDIAGFYREVEEQGYKVSFESASKKEVDKLVEEGKLYMFQIYNKDFSDKSHGTPNLHTMYFKLLFDENNHGQIRLSGGAELFMRRASLKKEELVVHPANSPIANKNPDNPKKTTTLSYDVYKDKRFSEDQYELHIPIAINKCPKNIFKINTEVRVLLKHDDNPYVIGIDRGERNLLYIVVVDGKGNIVEQYSLNEIINNFNGIRIKTDYHSLLDKKEKERFEARQNWTSIENIKELKAGYISQVVHKICELVEKYDAVIALEDLNSGFKNSRVKVEKQVYQKFEKMLIDKLNYMVDKKSNPCATGGALKGYQITNKFESFKSMSTQNGFIFYIPAWLTSKIDPSTGFVNLLKTKYTSIADSKKFISSFDRIMYVPEEDLFEFALDYKNFSRTDADYIKKWKLYSYGNRIRIFRNPKKNNVFDWEEVCLTSAYKELFNKYGINYQQGDIRALLCEQSDKAFYSSFMALMSLMLQMRNSITGRTDVDFLISPVKNSDGIFYDSRNYEAQENAILPKNADANGAYNIARKVLWAIGQFKKAEDEKLDKVKIAISNKEWLEYAQTSVKHGSSGSSGSSGSSGSSGSKLEKFTNCYSLSKTLRFKAIPVGKTQENIDNKRLLVEDEKRAEDYKGVKKLLDRYYLSFINDVLHSIKLKNLNNYISLFRKKTRTEKENKELENLEINLRKEIAKAFKGNEGYKSLFKKDIIETILPEFLDDKDEIALVNSFNGFTTAFTGFFDNRENMFSEEAKSTSIAFRCINENLTRYISNMDIFEKVDAIFDKHEVQEIKEKILNSDYDVEDFFEGEFFNFVLTQEGIDVYNAIIGGFVTESGEKIKGLNEYINLYNQKTKQKLPKFKPLYKQVLSDRESLSFYGEGYTSDEEVLEVFRNTLNKNSEIFSSIKKLEKLFKNFDEYSSAGIFVKNGPAISTISKDIFGEWNVIRDKWNAEYDDIHLKKKAVVTEKYEDDRRKSFKKIGSFSLEQLQEYADADLSVVEKLKEIIIQKVDEIYKVYGSSEKLFDADFVLEKSL

SEQ ID NO: 556 - protein, 1243 aa, synthetic construct
DAVVAIMKDLLDSVKSFENYIKAFFGEGKETNRDESFYGDFVLAYDILLKVDHIYDAIRNYVTQKPYSKDKFKLYFQNPQFMGGWDKDKETDYRATILRYGSKYYLAIMDKKYAKCLQKIDKDDVNGNYEKINYKLLPGPNKMLPKVFFSKKWMAYYNPSEDIQKIYKNGTFKKGDMFNLNDCHKLIDFFKDSISRYPKWSNAYDFNFSETEKYKDIAGFYREVEEQGYKVSFESASKKEVDKLVEEGKLYMFQIYNKDFSDKSHGTPNLHTMYFKLLFDENNHGQIRLSGGAELFMRRASLKKEELVVHPANSPIANKNPDNPKKTTTLSYDVYKDKRFSEDQYELHIPIAINKCPKNIFKINTEVRVLLKHDDNPYVIGIDRGERNLLYIVVVDGKGNIVEQYSLNEIINNFNGIRIKTDYHSLLDKKEKERFEARQNWTSIENIKELKAGYISQVVHKICELVEKYDAVIALEDLNSGFKNSRVKVEKQVYQKFEKMLIDKLNYMVDKKSNPCATGGALKGYQITNKFESFKSMSTQNGFIFYIPAWLTSKIDPSTGFVNLLKTKYTSIADSKKFISSFDRIMYVPEEDLFEFALDYKNFSRTDADYIKKWKLYSYGNRIRIFRNPKKNNVFDWEEVCLTSAYKELFNKYGINYQQGDIRALLCEQSDKAFYSSFMALMSLMLQMRNSITGRTDVDFLISPVKNSDGIFYDSRNYEAQENAILPKNADANGAYNIARKVLWAIGQFKKAEDEKLDKVKIAISNKEWLEYAQTSVKHGSSGSSGSSGSSGSSGSKLEKFTNCYSLSKTLRFKAIPVGKTQENIDNKRLLVEDEKRAEDYKGVKKLLDRYYLSFINDVLHSIKLKNLNNYISLFRKKTRTEKENKELENLEINLRKEIAKAFKGNEGYKSLFKKDIIETILPEFLDDKDEIALVNSFNGFTTAFTGFFDNRENMFSEEAKSTSIAFRCINENLTRYISNMDIFEKVDAIFDKHEVQEIKEKILNSDYDVEDFFEGEFFNFVLTQEGIDVYNAIIGGFVTESGEKIKGLNEYINLYNQKTKQKLPKFKPLYKQVLSDRESLSFYGEGYTSDEEVLEVFRNTLNKNSEIFSSIKKLEKLFKNFDEYSSAGIFVKNGPAISTISKDIFGEWNVIRDKWNAEYDDIHLKKKAVVTEKYEDDRRKSFKKIGSFSLEQLQEYADADLSVVEKLKEIIIQKVDEIYKVYGSSEKLFDADFVLEKSLKKN

SEQ ID NO: 557 - protein, 1243 aa, synthetic construct
EQSDKAFYSSFMALMSLMLQMRNSITGRTDVDFLISPVKNSDGIFYDSRNYEAQENAILPKNADANGAYNIARKVLWAIGQFKKAEDEKLDKVKIAISNKEWLEYAQTSVKHGSSGSSGSSGSSGSSGSKLEKFTNCYSLSKTLRFKAIPVGKTQENIDNKRLLVEDEKRAEDYKGVKKLLDRYYLSFINDVLHSIKLKNLNNYISLFRKKTRTEKENKELENLEINLRKEIAKAFKGNEGYKSLFKKDIIETILPEFLDDKDEIALVNSFNGFTTAFTGFFDNRENMFSEEAKSTSIAFRCINENLTRYISNMDIFEKVDAIFDKHEVQEIKEKILNSDYDVEDFFEGEFFNFVLTQEGIDVYNAIIGGFVTESGEKIKGLNEYINLYNQKTKQKLPKFKPLYKQVLSDRESLSFYGEGYTSDEEVLEVFRNTLNKNSEIFSSIKKLEKLFKNFDEYSSAGIFVKNGPAISTISKDIFGEWNVIRDKWNAEYDDIHLKKKAVVTEKYEDDRRKSFKKIGSFSLEQLQEYADADLSVVEKLKEIIIQKVDEIYKVYGSSEKLFDADFVLEKSLKKNDAVVAIMKDLLDSVKSFENYIKAFFGEGKETNRDESFYGDFVLAYDILLKVDHIYDAIRNYVTQKPYSKDKFKLYFQNPQFMGGWDKDKETDYRATILRYGSKYYLAIMDKKYAKCLQKIDKDDVNGNYEKINYKLLPGPNKMLPKVFFSKKWMAYYNPSEDIQKIYKNGTFKKGDMFNLNDCHKLIDFFKDSISRYPKWSNAYDFNFSETEKYKDIAGFYREVEEQGYKVSFESASKKEVDKLVEEGKLYMFQIYNKDFSDKSHGTPNLHTMYFKLLFDENNHGQIRLSGGAELFMRRASLKKEELVVHPANSPIANKNPDNPKKTTTLSYDVYKDKRFSEDQYELHIPIAINKCPKNIFKINTEVRVLLKHDDNPYVIGIDRGERNLLYIVVVDGKGNIVEQYSLNEIINNFNGIRIKTDYHSLLDKKEKERFEARQNWTSIENIKELKAGYISQVVHKICELVEKYDAVIALEDLNSGFKNSRVKVEKQVYQKFEKMLIDKLNYMVDKKSNPCATGGALKGYQITNKFESFKSMSTQNGFIFYIPAWLTSKIDPSTGFVNLLKTKYTSIADSKKFISSFDRIMYVPEEDLFEFALDYKNFSRTDADYIKKWKLYSYGNRIRIFRNPKKNNVFDWEEVCLTSAYKELFNKYGINYQQGDIRALLC

SEQ ID NO: 558 - protein, 1243 aa, synthetic construct
QSDKAFYSSFMALMSLMLQMRNSITGRTDVDFLISPVKNSDGIFYDSRNYEAQENAILPKNADANGAYNIARKVLWAIGQFKKAEDEKLDKVKIAISNKEWLEYAQTSVKHGSSGSSGSSGSSGSSGSKLEKFTNCYSLSKTLRFKAIPVGKTQENIDNKRLLVEDEKRAEDYKGVKKLLDRYYLSFINDVLHSIKLKNLNNYISLFRKKTRTEKENKELENLEINLRKEIAKAFKGNEGYKSLFKKDIIETILPEFLDDKDEIALVNSFNGFTTAFTGFFDNRENMFSEEAKSTSIAFRCINENLTRYISNMDIFEKVDAIFDKHEVQEIKEKILNSDYDVEDFFEGEFFNFVLTQEGIDVYNAIIGGFVTESGEKIKGLNEYINLYNQKTKQKLPKFKPLYKQVLSDRESLSFYGEGYTSDEEVLEVFRNTLNKNSEIFSSIKKLEKLFKNFDEYSSAGIFVKNGPAISTISKDIFGEWNVIRDKWNAEYDDIHLKKKAVVTEKYEDDRRKSFKKIGSFSLEQLQEYADADLSVVEKLKEIIIQKVDEIYKVYGSSEKLFDADFVLEKSLKKNDAVVAIMKDLLDSVKSFENYIKAFFGEGKETNRDESFYGDFVLAYDILLKVDHIYDAIRNYVTQKPYSKDKFKLYFQNPQFMGGWDKDKETDYRATILRYGSKYYLAIMDKKYAKCLQKIDKDDVNGNYEKINYKLLPGPNKMLPKVFFSKKWMAYYNPSEDIQKIYKNGTFKKGDMFNLNDCHKLIDFFKDSISRYPKWSNAYDFNFSETEKYKDIAGFYREVEEQGYKVSFESASKKEVDKLVEEGKLYMFQIYNKDFSDKSHGTPNLHTMYFKLLFDENNHGQIRLSGGAELFMRRASLKKEELVVHPANSPIANKNPDNPKKTTTLSYDVYKDKRFSEDQYELHIPIAINKCPKNIFKINTEVRVLLKHDDNPYVIGIDRGERNLLYIVVVDGKGNIVEQYSLNEIINNFNGIRIKTDYHSLLDKKEKERFEARQNWTSIENIKELKAGYISQVVHKICELVEKYDAVIALEDLNSGFKNSRVKVEKQVYQKFEKMLIDKLNYMVDKKSNPCATGGALKGYQITNKFESFKSMSTQNGFIFYIPAWLTSKIDPSTGFVNLLKTKYTSIADSKKFISSFDRIMYVPEEDLFEFALDYKNFSRTDADYIKKWKLYSYGNRIRIFRNPKKNNVFDWEEVCLTSAYKELFNKYGINYQQGDIRALLCE

SEQ ID NO: 559 - protein, 1243 aa, synthetic construct
KAFYSSFMALMSLMLQMRNSITGRTDVDFLISPVKNSDGIFYDSRNYEAQENAILPKNADANGAYNIARKVLWAIGQFKKAEDEKLDKVKIAISNKEWLEYAQTSVKHGSSGSSGSSGSSGSSGSKLEKFTNCYSLSKTLRFKAIPVGKTQENIDNKRLLVEDEKRAEDYKGVKKLLDRYYLSFINDVLHSIKLKNLNNYISLFRKKTRTEKENKELENLEINLRKEIAKAFKGNEGYKSLFKKDIIETILPEFLDDKDEIALVNSFNGFTTAFTGFFDNRENMFSEEAKSTSIAFRCINENLTRYISNMDIFEKVDAIFDKHEVQEIKEKILNSDYDVEDFFEGEFFNFVLTQEGIDVYNAIIGGFVTESGEKIKGLNEYINLYNQKTKQKLPKFKPLYKQVLSDRESLSFYGEGYTSDEEVLEVFRNTLNKNSEIFSSIKKLEKLFKNFDEYSSAGIFVKNGPAISTISKDIFGEWNVIRDKWNAEYDDIHLKKKAVVTEKYEDDRRKSFKKIGSFSLEQLQEYADADLSVVEKLKEIIIQKVDEIYKVYGSSEKLFDADFVLEKSLKKNDAVVAIMKDLLDSVKSFENYIKAFFGEGKETNRDESFYGDFVLAYDILLKVDHIYDAIRNYVTQKPYSKDKFKLYFQNPQFMGGWDKDKETDYRATILRYGSKYYLAIMDKKYAKCLQKIDKDDVNGNYEKINYKLLPGPNKMLPKVFFSKKWMAYYNPSEDIQKIYKNGTFKKGDMFNLNDCHKLIDFFKDSISRYPKWSNAYDFNFSETEKYKDIAGFYREVEEQGYKVSFESASKKEVDKLVEEGKLYMFQIYNKDFSDKSHGTPNLHTMYFKLLFDENNHGQIRLSGGAELFMRRASLKKEELVVHPANSPIANKNPDNPKKTTTLSYDVYKDKRFSEDQYELHIPIAINKCPKNIFKINTEVRVLLKHDDNPYVIGIDRGERNLLYIVVVDGKGNIVEQYSLNEIINNFNGIRIKTDYHSLLDKKEKERFEARQNWTSIENIKELKAGYISQVVHKICELVEKYDAVIALEDLNSGFKNSRVKVEKQVYQKFEKMLIDKLNYMVDKKSNPCATGGALKGYQITNKFESFKSMSTQNGFIFYIPAWLTSKIDPSTGFVNLLKTKYTSIADSKKFISSFDRIMYVPEEDLFEFALDYKNFSRTDADYIKKWKLYSYGNRIRIFRNPKKNNVFDWEEVCLTSAYKELFNKYGINYQQGDIRALLCEQSD

SEQ ID NO: 560 - protein, 1243 aa, synthetic construct
AFYSSFMALMSLMLQMRNSITGRTDVDFLISPVKNSDGIFYDSRNYEAQENAILPKNADANGAYNIARKVLWAIGQFKKAEDEKLDKVKIAISNKEWLEYAQTSVKHGSSGSSGSSGSSGSSGSKLEKFTNCYSLSKTLRFKAIPVGKTQENIDNKRLLVEDEKRAEDYKGVKKLLDRYYLSFINDVLHSIKLKNLNNYISLFRKKTRTEKENKELENLEINLRKEIAKAFKGNEGYKSLFKKDIIETILPEFLDDKDEIALVNSFNGFTTAFTGFFDNRENMFSEEAKSTSIAFRCINENLTRYISNMDIFEKVDAIFDKHEVQEIKEKILNSDYDVEDFFEGEFFNFVLTQEGIDVYNAIIGGFVTESGEKIKGLNEYINLYNQKTKQKLPKFKPLYKQVLSDRESLSFYGEGYTSDEEVLEVFRNTLNKNSEIFSSIKKLEKLFKNFDEYSSAGIFVKNGPAISTISKDIFGEWNVIRDKWNAEYDDIHLKKKAVVTEKYEDDRRKSFKKIGSFSLEQLQEYADADLSVVEKLKEIIIQKVDEIYKVYGSSEKLFDADFVLEKSLKKNDAVVAIMKDLLDSVKSFENYIKAFFGEGKETNRDESFYGDFVLAYDILLKVDHIYDAIRNYVTQKPYSKDKFKLYFQNPQFMGGWDKDKETDYRATILRYGSKYYLAIMDKKYAKCLQKIDKDDVNGNYEKINYKLLPGPNKMLPKVFFSKKWMAYYNPSEDIQKIYKNGTFKKGDMFNLNDCHKLIDFFKDSISRYPKWSNAYDFNFSETEKYKDIAGFYREVEEQGYKVSFESASKKEVDKLVEEGKLYMFQIYNKDFSDKSHGTPNLHTMYFKLLFDENNHGQIRLSGGAELFMRRASLKKEELVVHPANSPIANKNPDNPKKTTTLSYDVYKDKRFSEDQYELHIPIAINKCPKNIFKINTEVRVLLKHDDNPYVIGIDRGERNLLYIVVVDGKGNIVEQYSLNEIINNFNGIRIKTDYHSLLDKKEKERFEARQNWTSIENIKELKAGYISQVVHKICELVEKYDAVIALEDLNSGFKNSRVKVEKQVYQKFEKMLIDKLNYMVDKKSNPCATGGALKGYQITNKFESFKSMSTQNGFIFYIPAWLTSKIDPSTGFVNLLKTKYTSIADSKKFISSFDRIMYVPEEDLFEFALDYKNFSRTDADYIKKWKLYSYGNRIRIFRNPKKNNVFDWEEVCLTSAYKELFNKYGINYQQGDIRALLCEQSDK

SEQ ID NO: 561 - DNA, 3729 bp, synthetic construct
  source 1..3729: mol_type = other DNA
aagacccgcaccgagaaggagaacaaggagctggagaacctggagatcaacctccgcaaggaaatcgccaaagcgttcaagggcaatgaagggtacaagagcctcttcaagaaagacatcatcgaaactatcctcccagagtttctcgatgacaaggacgagatcgcgctggtgaactcctttaacgggttcacaaccgcgtttaccggcttctttgataacagggaaaatatgttctccgaggaggccaagtccaccagcatcgccttcaggtgtatcaacgagaacctcacccgctacatttccaatatggacattttcgagaaggtggatgcgatcttcgataagcacgaggtgcaggagatcaaagagaagattctcaattccgattatgacgtcgaggatttcttcgaaggggagttctttaattttgtgctcacacaagagggcattgacgtgtacaacgcgattatcgggggcttcgtcacagagtccggggagaagattaaggggctgaatgagtacatcaatctgtacaatcagaagaccaagcagaaactgccgaaattcaagccgctctacaagcaagtcctgtccgatagggaaagcctctccttctacggcgagggctataccagcgacgaggaggtgctggaagtcttccgcaacacactgaataagaatagcgagattttctcctccatcaagaagctcgagaagctctttaagaactttgacgagtacagctccgccgggattttcgtgaagaacgggccggcgatcagcaccatctccaaggacatctttggcgagtggaacgtcatcagggacaagtggaacgccgagtacgacgacatccacctgaagaagaaggcggtggtgaccgagaagtatgaggacgatcgcaggaagtccttcaaaaaaatcggctccttcagcctcgaacagctccaggagtatgccgatgcggatctgtccgtcgtcgagaagctgaaggaaatcatcattcagaaggtcgacgagatctataaagtgtacgggtccagcgagaagctgttcgacgccgactttgtgctcgagaagtccctcaaaaagaatgacgccgtggtggccattatgaaagacctgctcgactccgtgaagtccttcgaaaattacattaaagcgttctttggggaggggaaggaaactaacagggatgagtccttctatggcgactttgtcctcgcgtacgacatcctgctgaaggtcgaccacatttacgacgcgatccgcaactacgtgacacagaagccgtactccaaagacaagttcaagctgtacttccagaacccgcaatttatggggggctgggacaaggataaagagacagactaccgcgcgacaattctccgctatggctccaaatactatctggccatcatggacaagaagtacgcgaagtgcctgcagaagatcgacaaagacgacgtcaatggcaactatgaaaagatcaactacaagctgctgccgggcccgaacaagatgctcccgaaggtgttcttcagcaagaagtggatggcctactacaatccaagcgaggatattcagaaaatctataaaaacgggaccttcaagaagggggacatgtttaacctcaacgactgccacaagctcattgatttcttcaaggatagcatttcccgctacccgaaatggtccaatgcgtacgattttaacttctccgagacagaaaagtacaaagacatcgcgggcttttacagggaggtggaggagcaagggtataaagtttcttttgaatccgcgagcaagaaggaagtcgacaagctcgtcgaggagggcaagctctacatgttccaaatttataacaaggacttttccgacaagagccatgggaccccaaacctccacaccatgtacttcaaactgctctttgacgagaacaaccacgggcaaatcaggctgagcggcggcgccgaattattcatgcgcagggcctccctcaagaaggaagagctggtcgtccatccagccaattccccgatcgcgaacaagaacccggacaatccgaaaaagaccaccaccctgtcctacgacgtctacaaggacaaacgcttcagcgaagaccagtacgaattacacatcccaattgcgattaataagtgcccaaagaatatcttcaaaattaatacagaggtcagggtgctgctcaaacacgacgacaatccgtatgtcatcggcattgacaggggcgagcgcaatctgctctatatcgtggtcgtggatgggaagggcaatattgtggagcagtactccctgaacgagattatcaacaacttcaatgggattaggattaagaccgactatcacagcctgctcgacaagaaagaaaaagagaggtttgaggcccgccaaaactggacctccattgagaatatcaaagaattaaaggccggctatatttcccaagtcgtccacaagatctgcgagctggtggagaaatatgacgccgtgattgcgctcgaagacttaaattctgggttcaagaactcccgcgtgaaggtggaaaaacaggtgtatcagaaattcgagaaaatgctgatcgacaaactcaattatatggtggataagaagtccaacccgtgtgccacagggggcgcgctgaagggctatcagatcaccaacaagttcgagagcttcaagagcatgagcacccagaacgggtttattttctacatcccggcgtggctcacctccaagattgacccgagcaccggcttcgtgaacctcctgaagacaaagtatacctccattgccgacagcaagaagtttatctcctccttcgaccgcattatgtatgtgccggaggaggacctcttcgagttcgccctcgactacaaaaacttcagccgcacagatgcggattacatcaagaagtggaagctgtactcctacgggaacaggatccgcatcttcaggaatccaaaaaaaaataacgtctttgactgggaggaagtgtgcctgacatccgcctacaaggaactgttcaataaatacggcatcaattaccagcagggcgacattcgcgccctcctctgtgagcagtccgacaaagcgttttactccagcttcatggccctcatgtccctgatgctccaaatgaggaatagcatcacagggcgcaccgacgtcgacttcctcatcagcccggtgaagaactccgacgggatcttttacgactcccgcaactatgaggcgcaagagaatgcgatcctcccgaagaacgccgatgcgaacggggcctataatatcgccaggaaagtgctctgggccatcgggcagttcaaaaaggcggaggatgagaagctcgacaaggtgaaaattgccatttccaacaaggagtggctggagtacgcgcagacctccgtgaagcacggctcctctggcagctccggctctagcggctcctctggcagctccggctccaagctggagaagtttacaaactgttacagcctctccaaaaccctcaggtttaaagcgatcccggtgggcaagacccaggagaacatcgacaacaagaggctcctggtggaagacgagaagcgcgccgaagactacaagggcgtgaagaagctgctcgataggtactacctcagctttattaacgacgtgctgcacagcatcaaactcaagaatctcaacaactacatctccctcttccgcaaa

SEQ ID NO: 562 - DNA, 3729 bp, synthetic construct
  source 1..3729: mol_type = other DNA
acccgcaccgagaaggagaacaaggagctggagaacctggagatcaacctccgcaaggaaatcgccaaagcgttcaagggcaatgaagggtacaagagcctcttcaagaaagacatcatcgaaactatcctcccagagtttctcgatgacaaggacgagatcgcgctggtgaactcctttaacgggttcacaaccgcgtttaccggcttctttgataacagggaaaatatgttctccgaggaggccaagtccaccagcatcgccttcaggtgtatcaacgagaacctcacccgctacatttccaatatggacattttcgagaaggtggatgcgatcttcgataagcacgaggtgcaggagatcaaagagaagattctcaattccgattatgacgtcgaggatttcttcgaaggggagttctttaattttgtgctcacacaagagggcattgacgtgtacaacgcgattatcgggggcttcgtcacagagtccggggagaagattaaggggctgaatgagtacatcaatctgtacaatcagaagaccaagcagaaactgccgaaattcaagccgctctacaagcaagtcctgtccgatagggaaagcctctccttctacggcgagggctataccagcgacgaggaggtgctggaagtcttccgcaacacactgaataagaatagcgagattttctcctccatcaagaagctcgagaagctctttaagaactttgacgagtacagctccgccgggattttcgtgaagaacgggccggcgatcagcaccatctccaaggacatctttggcgagtggaacgtcatcagggacaagtggaacgccgagtacgacgacatccacctgaagaagaaggcggtggtgaccgagaagtatgaggacgatcgcaggaagtccttcaaaaaaatcggctccttcagcctcgaacagctccaggagtatgccgatgcggatctgtccgtcgtcgagaagctgaaggaaatcatcattcagaaggtcgacgagatctataaagtgtacgggtccagcgagaagctgttcgacgccgactttgtgctcgagaagtccctcaaaaagaatgacgccgtggtggccattatgaaagacctgctcgactccgtgaagtccttcgaaaattacattaaagcgttctttggggaggggaaggaaactaacagggatgagtccttctatggcgactttgtcctcgcgtacgacatcctgctgaaggtcgaccacatttacgacgcgatccgcaactacgtgacacagaagccgtactccaaagacaagttcaagctgtacttccagaacccgcaatttatggggggctgggacaaggataaagagacagactaccgcgcgacaattctccgctatggctccaaatactatctggccatcatggacaagaagtacgcgaagtgcctgcagaagatcgacaaagacgacgtcaatggcaactatgaaaagatcaactacaagctgctgccgggcccgaacaagatgctcccgaaggtgttcttcagcaagaagtggatggcctactacaatccaagcgaggatattcagaaaatctataaaaacgggaccttcaagaagggggacatgtttaacctcaacgactgccacaagctcattgatttcttcaaggatagcatttcccgctacccgaaatggtccaatgcgtacgattttaacttctccgagacagaaaagtacaaagacatcgcgggcttttacagggaggtggaggagcaagggtataaagtttcttttgaatccgcgagcaagaaggaagtcgacaagctcgtcgaggagggcaagctctacatgttccaaatttataacaaggacttttccgacaagagccatgggaccccaaacctccacaccatgtacttcaaactgctctttgacgagaacaaccacgggcaaatcaggctgagcggcggcgccgaattattcatgcgcagggcctccctcaagaaggaagagctggtcgtccatccagccaattccccgatcgcgaacaagaacccggacaatccgaaaaagaccaccaccctgtcctacgacgtctacaaggacaaacgcttcagcgaagaccagtacgaattacacatcccaattgcgattaataagtgcccaaagaatatcttcaaaattaatacagaggtcagggtgctgctcaaacacgacgacaatccgtatgtcatcggcattgacaggggcgagcgcaatctgctctatatcgtggtcgtggatgggaagggcaatattgtggagcagtactccctgaacgagattatcaacaacttcaatgggattaggattaagaccgactatcacagcctgctcgacaagaaagaaaaagagaggtttgaggcccgccaaaactggacctccattgagaatatcaaagaattaaaggccggctatatttcccaagtcgtccacaagatctgcgagctggtggagaaatatgacgccgtgattgcgctcgaagacttaaattctgggttcaagaactcccgcgtgaaggtggaaaaacaggtgtatcagaaattcgagaaaatgctgatcgacaaactcaattatatggtggataagaagtccaacccgtgtgccacagggggcgcgctgaagggctatcagatcaccaacaagttcgagagcttcaagagcatgagcacccagaacgggtttattttctacatcccggcgtggctcacctccaagattgacccgagcaccggcttcgtgaacctcctgaagacaaagtatacctccattgccgacagcaagaagtttatctcctccttcgaccgcattatgtatgtgccggaggaggacctcttcgagttcgccctcgactacaaaaacttcagccgcacagatgcggattacatcaagaagtggaagctgtactcctacgggaacaggatccgcatcttcaggaatccaaaaaaaaataacgtctttgactgggaggaagtgtgcctgacatccgcctacaaggaactgttcaataaatacggcatcaattaccagcagggcgacattcgcgccctcctctgtgagcagtccgacaaagcgttttactccagcttcatggccctcatgtccctgatgctccaaatgaggaatagcatcacagggcgcaccgacgtcgacttcctcatcagcccggtgaagaactccgacgggatcttttacgactcccgcaactatgaggcgcaagagaatgcgatcctcccgaagaacgccgatgcgaacggggcctataatatcgccaggaaagtgctctgggccatcgggcagttcaaaaaggcggaggatgagaagctcgacaaggtgaaaattgccatttccaacaaggagtggctggagtacgcgcagacctccgtgaagcacggctcctctggcagctccggctctagcggctcctctggcagctccggctccaagctggagaagtttacaaactgttacagcctctccaaaaccctcaggtttaaagcgatcccggtgggcaagacccaggagaacatcgacaacaagaggctcctggtggaagacgagaagcgcgccgaagactacaagggcgtgaagaagctgctcgataggtactacctcagctttattaacgacgtgctgcacagcatcaaactcaagaatctcaacaactacatctccctcttccgcaaaaag

SEQ ID NO: 563 - DNA, 3729 bp, synthetic construct
  source 1..3729: mol_type = other DNA
gagaaggagaacaaggagctggagaacctggagatcaacctccgcaaggaaatcgccaaagcgttcaagggcaatgaagggtacaagagcctcttcaagaaagacatcatcgaaactatcctcccagagtttctcgatgacaaggacgagatcgcgctggtgaactcctttaacgggttcacaaccgcgtttaccggcttctttgataacagggaaaatatgttctccgaggaggccaagtccaccagcatcgccttcaggtgtatcaacgagaacctcacccgctacatttccaatatggacattttcgagaaggtggatgcgatcttcgataagcacgaggtgcaggagatcaaagagaagattctcaattccgattatgacgtcgaggatttcttcgaaggggagttctttaattttgtgctcacacaagagggcattgacgtgtacaacgcgattatcgggggcttcgtcacagagtccggggagaagattaaggggctgaatgagtacatcaatctgtacaatcagaagaccaagcagaaactgccgaaattcaagccgctctacaagcaagtcctgtccgatagggaaagcctctccttctacggcgagggctataccagcgacgaggaggtgctggaagtcttccgcaacacactgaataagaatagcgagattttctcctccatcaagaagctcgagaagctctttaagaactttgacgagtacagctccgccgggattttcgtgaagaacgggccggcgatcagcaccatctccaaggacatctttggcgagtggaacgtcatcagggacaagtggaacgccgagtacgacgacatccacctgaagaagaaggcggtggtgaccgagaagtatgaggacgatcgcaggaagtccttcaaaaaaatcggctccttcagcctcgaacagctccaggagtatgccgatgcggatctgtccgtcgtcgagaagctgaaggaaatcatcattcagaaggtcgacgagatctataaagtgtacgggtccagcgagaagctgttcgacgccgactttgtgctcgagaagtccctcaaaaagaatgacgccgtggtggccattatgaaagacctgctcgactccgtgaagtccttcgaaaattacattaaagcgttctttggggaggggaaggaaactaacagggatgagtccttctatggcgactttgtcctcgcgtacgacatcctgctgaaggtcgaccacatttacgacgcgatccgcaactacgtgacacagaagccgtactccaaagacaagttcaagctgtacttccagaacccgcaatttatggggggctgggacaaggataaagagacagactaccgcgcgacaattctccgctatggctccaaatactatctggccatcatggacaagaagtacgcgaagtgcctgcagaagatcgacaaagacgacgtcaatggcaactatgaaaagatcaactacaagctgctgccgggcccgaacaagatgctcccgaaggtgttcttcagcaagaagtggatggcctactacaatccaagcgaggatattcagaaaatctataaaaacgggaccttcaagaagggggacatgtttaacctcaacgactgccacaagctcattgatttcttcaaggatagcatttcccgctacccgaaatggtccaatgcgtacgattttaacttctccgagacagaaaagtacaaagacatcgcgggcttttacagggaggtggaggagcaagggtataaagtttcttttgaatccgcgagcaagaaggaagtcgacaagctcgtcgaggagggcaagctctacatgttccaaatttataacaaggacttttccgacaagagccatgggaccccaaacctccacaccatgtacttcaaactgctctttgacgagaacaaccacgggcaaatcaggctgagcggcggcgccgaattattcatgcgcagggcctccctcaagaaggaagagctggtcgtccatccagccaattccccgatcgcgaacaagaacccggacaatccgaaaaagaccaccaccctgtcctacgacgtctacaaggacaaacgcttcagcgaagaccagtacgaattacacatcccaattgcgattaataagtgcccaaagaatatcttcaaaattaatacagaggtcagggtgctgctcaaacacgacgacaatccgtatgtcatcggcattgacaggggcgagcgcaatctgctctatatcgtggtcgtggatgggaagggcaatattgtggagcagtactccctgaacgagattatcaacaacttcaatgggattaggattaagaccgactatcacagcctgctcgacaagaaagaaaaagagaggtttgaggcccgccaaaactggacctccattgagaatatcaaagaattaaaggccggctatatttcccaagtcgtccacaagatctgcgagctggtggagaaatatgacgccgtgattgcgctcgaagacttaaattctgggttcaagaactcccgcgtgaaggtggaaaaacaggtgtatcagaaattcgagaaaatgctgatcgacaaactcaattatatggtggataagaagtccaacccgtgtgccacagggggcgcgctgaagggctatcagatcaccaacaagttcgagagcttcaagagcatgagcacccagaacgggtttattttctacatcccggcgtggctcacctccaagattgacccgagcaccggcttcgtgaacctcctgaagacaaagtatacctccattgccgacagcaagaagtttatctcctccttcgaccgcattatgtatgtgccggaggaggacctcttcgagttcgccctcgactacaaaaacttcagccgcacagatgcggattacatcaagaagtggaagctgtactcctacgggaacaggatccgcatcttcaggaatccaaaaaaaaataacgtctttgactgggaggaagtgtgcctgacatccgcctacaaggaactgttcaataaatacggcatcaattaccagcagggcgacattcgcgccctcctctgtgagcagtccgacaaagcgttttactccagcttcatggccctcatgtccctgatgctccaaatgaggaatagcatcacagggcgcaccgacgtcgacttcctcatcagcccggtgaagaactccgacgggatcttttacgactcccgcaactatgaggcgcaagagaatgcgatcctcccgaagaacgccgatgcgaacggggcctataatatcgccaggaaagtgctctgggccatcgggcagttcaaaaaggcggaggatgagaagctcgacaaggtgaaaattgccatttccaacaaggagtggctggagtacgcgcagacctccgtgaagcacggctcctctggcagctccggctctagcggctcctctggcagctccggctccaagctggagaagtttacaaactgttacagcctctccaaaaccctcaggtttaaagcgatcccggtgggcaagacccaggagaacatcgacaacaagaggctcctggtggaagacgagaagcgcgccgaagactacaagggcgtgaagaagctgctcgataggtactacctcagctttattaacgacgtgctgcacagcatcaaactcaagaatctcaacaactacatctccctcttccgcaaaaagacccgcacc

SEQ ID NO: 564 - DNA, 3729 bp, synthetic construct
  source 1..3729: mol_type = other DNA
aaggagaacaaggagctggagaacctggagatcaacctccgcaaggaaatcgccaaagcgttcaagggcaatgaagggtacaagagcctcttcaagaaagacatcatcgaaactatcctcccagagtttctcgatgacaaggacgagatcgcgctggtgaactcctttaacgggttcacaaccgcgtttaccggcttctttgataacagggaaaatatgttctccgaggaggccaagtccaccagcatcgccttcaggtgtatcaacgagaacctcacccgctacatttccaatatggacattttcgagaaggtggatgcgatcttcgataagcacgaggtgcaggagatcaaagagaagattctcaattccgattatgacgtcgaggatttcttcgaaggggagttctttaattttgtgctcacacaagagggcattgacgtgtacaacgcgattatcgggggcttcgtcacagagtccggggagaagattaaggggctgaatgagtacatcaatctgtacaatcagaagaccaagcagaaactgccgaaattcaagccgctctacaagcaagtcctgtccgatagggaaagcctctccttctacggcgagggctataccagcgacgaggaggtgctggaagtcttccgcaacacactgaataagaatagcgagattttctcctccatcaagaagctcgagaagctctttaagaactttgacgagtacagctccgccgggattttcgtgaagaacgggccggcgatcagcaccatctccaaggacatctttggcgagtggaacgtcatcagggacaagtggaacgccgagtacgacgacatccacctgaagaagaaggcggtggtgaccgagaagtatgaggacgatcgcaggaagtccttcaaaaaaatcggctccttcagcctcgaacagctccaggagtatgccgatgcggatctgtccgtcgtcgagaagctgaaggaaatcatcattcagaaggtcgacgagatctataaagtgtacgggtccagcgagaagctgttcgacgccgactttgtgctcgagaagtccctcaaaaagaatgacgccgtggtggccattatgaaagacctgctcgactccgtgaagtccttcgaaaattacattaaagcgttctttggggaggggaaggaaactaacagggatgagtccttctatggcgactttgtcctcgcgtacgacatcctgctgaaggtcgaccacatttacgacgcgatccgcaactacgtgacacagaagccgtactccaaagacaagttcaagctgtacttccagaacccgcaatttatggggggctgggacaaggataaagagacagactaccgcgcgacaattctccgctatggctccaaatactatctggccatcatggacaagaagtacgcgaagtgcctgcagaagatcgacaaagacgacgtcaatggcaactatgaaaagatcaactacaagctgctgccgggcccgaacaagatgctcccgaaggtgttcttcagcaagaagtggatggcctactacaatccaagcgaggatattcagaaaatctataaaaacgggaccttcaagaagggggacatgtttaacctcaacgactgccacaagctcattgatttcttcaaggatagcatttcccgctacccgaaatggtccaatgcgtacgattttaacttctccgagacagaaaagtacaaagacatcgcgggcttttacagggaggtggaggagcaagggtataaagtttcttttgaatccgcgagcaagaaggaagtcgacaagctcgtcgaggagggcaagctctacatgttccaaatttataacaaggacttttccgacaagagccatgggaccccaaacctccacaccatgtacttcaaactgctctttgacgagaacaaccacgggcaaatcaggctgagcggcggcgccgaattattcatgcgcagggcctccctcaagaaggaagagctggtcgtccatccagccaattccccgatcgcgaacaagaacccggacaatccgaaaaagaccaccaccctgtcctacgacgtctacaaggacaaacgcttcagcgaagaccagtacgaattacacatcccaattgcgattaataagtgcccaaagaatatcttcaaaattaatacagaggtcagggtgctgctcaaacacgacgacaatccgtatgtcatcggcattgacaggggcgagcgcaatctgctctatatcgtggtcgtggatgggaagggcaatattgtggagcagtactccctgaacgagattatcaacaacttcaatgggattaggattaagaccgactatcacagcctgctcgacaagaaagaaaaagagaggtttgaggcccgccaaaactggacctccattgagaatatcaaagaattaaaggccggctatatttcccaagtcgtccacaagatctgcgagctggtggagaaatatgacgccgtgattgcgctcgaagacttaaattctgggttcaagaactcccgcgtgaaggtggaaaaacaggtgtatcagaaattcgagaaaatgctgatcgacaaactcaattatatggtggataagaagtccaacccgtgtgccacagggggcgcgctgaagggctatcagatcaccaacaagttcgagagcttcaagagcatgagcacccagaacgggtttattttctacatcccggcgtggctcacctccaagattgacccgagcaccggcttcgtgaacctcctgaagacaaagtatacctccattgccgacagcaagaagtttatctcctccttcgaccgcattatgtatgtgccggaggaggacctcttcgagttcgccctcgactacaaaaacttcagccgcacagatgcggattacatcaagaagtggaagctgtactcctacgggaacaggatccgcatcttcaggaatccaaaaaaaaataacgtctttgactgggaggaagtgtgcctgacatccgcctacaaggaactgttcaataaatacggcatcaattaccagcagggcgacattcgcgccctcctctgtgagcagtccgacaaagcgttttactccagcttcatggccctcatgtccctgatgctccaaatgaggaatagcatcacagggcgcaccgacgtcgacttcctcatcagcccggtgaagaactccgacgggatcttttacgactcccgcaactatgaggcgcaagagaatgcgatcctcccgaagaacgccgatgcgaacggggcctataatatcgccaggaaagtgctctgggccatcgggcagttcaaaaaggcggaggatgagaagctcgacaaggtgaaaattgccatttccaacaaggagtggctggagtacgcgcagacctccgtgaagcacggctcctctggcagctccggctctagcggctcctctggcagctccggctccaagctggagaagtttacaaactgttacagcctctccaaaaccctcaggtttaaagcgatcccggtgggcaagacccaggagaacatcgacaacaagaggctcctggtggaagacgagaagcgcgccgaagactacaagggcgtgaagaagctgctcgataggtactacctcagctttattaacgacgtgctgcacagcatcaaactcaagaatctcaacaactacatctccctcttccgcaaaaagacccgcaccgag

SEQ ID NO: 565 - DNA, 3729 bp, synthetic construct
  source 1..3729: mol_type = other DNA
cagaaactgccgaaattcaagccgctctacaagcaagtcctgtccgatagggaaagcctctccttctacggcgagggctataccagcgacgaggaggtgctggaagtcttccgcaacacactgaataagaatagcgagattttctcctccatcaagaagctcgagaagctctttaagaactttgacgagtacagctccgccgggattttcgtgaagaacgggccggcgatcagcaccatctccaaggacatctttggcgagtggaacgtcatcagggacaagtggaacgccgagtacgacgacatccacctgaagaagaaggcggtggtgaccgagaagtatgaggacgatcgcaggaagtccttcaaaaaaatcggctccttcagcctcgaacagctccaggagtatgccgatgcggatctgtccgtcgtcgagaagctgaaggaaatcatcattcagaaggtcgacgagatctataaagtgtacgggtccagcgagaagctgttcgacgccgactttgtgctcgagaagtccctcaaaaagaatgacgccgtggtggccattatgaaagacctgctcgactccgtgaagtccttcgaaaattacattaaagcgttctttggggaggggaaggaaactaacagggatgagtccttctatggcgactttgtcctcgcgtacgacatcctgctgaaggtcgaccacatttacgacgcgatccgcaactacgtgacacagaagccgtactccaaagacaagttcaagctgtacttccagaacccgcaatttatggggggctgggacaaggataaagagacagactaccgcgcgacaattctccgctatggctccaaatactatctggccatcatggacaagaagtacgcgaagtgcctgcagaagatcgacaaagacgacgtcaatggcaactatgaaaagatcaactacaagctgctgccgggcccgaacaagatgctcccgaaggtgttcttcagcaagaagtggatggcctactacaatccaagcgaggatattcagaaaatctataaaaacgggaccttcaagaagggggacatgtttaacctcaacgactgccacaagctcattgatttcttcaaggatagcatttcccgctacccgaaatggtccaatgcgtacgattttaacttctccgagacagaaaagtacaaagacatcgcgggcttttacagggaggtggaggagcaagggtataaagtttcttttgaatccgcgagcaagaaggaagtcgacaagctcgtcgaggagggcaagctctacatgttccaaatttataacaaggacttttccgacaagagccatgggaccccaaacctccacaccatgtacttcaaactgctctttgacgagaacaaccacgggcaaatcaggctgagcggcggcgccgaattattcatgcgcagggcctccctcaagaaggaagagctggtcgtccatccagccaattccccgatcgcgaacaagaacccggacaatccgaaaaagaccaccaccctgtcctacgacgtctacaaggacaaacgcttcagcgaagaccagtacgaattacacatcccaattgcgattaataagtgcccaaagaatatcttcaaaattaatacagaggtcagggtgctgctcaaacacgacgacaatccgtatgtcatcggcattgacaggggcgagcgcaatctgctctatatcgtggtcgtggatgggaagggcaatattgtggagcagtactccctgaacgagattatcaacaacttcaatgggattaggattaagaccgactatcacagcctgctcgacaagaaagaaaaagagaggtttgaggcccgccaaaactggacctccattgagaatatcaaagaattaaaggccggctatatttcccaagtcgtccacaagatctgcgagctggtggagaaatatgacgccgtgattgcgctcgaagacttaaattctgggttcaagaactcccgcgtgaaggtggaaaaacaggtgtatcagaaattcgagaaaatgctgatcgacaaactcaattatatggtggataagaagtccaacccgtgtgccacagggggcgcgctgaagggctatcagatcaccaacaagttcgagagcttcaagagcatgagcacccagaacgggtttattttctacatcccggcgtggctcacctccaagattgacccgagcaccggcttcgtgaacctcctgaagacaaagtatacctccattgccgacagcaagaagtttatctcctccttcgaccgcattatgtatgtgccggaggaggacctcttcgagttcgccctcgactacaaaaacttcagccgcacagatgcggattacatcaagaagtggaagctgtactcctacgggaacaggatccgcatcttcaggaatccaaaaaaaaataacgtctttgactgggaggaagtgtgcctgacatccgcctacaaggaactgttcaataaatacggcatcaattaccagcagggcgacattcgcgccctcctctgtgagcagtccgacaaagcgttttactccagcttcatggccctcatgtccctgatgctccaaatgaggaatagcatcacagggcgcaccgacgtcgacttcctcatcagcccggtgaagaactccgacgggatcttttacgactcccgcaactatgaggcgcaagagaatgcgatcctcccgaagaacgccgatgcgaacggggcctataatatcgccaggaaagtgctctgggccatcgggcagttcaaaaaggcggaggatgagaagctcgacaaggtgaaaattgccatttccaacaaggagtggctggagtacgcgcagacctccgtgaagcacggctcctctggcagctccggctctagcggctcctctggcagctccggctccaagctggagaagtttacaaactgttacagcctctccaaaaccctcaggtttaaagcgatcccggtgggcaagacccaggagaacatcgacaacaagaggctcctggtggaagacgagaagcgcgccgaagactacaagggcgtgaagaagctgctcgataggtactacctcagctttattaacgacgtgctgcacagcatcaaactcaagaatctcaacaactacatctccctcttccgcaaaaagacccgcaccgagaaggagaacaaggagctggagaacctggagatcaacctccgcaaggaaatcgccaaagcgttcaagggcaatgaagggtacaagagcctcttcaagaaagacatcatcgaaactatcctcccagagtttctcgatgacaaggacgagatcgcgctggtgaactcctttaacgggttcacaaccgcgtttaccggcttctttgataacagggaaaatatgttctccgaggaggccaagtccaccagcatcgccttcaggtgtatcaacgagaacctcacccgctacatttccaatatggacattttcgagaaggtggatgcgatcttcgataagcacgaggtgcaggagatcaaagagaagattctcaattccgattatgacgtcgaggatttcttcgaaggggagttctttaattttgtgctcacacaagagggcattgacgtgtacaacgcgattatcgggggcttcgtcacagagtccggggagaagattaaggggctgaatgagtacatcaatctgtacaatcagaagaccaag

SEQ ID NO: 566 - DNA, 3729 bp, synthetic construct
  source 1..3729: mol_type = other DNA
gtcctgtccgatagggaaagcctctccttctacggcgagggctataccagcgacgaggaggtgctggaagtcttccgcaacacactgaataagaatagcgagattttctcctccatcaagaagctcgagaagctctttaagaactttgacgagtacagctccgccgggattttcgtgaagaacgggccggcgatcagcaccatctccaaggacatctttggcgagtggaacgtcatcagggacaagtggaacgccgagtacgacgacatccacctgaagaagaaggcggtggtgaccgagaagtatgaggacgatcgcaggaagtccttcaaaaaaatcggctccttcagcctcgaacagctccaggagtatgccgatgcggatctgtccgtcgtcgagaagctgaaggaaatcatcattcagaaggtcgacgagatctataaagtgtacgggtccagcgagaagctgttcgacgccgactttgtgctcgagaagtccctcaaaaagaatgacgccgtggtggccattatgaaagacctgctcgactccgtgaagtccttcgaaaattacattaaagcgttctttggggaggggaaggaaactaacagggatgagtccttctatggcgactttgtcctcgcgtacgacatcctgctgaaggtcgaccacatttacgacgcgatccgcaactacgtgacacagaagccgtactccaaagacaagttcaagctgtacttccagaacccgcaatttatggggggctgggacaaggataaagagacagactaccgcgcgacaattctccgctatggctccaaatactatctggccatcatggacaagaagtacgcgaagtgcctgcagaagatcgacaaagacgacgtcaatggcaactatgaaaagatcaactacaagctgctgccgggcccgaacaagatgctcccgaaggtgttcttcagcaagaagtggatggcctactacaatccaagcgaggatattcagaaaatctataaaaacgggaccttcaagaagggggacatgtttaacctcaacgactgccacaagctcattgatttcttcaaggatagcatttcccgctacccgaaatggtccaatgcgtacgattttaacttctccgagacagaaaagtacaaagacatcgcgggcttttacagggaggtggaggagcaagggtataaagtttcttttgaatccgcgagcaagaaggaagtcgacaagctcgtcgaggagggcaagctctacatgttccaaatttataacaaggacttttccgacaagagccatgggaccccaaacctccacaccatgtacttcaaactgctctttgacgagaacaaccacgggcaaatcaggctgagcggcggcgccgaattattcatgcgcagggcctccctcaagaaggaagagctggtcgtccatccagccaattccccgatcgcgaacaagaacccggacaatccgaaaaagaccaccaccctgtcctacgacgtctacaaggacaaacgcttcagcgaagaccagtacgaattacacatcccaattgcgattaataagtgcccaaagaatatcttcaaaattaatacagaggtcagggtgctgctcaaacacgacgacaatccgtatgtcatcggcattgacaggggcgagcgcaatctgctctatatcgtggtcgtggatgggaagggcaatattgtggagcagtactccctgaacgagattatcaacaacttcaatgggattaggattaagaccgactatcacagcctgctcgacaagaaagaaaaagagaggtttgaggcccgccaaaactggacctccattgagaatatcaaagaattaaaggccggctatatttcccaagtcgtccacaagatctgcgagctggtggagaaatatgacgccgtgattgcgctcgaagacttaaattctgggttcaagaactcccgcgtgaaggtggaaaaacaggtgtatcagaaattcgagaaaatgctgatcgacaaactcaattatatggtggataagaagtccaacccgtgtgccacagggggcgcgctgaagggctatcagatcaccaacaagttcgagagcttcaagagcatgagcacccagaacgggtttattttctacatcccggcgtggctcacctccaagattgacccgagcaccggcttcgtgaacctcctgaagacaaagtatacctccattgccgacagcaagaagtttatctcctccttcgaccgcattatgtatgtgccggaggaggacctcttcgagttcgccctcgactacaaaaacttcagccgcacagatgcggattacatcaagaagtggaagctgtactcctacgggaacaggatccgcatcttcaggaatccaaaaaaaaataacgtctttgactgggaggaagtgtgcctgacatccgcctacaaggaactgttcaataaatacggcatcaattaccagcagggcgacattcgcgccctcctctgtgagcagtccgacaaagcgttttactccagcttcatggccctcatgtccctgatgctccaaatgaggaatagcatcacagggcgcaccgacgtcgacttcctcatcagcccggtgaagaactccgacgggatcttttacgactcccgcaactatgaggcgcaagagaatgcgatcctcccgaagaacgccgatgcgaacggggcctataatatcgccaggaaagtgctctgggccatcgggcagttcaaaaaggcggaggatgagaagctcgacaaggtgaaaattgccatttccaacaaggagtggctggagtacgcgcagacctccgtgaagcacggctcctctggcagctccggctctagcggctcctctggcagctccggctccaagctggagaagtttacaaactgttacagcctctccaaaaccctcaggtttaaagcgatcccggtgggcaagacccaggagaacatcgacaacaagaggctcctggtggaagacgagaagcgcgccgaagactacaagggcgtgaagaagctgctcgataggtactacctcagctttattaacgacgtgctgcacagcatcaaactcaagaatctcaacaactacatctccctcttccgcaaaaagacccgcaccgagaaggagaacaaggagctggagaacctggagatcaacctccgcaaggaaatcgccaaagcgttcaagggcaatgaagggtacaagagcctcttcaagaaagacatcatcgaaactatcctcccagagtttctcgatgacaaggacgagatcgcgctggtgaactcctttaacgggttcacaaccgcgtttaccggcttctttgataacagggaaaatatgttctccgaggaggccaagtccaccagcatcgccttcaggtgtatcaacgagaacctcacccgctacatttccaatatggacattttcgagaaggtggatgcgatcttcgataagcacgaggtgcaggagatcaaagagaagattctcaattccgattatgacgtcgaggatttcttcgaaggggagttctttaattttgtgctcacacaagagggcattgacgtgtacaacgcgattatcgggggcttcgtcacagagtccggggagaagattaaggggctgaatgagtacatcaatctgtacaatcagaagaccaagcagaaactgccgaaattcaagccgctctacaagcaa

SEQ ID NO: 567 - DNA, 3729 bp, synthetic construct
  source 1..3729: mol_type = other DNA
accagcgacgaggaggtgctggaagtcttccgcaacacactgaataagaatagcgagattttctcctccatcaagaagctcgagaagctctttaagaactttgacgagtacagctccgccgggattttcgtgaagaacgggccggcgatcagcaccatctccaaggacatctttggcgagtggaacgtcatcagggacaagtggaacgccgagtacgacgacatccacctgaagaagaaggcggtggtgaccgagaagtatgaggacgatcgcaggaagtccttcaaaaaaatcggctccttcagcctcgaacagctccaggagtatgccgatgcggatctgtccgtcgtcgagaagctgaaggaaatcatcattcagaaggtcgacgagatctataaagtgtacgggtccagcgagaagctgttcgacgccgactttgtgctcgagaagtccctcaaaaagaatgacgccgtggtggccattatgaaagacctgctcgactccgtgaagtccttcgaaaattacattaaagcgttctttggggaggggaaggaaactaacagggatgagtccttctatggcgactttgtcctcgcgtacgacatcctgctgaaggtcgaccacatttacgacgcgatccgcaactacgtgacacagaagccgtactccaaagacaagttcaagctgtacttccagaacccgcaatttatggggggctgggacaaggataaagagacagactaccgcgcgacaattctccgctatggctccaaatactatctggccatcatggacaagaagtacgcgaagtgcctgcagaagatcgacaaagacgacgtcaatggcaactatgaaaagatcaactacaagctgctgccgggcccgaacaagatgctcccgaaggtgttcttcagcaagaagtggatggcctactacaatccaagcgaggatattcagaaaatctataaaaacgggaccttcaagaagggggacatgtttaacctcaacgactgccacaagctcattgatttcttcaaggatagcatttcccgctacccgaaatggtccaatgcgtacgattttaacttctccgagacagaaaagtacaaagacatcgcgggcttttacagggaggtggaggagcaagggtataaagtttcttttgaatccgcgagcaagaaggaagtcgacaagctcgtcgaggagggcaagctctacatgttccaaatttataacaaggacttttccgacaagagccatgggaccccaaacctccacaccatgtacttcaaactgctctttgacgagaacaaccacgggcaaatcaggctgagcggcggcgccgaattattcatgcgcagggcctccctcaagaaggaagagctggtcgtccatccagccaattccccgatcgcgaacaagaacccggacaatccgaaaaagaccaccaccctgtcctacgacgtctacaaggacaaacgcttcagcgaagaccagtacgaattacacatcccaattgcgattaataagtgcccaaagaatatcttcaaaattaatacagaggtcagggtgctgctcaaacacgacgacaatccgtatgtcatcggcattgacaggggcgagcgcaatctgctctatatcgtggtcgtggatgggaagggcaatattgtggagcagtactccctgaacgagattatcaacaacttcaatgggattaggattaagaccgactatcacagcctgctcgacaagaaagaaaaagagaggtttgaggcccgccaaaactggacctccattgagaatatcaaagaattaaaggccggctatatttcccaagtcgtccacaagatctgcgagctggtggagaaatatgacgccgtgattgcgctcgaagacttaaattctgggttcaagaactcccgcgtgaaggtggaaaaacaggtgtatcagaaattcgagaaaatgctgatcgacaaactcaattatatggtggataagaagtccaacccgtgtgccacagggggcgcgctgaagggctatcagatcaccaacaagttcgagagcttcaagagcatgagcacccagaacgggtttattttctacatcccggcgtggctcacctccaagattgacccgagcaccggcttcgtgaacctcctgaagacaaagtatacctccattgccgacagcaagaagtttatctcctccttcgaccgcattatgtatgtgccggaggaggacctcttcgagttcgccctcgactacaaaaacttcagccgcacagatgcggattacatcaagaagtggaagctgtactcctacgggaacaggatccgcatcttcaggaatccaaaaaaaaataacgtctttgactgggaggaagtgtgcctgacatccgcctacaaggaactgttcaataaatacggcatcaattaccagcagggcgacattcgcgccctcctctgtgagcagtccgacaaagcgttttactccagcttcatggccctcatgtccctgatgctccaaatgaggaatagcatcacagggcgcaccgacgtcgacttcctcatcagcccggtgaagaactccgacgggatcttttacgactcccgcaactatgaggcgcaagagaatgcgatcctcccgaagaacgccgatgcgaacggggcctataatatcgccaggaaagtgctctgggccatcgggcagttcaaaaaggcggaggatgagaagctcgacaaggtgaaaattgccatttccaacaaggagtggctggagtacgcgcagacctccgtgaagcacggctcctctggcagctccggctctagcggctcctctggcagctccggctccaagctggagaagtttacaaactgttacagcctctccaaaaccctcaggtttaaagcgatcccggtgggcaagacccaggagaacatcgacaacaagaggctcctggtggaagacgagaagcgcgccgaagactacaagggcgtgaagaagctgctcgataggtactacctcagctttattaacgacgtgctgcacagcatcaaactcaagaatctcaacaactacatctccctcttccgcaaaaagacccgcaccgagaaggagaacaaggagctggagaacctggagatcaacctccgcaaggaaatcgccaaagcgttcaagggcaatgaagggtacaagagcctcttcaagaaagacatcatcgaaactatcctcccagagtttctcgatgacaaggacgagatcgcgctggtgaactcctttaacgggttcacaaccgcgtttaccggcttctttgataacagggaaaatatgttctccgaggaggccaagtccaccagcatcgccttcaggtgtatcaacgagaacctcacccgctacatttccaatatggacattttcgagaaggtggatgcgatcttcgataagcacgaggtgcaggagatcaaagagaagattctcaattccgattatgacgtcgaggatttcttcgaaggggagttctttaattttgtgctcacacaagagggcattgacgtgtacaacgcgattatcgggggcttcgtcacagagtccggggagaagattaaggggctgaatgagtacatcaatctgtacaatcagaagaccaagcagaaactgccgaaattcaagccgctctacaagcaagtcctgtccgatagggaaagcctctccttctacggcgagggctat

SEQ ID NO: 568 - DNA, 3729 bp, synthetic construct
  source 1..3729: mol_type = other DNA
gacgaggaggtgctggaagtcttccgcaacacactgaataagaatagcgagattttctcctccatcaagaagctcgagaagctctttaagaactttgacgagtacagctccgccgggattttcgtgaagaacgggccggcgatcagcaccatctccaaggacatctttggcgagtggaacgtcatcagggacaagtggaacgccgagtacgacgacatccacctgaagaagaaggcggtggtgaccgagaagtatgaggacgatcgcaggaagtccttcaaaaaaatcggctccttcagcctcgaacagctccaggagtatgccgatgcggatctgtccgtcgtcgagaagctgaaggaaatcatcattcagaaggtcgacgagatctataaagtgtacgggtccagcgagaagctgttcgacgccgactttgtgctcgagaagtccctcaaaaagaatgacgccgtggtggccattatgaaagacctgctcgactccgtgaagtccttcgaaaattacattaaagcgttctttggggaggggaaggaaactaacagggatgagtccttctatggcgactttgtcctcgcgtacgacatcctgctgaaggtcgaccacatttacgacgcgatccgcaactacgtgacacagaagccgtactccaaagacaagttcaagctgtacttccagaacccgcaatttatggggggctgggacaaggataaagagacagactaccgcgcgacaattctccgctatggctccaaatactatctggccatcatggacaagaagtacgcgaagtgcctgcagaagatcgacaaagacgacgtcaatggcaactatgaaaagatcaactacaagctgctgccgggcccgaacaagatgctcccgaaggtgttcttcagcaagaagtggatggcctactacaatccaagcgaggatattcagaaaatctataaaaacgggaccttcaagaagggggacatgtttaacctcaacgactgccacaagctcattgatttcttcaaggatagcatttcccgctacccgaaatggtccaatgcgtacgattttaacttctccgagacagaaaagtacaaagacatcgcgggcttttacagggaggtggaggagcaagggtataaagtttcttttgaatccgcgagcaagaaggaagtcgacaagctcgtcgaggagggcaagctctacatgttccaaatttataacaaggacttttccgacaagagccatgggaccccaaacctccacaccatgtacttcaaactgctctttgacgagaacaaccacgggcaaatcaggctgagcggcggcgccgaattattcatgcgcagggcctccctcaagaaggaagagctggtcgtccatccagccaattccccgatcgcgaacaagaacccggacaatccgaaaaagaccaccaccctgtcctacgacgtctacaaggacaaacgcttcagcgaagaccagtacgaattacacatcccaattgcgattaataagtgcccaaagaatatcttcaaaattaatacagaggtcagggtgctgctcaaacacgacgacaatccgtatgtcatcggcattgacaggggcgagcgcaatctgctctatatcgtggtcgtggatgggaagggcaatattgtggagcagtactccctgaacgagattatcaacaacttcaatgggattaggattaagaccgactatcacagcctgctcgacaagaaagaaaaagagaggtttgaggcccgccaaaactggacctccattgagaatatcaaagaattaaaggccggctatatttcccaagtcgtccacaagatctgcgagctggtggagaaatatgacgccgtgattgcgctcgaagacttaaattctgggttcaagaactcccgcgtgaaggtggaaaaacaggtgtatcagaaattcgagaaaatgctgatcgacaaactcaattatatggtggataagaagtccaacccgtgtgccacagggggcgcgctgaagggctatcagatcaccaacaagttcgagagcttcaagagcatgagcacccagaacgggtttattttctacatcccggcgtggctcacctccaagattgacccgagcaccggcttcgtgaacctcctgaagacaaagtatacctccattgccgacagcaagaagtttatctcctccttcgaccgcattatgtatgtgccggaggaggacctcttcgagttcgccctcgactacaaaaacttcagccgcacagatgcggattacatcaagaagtggaagctgtactcctacgggaacaggatccgcatcttcaggaatccaaaaaaaaataacgtctttgactgggaggaagtgtgcctgacatccgcctacaaggaactgttcaataaatacggcatcaattaccagcagggcgacattcgcgccctcctctgtgagcagtccgacaaagcgttttactccagcttcatggccctcatgtccctgatgctccaaatgaggaatagcatcacagggcgcaccgacgtcgacttcctcatcagcccggtgaagaactccgacgggatcttttacgactcccgcaactatgaggcgcaagagaatgcgatcctcccgaagaacgccgatgcgaacggggcctataatatcgccaggaaagtgctctgggccatcgggcagttcaaaaaggcggaggatgagaagctcgacaaggtgaaaattgccatttccaacaaggagtggctggagtacgcgcagacctccgtgaagcacggctcctctggcagctccggctctagcggctcctctggcagctccggctccaagctggagaagtttacaaactgttacagcctctccaaaaccctcaggtttaaagcgatcccggtgggcaagacccaggagaacatcgacaacaagaggctcctggtggaagacgagaagcgcgccgaagactacaagggcgtgaagaagctgctcgataggtactacctcagctttattaacgacgtgctgcacagcatcaaactcaagaatctcaacaactacatctccctcttccgcaaaaagacccgcaccgagaaggagaacaaggagctggagaacctggagatcaacctccgcaaggaaatcgccaaagcgttcaagggcaatgaagggtacaagagcctcttcaagaaagacatcatcgaaactatcctcccagagtttctcgatgacaaggacgagatcgcgctggtgaactcctttaacgggttcacaaccgcgtttaccggcttctttgataacagggaaaatatgttctccgaggaggccaagtccaccagcatcgccttcaggtgtatcaacgagaacctcacccgctacatttccaatatggacattttcgagaaggtggatgcgatcttcgataagcacgaggtgcaggagatcaaagagaagattctcaattccgattatgacgtcgaggatttcttcgaaggggagttctttaattttgtgctcacacaagagggcattgacgtgtacaacgcgattatcgggggcttcgtcacagagtccggggagaagattaaggggctgaatgagtacatcaatctgtacaatcagaagaccaagcagaaactgccgaaattcaagccgctctacaagcaagtcctgtccgatagggaaagcctctccttctacggcgagggctataccagc

SEQ ID NO: 569 - DNA, 3729 bp, synthetic construct
  source 1..3729: mol_type = other DNA
aactccgacgggatcttttacgactcccgcaactatgaggcgcaagagaatgcgatcctcccgaagaacgccgatgcgaacggggcctataatatcgccaggaaagtgctctgggccatcgggcagttcaaaaaggcggaggatgagaagctcgacaaggtgaaaattgccatttccaacaaggagtggctggagtacgcgcagacctccgtgaagcacggctcctctggcagctccggctctagcggctcctctggcagctccggctccaagctggagaagtttacaaactgttacagcctctccaaaaccctcaggtttaaagcgatcccggtgggcaagacccaggagaacatcgacaacaagaggctcctggtggaagacgagaagcgcgccgaagactacaagggcgtgaagaagctgctcgataggtactacctcagctttattaacgacgtgctgcacagcatcaaactcaagaatctcaacaactacatctccctcttccgcaaaaagacccgcaccgagaaggagaacaaggagctggagaacctggagatcaacctccgcaaggaaatcgccaaagcgttcaagggcaatgaagggtacaagagcctcttcaagaaagacatcatcgaaactatcctcccagagtttctcgatgacaaggacgagatcgcgctggtgaactcctttaacgggttcacaaccgcgtttaccggcttctttgataacagggaaaatatgttctccgaggaggccaagtccaccagcatcgccttcaggtgtatcaacgagaacctcacccgctacatttccaatatggacattttcgagaaggtggatgcgatcttcgataagcacgaggtgcaggagatcaaagagaagattctcaattccgattatgacgtcgaggatttcttcgaaggggagttctttaattttgtgctcacacaagagggcattgacgtgtacaacgcgattatcgggggcttcgtcacagagtccggggagaagattaaggggctgaatgagtacatcaatctgtacaatcagaagaccaagcagaaactgccgaaattcaagccgctctacaagcaagtcctgtccgatagggaaagcctctccttctacggcgagggctataccagcgacgaggaggtgctggaagtcttccgcaacacactgaataagaatagcgagattttctcctccatcaagaagctcgagaagctctttaagaactttgacgagtacagctccgccgggattttcgtgaagaacgggccggcgatcagcaccatctccaaggacatctttggcgagtggaacgtcatcagggacaagtggaacgccgagtacgacgacatccacctgaagaagaaggcggtggtgaccgagaagtatgaggacgatcgcaggaagtccttcaaaaaaatcggctccttcagcctcgaacagctccaggagtatgccgatgcggatctgtccgtcgtcgagaagctgaaggaaatcatcattcagaaggtcgacgagatctataaagtgtacgggtccagcgagaagctgttcgacgccgactttgtgctcgagaagtccctcaaaaagaatgacgccgtggtggccattatgaaagacctgctcgactccgtgaagtccttcgaaaattacattaaagcgttctttggggaggggaaggaaactaacagggatgagtccttctatggcgactttgtcctcgcgtacgacatcctgctgaaggtcgaccacatttacgacgcgatccgcaactacgtgacacagaagccgtactccaaagacaagttcaagctgtacttccagaacccgcaatttatggggggctgggacaaggataaagagacagactaccgcgcgacaattctccgctatggctccaaatactatctggccatcatggacaagaagtacgcgaagtgcctgcagaagatcgacaaagacgacgtcaatggcaactatgaaaagatcaactacaagctgctgccgggcccgaacaagatgctcccgaaggtgttcttcagcaagaagtggatggcctactacaatccaagcgaggatattcagaaaatctataaaaacgggaccttcaagaagggggacatgtttaacctcaacgactgccacaagctcattgatttcttcaaggatagcatttcccgctacccgaaatggtccaatgcgtacgattttaacttctccgagacagaaaagtacaaagacatcgcgggcttttacagggaggtggaggagcaagggtataaagtttcttttgaatccgcgagcaagaaggaagtcgacaagctcgtcgaggagggcaagctctacatgttccaaatttataacaaggacttttccgacaagagccatgggaccccaaacctccacaccatgtacttcaaactgctctttgacgagaacaaccacgggcaaatcaggctgagcggcggcgccgaattattcatgcgcagggcctccctcaagaaggaagagctggtcgtccatccagccaattccccgatcgcgaacaagaacccggacaatccgaaaaagaccaccaccctgtcctacgacgtctacaaggacaaacgcttcagcgaagaccagtacgaattacacatcccaattgcgattaataagtgcccaaagaatatcttcaaaattaatacagaggtcagggtgctgctcaaacacgacgacaatccgtatgtcatcggcattgacaggggcgagcgcaatctgctctatatcgtggtcgtggatgggaagggcaatattgtggagcagtactccctgaacgagattatcaacaacttcaatgggattaggattaagaccgactatcacagcctgctcgacaagaaagaaaaagagaggtttgaggcccgccaaaactggacctccattgagaatatcaaagaattaaaggccggctatatttcccaagtcgtccacaagatctgcgagctggtggagaaatatgacgccgtgattgcgctcgaagacttaaattctgggttcaagaactcccgcgtgaaggtggaaaaacaggtgtatcagaaattcgagaaaatgctgatcgacaaactcaattatatggtggataagaagtccaacccgtgtgccacagggggcgcgctgaagggctatcagatcaccaacaagttcgagagcttcaagagcatgagcacccagaacgggtttattttctacatcccggcgtggctcacctccaagattgacccgagcaccggcttcgtgaacctcctgaagacaaagtatacctccattgccgacagcaagaagtttatctcctccttcgaccgcattatgtatgtgccggaggaggacctcttcgagttcgccctcgactacaaaaacttcagccgcacagatgcggattacatcaagaagtggaagctgtactcctacgggaacaggatccgcatcttcaggaatccaaaaaaaaataacgtctttgactgggaggaagtgtgcctgacatccgcctacaaggaactgttcaataaatacggcatcaattaccagcagggcgacattcgcgccctcctctgtgagcagtccgacaaagcgttttactccagcttcatggccctcatgtccctgatgctccaaatgaggaatagcatcacagggcgcaccgacgtcgacttcctcatcagcccggtgaag

SEQ ID NO: 570 - DNA, 3729 bp, synthetic construct
  source 1..3729: mol_type = other DNA
atcttttacgactcccgcaactatgaggcgcaagagaatgcgatcctcccgaagaacgccgatgcgaacggggcctataatatcgccaggaaagtgctctgggccatcgggcagttcaaaaaggcggaggatgagaagctcgacaaggtgaaaattgccatttccaacaaggagtggctggagtacgcgcagacctccgtgaagcacggctcctctggcagctccggctctagcggctcctctggcagctccggctccaagctggagaagtttacaaactgttacagcctctccaaaaccctcaggtttaaagcgatcccggtgggcaagacccaggagaacatcgacaacaagaggctcctggtggaagacgagaagcgcgccgaagactacaagggcgtgaagaagctgctcgataggtactacctcagctttattaacgacgtgctgcacagcatcaaactcaagaatctcaacaactacatctccctcttccgcaaaaagacccgcaccgagaaggagaacaaggagctggagaacctggagatcaacctccgcaaggaaatcgccaaagcgttcaagggcaatgaagggtacaagagcctcttcaagaaagacatcatcgaaactatcctcccagagtttctcgatgacaaggacgagatcgcgctggtgaactcctttaacgggttcacaaccgcgtttaccggcttctttgataacagggaaaatatgttctccgaggaggccaagtccaccagcatcgccttcaggtgtatcaacgagaacctcacccgctacatttccaatatggacattttcgagaaggtggatgcgatcttcgataagcacgaggtgcaggagatcaaagagaagattctcaattccgattatgacgtcgaggatttcttcgaaggggagttctttaattttgtgctcacacaagagggcattgacgtgtacaacgcgattatcgggggcttcgtcacagagtccggggagaagattaaggggctgaatgagtacatcaatctgtacaatcagaagaccaagcagaaactgccgaaattcaagccgctctacaagcaagtcctgtccgatagggaaagcctctccttctacggcgagggctataccagcgacgaggaggtgctggaagtcttccgcaacacactgaataagaatagcgagattttctcctccatcaagaagctcgagaagctctttaagaactttgacgagtacagctccgccgggattttcgtgaagaacgggccggcgatcagcaccatctccaaggacatctttggcgagtggaacgtcatcagggacaagtggaacgccgagtacgacgacatccacctgaagaagaaggcggtggtgaccgagaagtatgaggacgatcgcaggaagtccttcaaaaaaatcggctccttcagcctcgaacagctccaggagtatgccgatgcggatctgtccgtcgtcgagaagctgaaggaaatcatcattcagaaggtcgacgagatctataaagtgtacgggtccagcgagaagctgttcgacgccgactttgtgctcgagaagtccctcaaaaagaatgacgccgtggtggccattatgaaagacctgctcgactccgtgaagtccttcgaaaattacattaaagcgttctttggggaggggaaggaaactaacagggatgagtccttctatggcgactttgtcctcgcgtacgacatcctgctgaaggtcgaccacatttacgacgcgatccgcaactacgtgacacagaagccgtactccaaagacaagttcaagctgtacttccagaacccgcaatttatggggggctgggacaaggataaagagacagactaccgcgcgacaattctccgctatggctccaaatactatctggccatcatggacaagaagtacgcgaagtgcctgcagaagatcgacaaagacgacgtcaatggcaactatgaaaagatcaactacaagctgctgccgggcccgaacaagatgctcccgaaggtgttcttcagcaagaagtggatggcctactacaatccaagcgaggatattcagaaaatctataaaaacgggaccttcaagaagggggacatgtttaacctcaacgactgccacaagctcattgatttcttcaaggatagcatttcccgctacccgaaatggtccaatgcgtacgattttaacttctccgagacagaaaagtacaaagacatcgcgggcttttacagggaggtggaggagcaagggtataaagtttcttttgaatccgcgagcaagaaggaagtcgacaagctcgtcgaggagggcaagctctacatgttccaaatttataacaaggacttttccgacaagagccatgggaccccaaacctccacaccatgtacttcaaactgctctttgacgagaacaaccacgggcaaatcaggctgagcggcggcgccgaattattcatgcgcagggcctccctcaagaaggaagagctggtcgtccatccagccaattccccgatcgcgaacaagaacccggacaatccgaaaaagaccaccaccctgtcctacgacgtctacaaggacaaacgcttcagcgaagaccagtacgaattacacatcccaattgcgattaataagtgcccaaagaatatcttcaaaattaatacagaggtcagggtgctgctcaaacacgacgacaatccgtatgtcatcggcattgacaggggcgagcgcaatctgctctatatcgtggtcgtggatgggaagggcaatattgtggagcagtactccctgaacgagattatcaacaacttcaatgggattaggattaagaccgactatcacagcctgctcgacaagaaagaaaaagagaggtttgaggcccgccaaaactggacctccattgagaatatcaaagaattaaaggccggctatatttcccaagtcgtccacaagatctgcgagctggtggagaaatatgacgccgtgattgcgctcgaagacttaaattctgggttcaagaactcccgcgtgaaggtggaaaaacaggtgtatcagaaattcgagaaaatgctgatcgacaaactcaattatatggtggataagaagtccaacccgtgtgccacagggggcgcgctgaagggctatcagatcaccaacaagttcgagagcttcaagagcatgagcacccagaacgggtttattttctacatcccggcgtggctcacctccaagattgacccgagcaccggcttcgtgaacctcctgaagacaaagtatacctccattgccgacagcaagaagtttatctcctccttcgaccgcattatgtatgtgccggaggaggacctcttcgagttcgccctcgactacaaaaacttcagccgcacagatgcggattacatcaagaagtggaagctgtactcctacgggaacaggatccgcatcttcaggaatccaaaaaaaaataacgtctttgactgggaggaagtgtgcctgacatccgcctacaaggaactgttcaataaatacggcatcaattaccagcagggcgacattcgcgccctcctctgtgagcagtccgacaaagcgttttactccagcttcatggccctcatgtccctgatgctccaaatgaggaatagcatcacagggcgcaccgacgtcgacttcctcatcagcccggtgaagaactccgacggg

SEQ ID NO: 571 - DNA, 3729 bp, synthetic construct
  source 1..3729: mol_type = other DNA
gacgggatcttttacgactcccgcaactatgaggcgcaagagaatgcgatcctcccgaagaacgccgatgcgaacggggcctataatatcgccaggaaagtgctctgggccatcgggcagttcaaaaaggcggaggatgagaagctcgacaaggtgaaaattgccatttccaacaaggagtggctggagtacgcgcagacctccgtgaagcacggctcctctggcagctccggctctagcggctcctctggcagctccggctccaagctggagaagtttacaaactgttacagcctctccaaaaccctcaggtttaaagcgatcccggtgggcaagacccaggagaacatcgacaacaagaggctcctggtggaagacgagaagcgcgccgaagactacaagggcgtgaagaagctgctcgataggtactacctcagctttattaacgacgtgctgcacagcatcaaactcaagaatctcaacaactacatctccctcttccgcaaaaagacccgcaccgagaaggagaacaaggagctggagaacctggagatcaacctccgcaaggaaatcgccaaagcgttcaagggcaatgaagggtacaagagcctcttcaagaaagacatcatcgaaactatcctcccagagtttctcgatgacaaggacgagatcgcgctggtgaactcctttaacgggttcacaaccgcgtttaccggcttctttgataacagggaaaatatgttctccgaggaggccaagtccaccagcatcgccttcaggtgtatcaacgagaacctcacccgctacatttccaatatggacattttcgagaaggtggatgcgatcttcgataagcacgaggtgcaggagatcaaagagaagattctcaattccgattatgacgtcgaggatttcttcgaaggggagttctttaattttgtgctcacacaagagggcattgacgtgtacaacgcgattatcgggggcttcgtcacagagtccggggagaagattaaggggctgaatgagtacatcaatctgtacaatcagaagaccaagcagaaactgccgaaattcaagccgctctacaagcaagtcctgtccgatagggaaagcctctccttctacggcgagggctataccagcgacgaggaggtgctggaagtcttccgcaacacactgaataagaatagcgagattttctcctccatcaagaagctcgagaagctctttaagaactttgacgagtacagctccgccgggattttcgtgaagaacgggccggcgatcagcaccatctccaaggacatctttggcgagtggaacgtcatcagggacaagtggaacgccgagtacgacgacatccacctgaagaagaaggcggtggtgaccgagaagtatgaggacgatcgcaggaagtccttcaaaaaaatcggctccttcagcctcgaacagctccaggagtatgccgatgcggatctgtccgtcgtcgagaagctgaaggaaatcatcattcagaaggtcgacgagatctataaagtgtacgggtccagcgagaagctgttcgacgccgactttgtgctcgagaagtccctcaaaaagaatgacgccgtggtggccattatgaaagacctgctcgactccgtgaagtccttcgaaaattacattaaagcgttctttggggaggggaaggaaactaacagggatgagtccttctatggcgactttgtcctcgcgtacgacatcctgctgaaggtcgaccacatttacgacgcgatccgcaactacgtgacacagaagccgtactccaaagacaagttcaagctgtacttccagaacccgcaatttatggggggctgggacaaggataaagagacagactaccgcgcgacaattctccgctatggctccaaatactatctggccatcatggacaagaagtacgcgaagtgcctgcagaagatcgacaaagacgacgtcaatggcaactatgaaaagatcaactacaagctgctgccgggcccgaacaagatgctcccgaaggtgttcttcagcaagaagtggatggcctactacaatccaagcgaggatattcagaaaatctataaaaacgggaccttcaagaagggggacatgtttaacctcaacgactgccacaagctcattgatttcttcaaggatagcatttcccgctacccgaaatggtccaatgcgtacgattttaacttctccgagacagaaaagtacaaagacatcgcgggcttttacagggaggtggaggagcaagggtataaagtttcttttgaatccgcgagcaagaaggaagtcgacaagctcgtcgaggagggcaagctctacatgttccaaatttataacaaggacttttccgacaagagccatgggaccccaaacctccacaccatgtacttcaaactgctctttgacgagaacaaccacgggcaaatcaggctgagcggcggcgccgaattattcatgcgcagggcctccctcaagaaggaagagctggtcgtccatccagccaattccccgatcgcgaacaagaacccggacaatccgaaaaagaccaccaccctgtcctacgacgtctacaaggacaaacgcttcagcgaagaccagtacgaattacacatcccaattgcgattaataagtgcccaaagaatatcttcaaaattaatacagaggtcagggtgctgctcaaacacgacgacaatccgtatgtcatcggcattgacaggggcgagcgcaatctgctctatatcgtggtcgtggatgggaagggcaatattgtggagcagtactccctgaacgagattatcaacaacttcaatgggattaggattaagaccgactatcacagcctgctcgacaagaaagaaaaagagaggtttgaggcccgccaaaactggacctccattgagaatatcaaagaattaaaggccggctatatttcccaagtcgtccacaagatctgcgagctggtggagaaatatgacgccgtgattgcgctcgaagacttaaattctgggttcaagaactcccgcgtgaaggtggaaaaacaggtgtatcagaaattcgagaaaatgctgatcgacaaactcaattatatggtggataagaagtccaacccgtgtgccacagggggcgcgctgaagggctatcagatcaccaacaagttcgagagcttcaagagcatgagcacccagaacgggtttattttctacatcccggcgtggctcacctccaagattgacccgagcaccggcttcgtgaacctcctgaagacaaagtatacctccattgccgacagcaagaagtttatctcctccttcgaccgcattatgtatgtgccggaggaggacctcttcgagttcgccctcgactacaaaaacttcagccgcacagatgcggattacatcaagaagtggaagctgtactcctacgggaacaggatccgcatcttcaggaatccaaaaaaaaataacgtctttgactgggaggaagtgtgcctgacatccgcctacaaggaactgttcaataaatacggcatcaattaccagcagggcgacattcgcgccctcctctgtgagcagtccgacaaagcgttttactccagcttcatggccctcatgtccctgatgctccaaatgaggaatagcatcacagggcgcaccgacgtcgacttcctcatcagcccggtgaagaactcc

SEQ ID NO: 572 - DNA, 3729 bp, synthetic construct
  source 1..3729: mol_type = other DNA
tacgactcccgcaactatgaggcgcaagagaatgcgatcctcccgaagaacgccgatgcgaacggggcctataatatcgccaggaaagtgctctgggccatcgggcagttcaaaaaggcggaggatgagaagctcgacaaggtgaaaattgccatttccaacaaggagtggctggagtacgcgcagacctccgtgaagcacggctcctctggcagctccggctctagcggctcctctggcagctccggctccaagctggagaagtttacaaactgttacagcctctccaaaaccctcaggtttaaagcgatcccggtgggcaagacccaggagaacatcgacaacaagaggctcctggtggaagacgagaagcgcgccgaagactacaagggcgtgaagaagctgctcgataggtactacctcagctttattaacgacgtgctgcacagcatcaaactcaagaatctcaacaactacatctccctcttccgcaaaaagacccgcaccgagaaggagaacaaggagctggagaacctggagatcaacctccgcaaggaaatcgccaaagcgttcaagggcaatgaagggtacaagagcctcttcaagaaagacatcatcgaaactatcctcccagagtttctcgatgacaaggacgagatcgcgctggtgaactcctttaacgggttcacaaccgcgtttaccggcttctttgataacagggaaaatatgttctccgaggaggccaagtccaccagcatcgccttcaggtgtatcaacgagaacctcacccgctacatttccaatatggacattttcgagaaggtggatgcgatcttcgataagcacgaggtgcaggagatcaaagagaagattctcaattccgattatgacgtcgaggatttcttcgaaggggagttctttaattttgtgctcacacaagagggcattgacgtgtacaacgcgattatcgggggcttcgtcacagagtccggggagaagattaaggggctgaatgagtacatcaatctgtacaatcagaagaccaagcagaaactgccgaaattcaagccgctctacaagcaagtcctgtccgatagggaaagcctctccttctacggcgagggctataccagcgacgaggaggtgctggaagtcttccgcaacacactgaataagaatagcgagattttctcctccatcaagaagctcgagaagctctttaagaactttgacgagtacagctccgccgggattttcgtgaagaacgggccggcgatcagcaccatctccaaggacatctttggcgagtggaacgtcatcagggacaagtggaacgccgagtacgacgacatccacctgaagaagaaggcggtggtgaccgagaagtatgaggacgatcgcaggaagtccttcaaaaaaatcggctccttcagcctcgaacagctccaggagtatgccgatgcggatctgtccgtcgtcgagaagctgaaggaaatcatcattcagaaggtcgacgagatctataaagtgtacgggtccagcgagaagctgttcgacgccgactttgtgctcgagaagtccctcaaaaagaatgacgccgtggtggccattatgaaagacctgctcgactccgtgaagtccttcgaaaattacattaaagcgttctttggggaggggaaggaaactaacagggatgagtccttctatggcgactttgtcctcgcgtacgacatcctgctgaaggtcgaccacatttacgacgcgatccgcaactacgtgacacagaagccgtactccaaagacaagttcaagctgtacttccagaacccgcaatttatggggggctgggacaaggataaagagacagactaccgcgcgacaattctccgctatggctccaaatactatctggccatcatggacaagaagtacgcgaagtgcctgcagaagatcgacaaagacgacgtcaatggcaactatgaaaagatcaactacaagctgctgccgggcccgaacaagatgctcccgaaggtgttcttcagcaagaagtggatggcctactacaatccaagcgaggatattcagaaaatctataaaaacgggaccttcaagaagggggacatgtttaacctcaacgactgccacaagctcattgatttcttcaaggatagcatttcccgctacccgaaatggtccaatgcgtacgattttaacttctccgagacagaaaagtacaaagacatcgcgggcttttacagggaggtggaggagcaagggtataaagtttcttttgaatccgcgagcaagaaggaagtcgacaagctcgtcgaggagggcaagctctacatgttccaaatttataacaaggacttttccgacaagagccatgggaccccaaacctccacaccatgtacttcaaactgctctttgacgagaacaaccacgggcaaatcaggctgagcggcggcgccgaattattcatgcgcagggcctccctcaagaaggaagagctggtcgtccatccagccaattccccgatcgcgaacaagaacccggacaatccgaaaaagaccaccaccctgtcctacgacgtctacaaggacaaacgcttcagcgaagaccagtacgaattacacatcccaattgcgattaataagtgcccaaagaatatcttcaaaattaatacagaggtcagggtgctgctcaaacacgacgacaatccgtatgtcatcggcattgacaggggcgagcgcaatctgctctatatcgtggtcgtggatgggaagggcaatattgtggagcagtactccctgaacgagattatcaacaacttcaatgggattaggattaagaccgactatcacagcctgctcgacaagaaagaaaaagagaggtttgaggcccgccaaaactggacctccattgagaatatcaaagaattaaaggccggctatatttcccaagtcgtccacaagatctgcgagctggtggagaaatatgacgccgtgattgcgctcgaagacttaaattctgggttcaagaactcccgcgtgaaggtggaaaaacaggtgtatcagaaattcgagaaaatgctgatcgacaaactcaattatatggtggataagaagtccaacccgtgtgccacagggggcgcgctgaagggctatcagatcaccaacaagttcgagagcttcaagagcatgagcacccagaacgggtttattttctacatcccggcgtggctcacctccaagattgacccgagcaccggcttcgtgaacctcctgaagacaaagtatacctccattgccgacagcaagaagtttatctcctccttcgaccgcattatgtatgtgccggaggaggacctcttcgagttcgccctcgactacaaaaacttcagccgcacagatgcggattacatcaagaagtggaagctgtactcctacgggaacaggatccgcatcttcaggaatccaaaaaaaaataacgtctttgactgggaggaagtgtgcctgacatccgcctacaaggaactgttcaataaatacggcatcaattaccagcagggcgacattcgcgccctcctctgtgagcagtccgacaaagcgttttactccagcttcatggccctcatgtccctgatgctccaaatgaggaatagcatcacagggcgcaccgacgtcgacttcctcatcagcccggtgaagaactccgacgggatcttt

SEQ ID NO: 573 - DNA, 3729 bp, synthetic construct
  source 1..3729: mol_type = other DNA
cagaagccgtactccaaagacaagttcaagctgtacttccagaacccgcaatttatggggggctgggacaaggataaagagacagactaccgcgcgacaattctccgctatggctccaaatactatctggccatcatggacaagaagtacgcgaagtgcctgcagaagatcgacaaagacgacgtcaatggcaactatgaaaagatcaactacaagctgctgccgggcccgaacaagatgctcccgaaggtgttcttcagcaagaagtggatggcctactacaatccaagcgaggatattcagaaaatctataaaaacgggaccttcaagaagggggacatgtttaacctcaacgactgccacaagctcattgatttcttcaaggatagcatttcccgctacccgaaatggtccaatgcgtacgattttaacttctccgagacagaaaagtacaaagacatcgcgggcttttacagggaggtggaggagcaagggtataaagtttcttttgaatccgcgagcaagaaggaagtcgacaagctcgtcgaggagggcaagctctacatgttccaaatttataacaaggacttttccgacaagagccatgggaccccaaacctccacaccatgtacttcaaactgctctttgacgagaacaaccacgggcaaatcaggctgagcggcggcgccgaattattcatgcgcagggcctccctcaagaaggaagagctggtcgtccatccagccaattccccgatcgcgaacaagaacccggacaatccgaaaaagaccaccaccctgtcctacgacgtctacaaggacaaacgcttcagcgaagaccagtacgaattacacatcccaattgcgattaataagtgcccaaagaatatcttcaaaattaatacagaggtcagggtgctgctcaaacacgacgacaatccgtatgtcatcggcattgacaggggcgagcgcaatctgctctatatcgtggtcgtggatgggaagggcaatattgtggagcagtactccctgaacgagattatcaacaacttcaatgggattaggattaagaccgactatcacagcctgctcgacaagaaagaaaaagagaggtttgaggcccgccaaaactggacctccattgagaatatcaaagaattaaaggccggctatatttcccaagtcgtccacaagatctgcgagctggtggagaaatatgacgccgtgattgcgctcgaagacttaaattctgggttcaagaactcccgcgtgaaggtggaaaaacaggtgtatcagaaattcgagaaaatgctgatcgacaaactcaattatatggtggataagaagtccaacccgtgtgccacagggggcgcgctgaagggctatcagatcaccaacaagttcgagagcttcaagagcatgagcacccagaacgggtttattttctacatcccggcgtggctcacctccaagattgacccgagcaccggcttcgtgaacctcctgaagacaaagtatacctccattgccgacagcaagaagtttatctcctccttcgaccgcattatgtatgtgccggaggaggacctcttcgagttcgccctcgactacaaaaacttcagccgcacagatgcggattacatcaagaagtggaagctgtactcctacgggaacaggatccgcatcttcaggaatccaaaaaaaaataacgtctttgactgggaggaagtgtgcctgacatccgcctacaaggaactgttcaataaatacggcatcaattaccagcagggcgacattcgcgccctcctctgtgagcagtccgacaaagcgttttactccagcttcatggccctcatgtccctgatgctccaaatgaggaatagcatcacagggcgcaccgacgtcgacttcctcatcagcccggtgaagaactccgacgggatcttttacgactcccgcaactatgaggcgcaagagaatgcgatcctcccgaagaacgccgatgcgaacggggcctataatatcgccaggaaagtgctctgggccatcgggcagttcaaaaaggcggaggatgagaagctcgacaaggtgaaaattgccatttccaacaaggagtggctggagtacgcgcagacctccgtgaagcacggctcctctggcagctccggctctagcggctcctctggcagctccggctccaagctggagaagtttacaaactgttacagcctctccaaaaccctcaggtttaaagcgatcccggtgggcaagacccaggagaacatcgacaacaagaggctcctggtggaagacgagaagcgcgccgaagactacaagggcgtgaagaagctgctcgataggtactacctcagctttattaacgacgtgctgcacagcatcaaactcaagaatctcaacaactacatctccctcttccgcaaaaagacccgcaccgagaaggagaacaaggagctggagaacctggagatcaacctccgcaaggaaatcgccaaagcgttcaagggcaatgaagggtacaagagcctcttcaagaaagacatcatcgaaactatcctcccagagtttctcgatgacaaggacgagatcgcgctggtgaactcctttaacgggttcacaaccgcgtttaccggcttctttgataacagggaaaatatgttctccgaggaggccaagtccaccagcatcgccttcaggtgtatcaacgagaacctcacccgctacatttccaatatggacattttcgagaaggtggatgcgatcttcgataagcacgaggtgcaggagatcaaagagaagattctcaattccgattatgacgtcgaggatttcttcgaaggggagttctttaattttgtgctcacacaagagggcattgacgtgtacaacgcgattatcgggggcttcgtcacagagtccggggagaagattaaggggctgaatgagtacatcaatctgtacaatcagaagaccaagcagaaactgccgaaattcaagccgctctacaagcaagtcctgtccgatagggaaagcctctccttctacggcgagggctataccagcgacgaggaggtgctggaagtcttccgcaacacactgaataagaatagcgagattttctcctccatcaagaagctcgagaagctctttaagaactttgacgagtacagctccgccgggattttcgtgaagaacgggccggcgatcagcaccatctccaaggacatctttggcgagtggaacgtcatcagggacaagtggaacgccgagtacgacgacatccacctgaagaagaaggcggtggtgaccgagaagtatgaggacgatcgcaggaagtccttcaaaaaaatcggctccttcagcctcgaacagctccaggagtatgccgatgcggatctgtccgtcgtcgagaagctgaaggaaatcatcattcagaaggtcgacgagatctataaagtgtacgggtccagcgagaagctgttcgacgccgactttgtgctcgagaagtccctcaaaaagaatgacgccgtggtggccattatgaaagacctgctcgactccgtgaagtccttcgaaaattacattaaagcgttctttggggaggggaaggaaactaacagggatgagtccttctatggcgactttgtcctcgcgtacgacatcctgctgaaggtcgaccacatttacgacgcgatccgcaactacgtgaca

SEQ ID NO: 574 - DNA, 3729 bp, synthetic construct
  source 1..3729: mol_type = other DNA
tactccaaagacaagttcaagctgtacttccagaacccgcaatttatggggggctgggacaaggataaagagacagactaccgcgcgacaattctccgctatggctccaaatactatctggccatcatggacaagaagtacgcgaagtgcctgcagaagatcgacaaagacgacgtcaatggcaactatgaaaagatcaactacaagctgctgccgggcccgaacaagatgctcccgaaggtgttcttcagcaagaagtggatggcctactacaatccaagcgaggatattcagaaaatctataaaaacgggaccttcaagaagggggacatgtttaacctcaacgactgccacaagctcattgatttcttcaaggatagcatttcccgctacccgaaatggtccaatgcgtacgattttaacttctccgagacagaaaagtacaaagacatcgcgggcttttacagggaggtggaggagcaagggtataaagtttcttttgaatccgcgagcaagaaggaagtcgacaagctcgtcgaggagggcaagctctacatgttccaaatttataacaaggacttttccgacaagagccatgggaccccaaacctccacaccatgtacttcaaactgctctttgacgagaacaaccacgggcaaatcaggctgagcggcggcgccgaattattcatgcgcagggcctccctcaagaaggaagagctggtcgtccatccagccaattccccgatcgcgaacaagaacccggacaatccgaaaaagaccaccaccctgtcctacgacgtctacaaggacaaacgcttcagcgaagaccagtacgaattacacatcccaattgcgattaataagtgcccaaagaatatcttcaaaattaatacagaggtcagggtgctgctcaaacacgacgacaatccgtatgtcatcggcattgacaggggcgagcgcaatctgctctatatcgtggtcgtggatgggaagggcaatattgtggagcagtactccctgaacgagattatcaacaacttcaatgggattaggattaagaccgactatcacagcctgctcgacaagaaagaaaaagagaggtttgaggcccgccaaaactggacctccattgagaatatcaaagaattaaaggccggctatatttcccaagtcgtccacaagatctgcgagctggtggagaaatatgacgccgtgattgcgctcgaagacttaaattctgggttcaagaactcccgcgtgaaggtggaaaaacaggtgtatcagaaattcgagaaaatgctgatcgacaaactcaattatatggtggataagaagtccaacccgtgtgccacagggggcgcgctgaagggctatcagatcaccaacaagttcgagagcttcaagagcatgagcacccagaacgggtttattttctacatcccggcgtggctcacctccaagattgacccgagcaccggcttcgtgaacctcctgaagacaaagtatacctccattgccgacagcaagaagtttatctcctccttcgaccgcattatgtatgtgccggaggaggacctcttcgagttcgccctcgactacaaaaacttcagccgcacagatgcggattacatcaagaagtggaagctgtactcctacgggaacaggatccgcatcttcaggaatccaaaaaaaaataacgtctttgactgggaggaagtgtgcctgacatccgcctacaaggaactgttcaataaatacggcatcaattaccagcagggcgacattcgcgccctcctctgtgagcagtccgacaaagcgttttactccagcttcatggccctcatgtccctgatgctccaaatgaggaatagcatcacagggcgcaccgacgtcgacttcctcatcagcccggtgaagaactccgacgggatcttttacgactcccgcaactatgaggcgcaagagaatgcgatcctcccgaagaacgccgatgcgaacggggcctataatatcgccaggaaagtgctctgggccatcgggcagttcaaaaaggcggaggatgagaagctcgacaaggtgaaaattgccatttccaacaaggagtggctggagtacgcgcagacctccgtgaagcacggctcctctggcagctccggctctagcggctcctctggcagctccggctccaagctggagaagtttacaaactgttacagcctctccaaaaccctcaggtttaaagcgatcccggtgggcaagacccaggagaacatcgacaacaagaggctcctggtggaagacgagaagcgcgccgaagactacaagggcgtgaagaagctgctcgataggtactacctcagctttattaacgacgtgctgcacagcatcaaactcaagaatctcaacaactacatctccctcttccgcaaaaagacccgcaccgagaaggagaacaaggagctggagaacctggagatcaacctccgcaaggaaatcgccaaagcgttcaagggcaatgaagggtacaagagcctcttcaagaaagacatcatcgaaactatcctcccagagtttctcgatgacaaggacgagatcgcgctggtgaactcctttaacgggttcacaaccgcgtttaccggcttctttgataacagggaaaatatgttctccgaggaggccaagtccaccagcatcgccttcaggtgtatcaacgagaacctcacccgctacatttccaatatggacattttcgagaaggtggatgcgatcttcgataagcacgaggtgcaggagatcaaagagaagattctcaattccgattatgacgtcgaggatttcttcgaaggggagttctttaattttgtgctcacacaagagggcattgacgtgtacaacgcgattatcgggggcttcgtcacagagtccggggagaagattaaggggctgaatgagtacatcaatctgtacaatcagaagaccaagcagaaactgccgaaattcaagccgctctacaagcaagtcctgtccgatagggaaagcctctccttctacggcgagggctataccagcgacgaggaggtgctggaagtcttccgcaacacactgaataagaatagcgagattttctcctccatcaagaagctcgagaagctctttaagaactttgacgagtacagctccgccgggattttcgtgaagaacgggccggcgatcagcaccatctccaaggacatctttggcgagtggaacgtcatcagggacaagtggaacgccgagtacgacgacatccacctgaagaagaaggcggtggtgaccgagaagtatgaggacgatcgcaggaagtccttcaaaaaaatcggctccttcagcctcgaacagctccaggagtatgccgatgcggatctgtccgtcgtcgagaagctgaaggaaatcatcattcagaaggtcgacgagatctataaagtgtacgggtccagcgagaagctgttcgacgccgactttgtgctcgagaagtccctcaaaaagaatgacgccgtggtggccattatgaaagacctgctcgactccgtgaagtccttcgaaaattacattaaagcgttctttggggaggggaaggaaactaacagggatgagtccttctatggcgactttgtcctcgcgtacgacatcctgctgaaggtcgaccacatttacgacgcgatccgcaactacgtgacacagaagccg

SEQ ID NO: 575 - DNA, 3729 bp, synthetic construct
  source 1..3729: mol_type = other DNA
aagttcaagctgtacttccagaacccgcaatttatggggggctgggacaaggataaagagacagactaccgcgcgacaattctccgctatggctccaaatactatctggccatcatggacaagaagtacgcgaagtgcctgcagaagatcgacaaagacgacgtcaatggcaactatgaaaagatcaactacaagctgctgccgggcccgaacaagatgctcccgaaggtgttcttcagcaagaagtggatggcctactacaatccaagcgaggatattcagaaaatctataaaaacgggaccttcaagaagggggacatgtttaacctcaacgactgccacaagctcattgatttcttcaaggatagcatttcccgctacccgaaatggtccaatgcgtacgattttaacttctccgagacagaaaagtacaaagacatcgcgggcttttacagggaggtggaggagcaagggtataaagtttcttttgaatccgcgagcaagaaggaagtcgacaagctcgtcgaggagggcaagctctacatgttccaaatttataacaaggacttttccgacaagagccatgggaccccaaacctccacaccatgtacttcaaactgctctttgacgagaacaaccacgggcaaatcaggctgagcggcggcgccgaattattcatgcgcagggcctccctcaagaaggaagagctggtcgtccatccagccaattccccgatcgcgaacaagaacccggacaatccgaaaaagaccaccaccctgtcctacgacgtctacaaggacaaacgcttcagcgaagaccagtacgaattacacatcccaattgcgattaataagtgcccaaagaatatcttcaaaattaatacagaggtcagggtgctgctcaaacacgacgacaatccgtatgtcatcggcattgacaggggcgagcgcaatctgctctatatcgtggtcgtggatgggaagggcaatattgtggagcagtactccctgaacgagattatcaacaacttcaatgggattaggattaagaccgactatcacagcctgctcgacaagaaagaaaaagagaggtttgaggcccgccaaaactggacctccattgagaatatcaaagaattaaaggccggctatatttcccaagtcgtccacaagatctgcgagctggtggagaaatatgacgccgtgattgcgctcgaagacttaaattctgggttcaagaactcccgcgtgaaggtggaaaaacaggtgtatcagaaattcgagaaaatgctgatcgacaaactcaattatatggtggataagaagtccaacccgtgtgccacagggggcgcgctgaagggctatcagatcaccaacaagttcgagagcttcaagagcatgagcacccagaacgggtttattttctacatcccggcgtggctcacctccaagattgacccgagcaccggcttcgtgaacctcctgaagacaaagtatacctccattgccgacagcaagaagtttatctcctccttcgaccgcattatgtatgtgccggaggaggacctcttcgagttcgccctcgactacaaaaacttcagccgcacagatgcggattacatcaagaagtggaagctgtactcctacgggaacaggatccgcatcttcaggaatccaaaaaaaaataacgtctttgactgggaggaagtgtgcctgacatccgcctacaaggaactgttcaataaatacggcatcaattaccagcagggcgacattcgcgccctcctctgtgagcagtccgacaaagcgttttactccagcttcatggccctcatgtccctgatgctccaaatgaggaatagcatcacagggcgcaccgacgtcgacttcctcatcagcccggtgaagaactccgacgggatcttttacgactcccgcaactatgaggcgcaagagaatgcgatcctcccgaagaacgccgatgcgaacggggcctataatatcgccaggaaagtgctctgggccatcgggcagttcaaaaaggcggaggatgagaagctcgacaaggtgaaaattgccatttccaacaaggagtggctggagtacgcgcagacctccgtgaagcacggctcctctggcagctccggctctagcggctcctctggcagctccggctccaagctggagaagtttacaaactgttacagcctctccaaaaccctcaggtttaaagcgatcccggtgggcaagacccaggagaacatcgacaacaagaggctcctggtggaagacgagaagcgcgccgaagactacaagggcgtgaagaagctgctcgataggtactacctcagctttattaacgacgtgctgcacagcatcaaactcaagaatctcaacaactacatctccctcttccgcaaaaagacccgcaccgagaaggagaacaaggagctggagaacctggagatcaacctccgcaaggaaatcgccaaagcgttcaagggcaatgaagggtacaagagcctcttcaagaaagacatcatcgaaactatcctcccagagtttctcgatgacaaggacgagatcgcgctggtgaactcctttaacgggttcacaaccgcgtttaccggcttctttgataacagggaaaatatgttctccgaggaggccaagtccaccagcatcgccttcaggtgtatcaacgagaacctcacccgctacatttccaatatggacattttcgagaaggtggatgcgatcttcgataagcacgaggtgcaggagatcaaagagaagattctcaattccgattatgacgtcgaggatttcttcgaaggggagttctttaattttgtgctcacacaagagggcattgacgtgtacaacgcgattatcgggggcttcgtcacagagtccggggagaagattaaggggctgaatgagtacatcaatctgtacaatcagaagaccaagcagaaactgccgaaattcaagccgctctacaagcaagtcctgtccgatagggaaagcctctccttctacggcgagggctataccagcgacgaggaggtgctggaagtcttccgcaacacactgaataagaatagcgagattttctcctccatcaagaagctcgagaagctctttaagaactttgacgagtacagctccgccgggattttcgtgaagaacgggccggcgatcagcaccatctccaaggacatctttggcgagtggaacgtcatcagggacaagtggaacgccgagtacgacgacatccacctgaagaagaaggcggtggtgaccgagaagtatgaggacgatcgcaggaagtccttcaaaaaaatcggctccttcagcctcgaacagctccaggagtatgccgatgcggatctgtccgtcgtcgagaagctgaaggaaatcatcattcagaaggtcgacgagatctataaagtgtacgggtccagcgagaagctgttcgacgccgactttgtgctcgagaagtccctcaaaaagaatgacgccgtggtggccattatgaaagacctgctcgactccgtgaagtccttcgaaaattacattaaagcgttctttggggaggggaaggaaactaacagggatgagtccttctatggcgactttgtcctcgcgtacgacatcctgctgaaggtcgaccacatttacgacgcgatccgcaactacgtgacacagaagccgtactccaaagac

SEQ ID NO: 576 - DNA, 3729 bp, synthetic construct
  source 1..3729: mol_type = other DNA
aagctgtacttccagaacccgcaatttatggggggctgggacaaggataaagagacagactaccgcgcgacaattctccgctatggctccaaatactatctggccatcatggacaagaagtacgcgaagtgcctgcagaagatcgacaaagacgacgtcaatggcaactatgaaaagatcaactacaagctgctgccgggcccgaacaagatgctcccgaaggtgttcttcagcaagaagtggatggcctactacaatccaagcgaggatattcagaaaatctataaaaacgggaccttcaagaagggggacatgtttaacctcaacgactgccacaagctcattgatttcttcaaggatagcatttcccgctacccgaaatggtccaatgcgtacgattttaacttctccgagacagaaaagtacaaagacatcgcgggcttttacagggaggtggaggagcaagggtataaagtttcttttgaatccgcgagcaagaaggaagtcgacaagctcgtcgaggagggcaagctctacatgttccaaatttataacaaggacttttccgacaagagccatgggaccccaaacctccacaccatgtacttcaaactgctctttgacgagaacaaccacgggcaaatcaggctgagcggcggcgccgaattattcatgcgcagggcctccctcaagaaggaagagctggtcgtccatccagccaattccccgatcgcgaacaagaacccggacaatccgaaaaagaccaccaccctgtcctacgacgtctacaaggacaaacgcttcagcgaagaccagtacgaattacacatcccaattgcgattaataagtgcccaaagaatatcttcaaaattaatacagaggtcagggtgctgctcaaacacgacgacaatccgtatgtcatcggcattgacaggggcgagcgcaatctgctctatatcgtggtcgtggatgggaagggcaatattgtggagcagtactccctgaacgagattatcaacaacttcaatgggattaggattaagaccgactatcacagcctgctcgacaagaaagaaaaagagaggtttgaggcccgccaaaactggacctccattgagaatatcaaagaattaaaggccggctatatttcccaagtcgtccacaagatctgcgagctggtggagaaatatgacgccgtgattgcgctcgaagacttaaattctgggttcaagaactcccgcgtgaaggtggaaaaacaggtgtatcagaaattcgagaaaatgctgatcgacaaactcaattatatggtggataagaagtccaacccgtgtgccacagggggcgcgctgaagggctatcagatcaccaacaagttcgagagcttcaagagcatgagcacccagaacgggtttattttctacatcccggcgtggctcacctccaagattgacccgagcaccggcttcgtgaacctcctgaagacaaagtatacctccattgccgacagcaagaagtttatctcctccttcgaccgcattatgtatgtgccggaggaggacctcttcgagttcgccctcgactacaaaaacttcagccgcacagatgcggattacatcaagaagtggaagctgtactcctacgggaacaggatccgcatcttcaggaatccaaaaaaaaataacgtctttgactgggaggaagtgtgcctgacatccgcctacaaggaactgttcaataaatacggcatcaattaccagcagggcgacattcgcgccctcctctgtgagcagtccgacaaagcgttttactccagcttcatggccctcatgtccctgatgctccaaatgaggaatagcatcacagggcgcaccgacgtcgacttcctcatcagcccggtgaagaactccgacgggatcttttacgactcccgcaactatgaggcgcaagagaatgcgatcctcccgaagaacgccgatgcgaacggggcctataatatcgccaggaaagtgctctgggccatcgggcagttcaaaaaggcggaggatgagaagctcgacaaggtgaaaattgccatttccaacaaggagtggctggagtacgcgcagacctccgtgaagcacggctcctctggcagctccggctctagcggctcctctggcagctccggctccaagctggagaagtttacaaactgttacagcctctccaaaaccctcaggtttaaagcgatcccggtgggcaagacccaggagaacatcgacaacaagaggctcctggtggaagacgagaagcgcgccgaagactacaagggcgtgaagaagctgctcgataggtactacctcagctttattaacgacgtgctgcacagcatcaaactcaagaatctcaacaactacatctccctcttccgcaaaaagacccgcaccgagaaggagaacaaggagctggagaacctggagatcaacctccgcaaggaaatcgccaaagcgttcaagggcaatgaagggtacaagagcctcttcaagaaagacatcatcgaaactatcctcccagagtttctcgatgacaaggacgagatcgcgctggtgaactcctttaacgggttcacaaccgcgtttaccggcttctttgataacagggaaaatatgttctccgaggaggccaagtccaccagcatcgccttcaggtgtatcaacgagaacctcacccgctacatttccaatatggacattttcgagaaggtggatgcgatcttcgataagcacgaggtgcaggagatcaaagagaagattctcaattccgattatgacgtcgaggatttcttcgaaggggagttctttaattttgtgctcacacaagagggcattgacgtgtacaacgcgattatcgggggcttcgtcacagagtccggggagaagattaaggggctgaatgagtacatcaatctgtacaatcagaagaccaagcagaaactgccgaaattcaagccgctctacaagcaagtcctgtccgatagggaaagcctctccttctacggcgagggctataccagcgacgaggaggtgctggaagtcttccgcaacacactgaataagaatagcgagattttctcctccatcaagaagctcgagaagctctttaagaactttgacgagtacagctccgccgggattttcgtgaagaacgggccggcgatcagcaccatctccaaggacatctttggcgagtggaacgtcatcagggacaagtggaacgccgagtacgacgacatccacctgaagaagaaggcggtggtgaccgagaagtatgaggacgatcgcaggaagtccttcaaaaaaatcggctccttcagcctcgaacagctccaggagtatgccgatgcggatctgtccgtcgtcgagaagctgaaggaaatcatcattcagaaggtcgacgagatctataaagtgtacgggtccagcgagaagctgttcgacgccgactttgtgctcgagaagtccctcaaaaagaatgacgccgtggtggccattatgaaagacctgctcgactccgtgaagtccttcgaaaattacattaaagcgttctttggggaggggaaggaaactaacagggatgagtccttctatggcgactttgtcctcgcgtacgacatcctgctgaaggtcgaccacatttacgacgcgatccgcaactacgtgacacagaagccgtactccaaagacaagttc

SEQ ID NO: 577 - DNA, 3729 bp, synthetic construct
  source 1..3729: mol_type = other DNA
gccgactttgtgctcgagaagtccctcaaaaagaatgacgccgtggtggccattatgaaagacctgctcgactccgtgaagtccttcgaaaattacattaaagcgttctttggggaggggaaggaaactaacagggatgagtccttctatggcgactttgtcctcgcgtacgacatcctgctgaaggtcgaccacatttacgacgcgatccgcaactacgtgacacagaagccgtactccaaagacaagttcaagctgtacttccagaacccgcaatttatggggggctgggacaaggataaagagacagactaccgcgcgacaattctccgctatggctccaaatactatctggccatcatggacaagaagtacgcgaagtgcctgcagaagatcgacaaagacgacgtcaatggcaactatgaaaagatcaactacaagctgctgccgggcccgaacaagatgctcccgaaggtgttcttcagcaagaagtggatggcctactacaatccaagcgaggatattcagaaaatctataaaaacgggaccttcaagaagggggacatgtttaacctcaacgactgccacaagctcattgatttcttcaaggatagcatttcccgctacccgaaatggtccaatgcgtacgattttaacttctccgagacagaaaagtacaaagacatcgcgggcttttacagggaggtggaggagcaagggtataaagtttcttttgaatccgcgagcaagaaggaagtcgacaagctcgtcgaggagggcaagctctacatgttccaaatttataacaaggacttttccgacaagagccatgggaccccaaacctccacaccatgtacttcaaactgctctttgacgagaacaaccacgggcaaatcaggctgagcggcggcgccgaattattcatgcgcagggcctccctcaagaaggaagagctggtcgtccatccagccaattccccgatcgcgaacaagaacccggacaatccgaaaaagaccaccaccctgtcctacgacgtctacaaggacaaacgcttcagcgaagaccagtacgaattacacatcccaattgcgattaataagtgcccaaagaatatcttcaaaattaatacagaggtcagggtgctgctcaaacacgacgacaatccgtatgtcatcggcattgacaggggcgagcgcaatctgctctatatcgtggtcgtggatgggaagggcaatattgtggagcagtactccctgaacgagattatcaacaacttcaatgggattaggattaagaccgactatcacagcctgctcgacaagaaagaaaaagagaggtttgaggcccgccaaaactggacctccattgagaatatcaaagaattaaaggccggctatatttcccaagtcgtccacaagatctgcgagctggtggagaaatatgacgccgtgattgcgctcgaagacttaaattctgggttcaagaactcccgcgtgaaggtggaaaaacaggtgtatcagaaattcgagaaaatgctgatcgacaaactcaattatatggtggataagaagtccaacccgtgtgccacagggggcgcgctgaagggctatcagatcaccaacaagttcgagagcttcaagagcatgagcacccagaacgggtttattttctacatcccggcgtggctcacctccaagattgacccgagcaccggcttcgtgaacctcctgaagacaaagtatacctccattgccgacagcaagaagtttatctcctccttcgaccgcattatgtatgtgccggaggaggacctcttcgagttcgccctcgactacaaaaacttcagccgcacagatgcggattacatcaagaagtggaagctgtactcctacgggaacaggatccgcatcttcaggaatccaaaaaaaaataacgtctttgactgggaggaagtgtgcctgacatccgcctacaaggaactgttcaataaatacggcatcaattaccagcagggcgacattcgcgccctcctctgtgagcagtccgacaaagcgttttactccagcttcatggccctcatgtccctgatgctccaaatgaggaatagcatcacagggcgcaccgacgtcgacttcctcatcagcccggtgaagaactccgacgggatcttttacgactcccgcaactatgaggcgcaagagaatgcgatcctcccgaagaacgccgatgcgaacggggcctataatatcgccaggaaagtgctctgggccatcgggcagttcaaaaaggcggaggatgagaagctcgacaaggtgaaaattgccatttccaacaaggagtggctggagtacgcgcagacctccgtgaagcacggctcctctggcagctccggctctagcggctcctctggcagctccggctccaagctggagaagtttacaaactgttacagcctctccaaaaccctcaggtttaaagcgatcccggtgggcaagacccaggagaacatcgacaacaagaggctcctggtggaagacgagaagcgcgccgaagactacaagggcgtgaagaagctgctcgataggtactacctcagctttattaacgacgtgctgcacagcatcaaactcaagaatctcaacaactacatctccctcttccgcaaaaagacccgcaccgagaaggagaacaaggagctggagaacctggagatcaacctccgcaaggaaatcgccaaagcgttcaagggcaatgaagggtacaagagcctcttcaagaaagacatcatcgaaactatcctcccagagtttctcgatgacaaggacgagatcgcgctggtgaactcctttaacgggttcacaaccgcgtttaccggcttctttgataacagggaaaatatgttctccgaggaggccaagtccaccagcatcgccttcaggtgtatcaacgagaacctcacccgctacatttccaatatggacattttcgagaaggtggatgcgatcttcgataagcacgaggtgcaggagatcaaagagaagattctcaattccgattatgacgtcgaggatttcttcgaaggggagttctttaattttgtgctcacacaagagggcattgacgtgtacaacgcgattatcgggggcttcgtcacagagtccggggagaagattaaggggctgaatgagtacatcaatctgtacaatcagaagaccaagcagaaactgccgaaattcaagccgctctacaagcaagtcctgtccgatagggaaagcctctccttctacggcgagggctataccagcgacgaggaggtgctggaagtcttccgcaacacactgaataagaatagcgagattttctcctccatcaagaagctcgagaagctctttaagaactttgacgagtacagctccgccgggattttcgtgaagaacgggccggcgatcagcaccatctccaaggacatctttggcgagtggaacgtcatcagggacaagtggaacgccgagtacgacgacatccacctgaagaagaaggcggtggtgaccgagaagtatgaggacgatcgcaggaagtccttcaaaaaaatcggctccttcagcctcgaacagctccaggagtatgccgatgcggatctgtccgtcgtcgagaagctgaaggaaatcatcattcagaaggtcgacgagatctataaagtgtacgggtccagcgagaagctgttcgac

SEQ ID NO: 578 - DNA, 3729 bp, synthetic construct
  source 1..3729: mol_type = other DNA
ctcgagaagtccctcaaaaagaatgacgccgtggtggccattatgaaagacctgctcgactccgtgaagtccttcgaaaattacattaaagcgttctttggggaggggaaggaaactaacagggatgagtccttctatggcgactttgtcctcgcgtacgacatcctgctgaaggtcgaccacatttacgacgcgatccgcaactacgtgacacagaagccgtactccaaagacaagttcaagctgtacttccagaacccgcaatttatggggggctgggacaaggataaagagacagactaccgcgcgacaattctccgctatggctccaaatactatctggccatcatggacaagaagtacgcgaagtgcctgcagaagatcgacaaagacgacgtcaatggcaactatgaaaagatcaactacaagctgctgccgggcccgaacaagatgctcccgaaggtgttcttcagcaagaagtggatggcctactacaatccaagcgaggatattcagaaaatctataaaaacgggaccttcaagaagggggacatgtttaacctcaacgactgccacaagctcattgatttcttcaaggatagcatttcccgctacccgaaatggtccaatgcgtacgattttaacttctccgagacagaaaagtacaaagacatcgcgggcttttacagggaggtggaggagcaagggtataaagtttcttttgaatccgcgagcaagaaggaagtcgacaagctcgtcgaggagggcaagctctacatgttccaaatttataacaaggacttttccgacaagagccatgggaccccaaacctccacaccatgtacttcaaactgctctttgacgagaacaaccacgggcaaatcaggctgagcggcggcgccgaattattcatgcgcagggcctccctcaagaaggaagagctggtcgtccatccagccaattccccgatcgcgaacaagaacccggacaatccgaaaaagaccaccaccctgtcctacgacgtctacaaggacaaacgcttcagcgaagaccagtacgaattacacatcccaattgcgattaataagtgcccaaagaatatcttcaaaattaatacagaggtcagggtgctgctcaaacacgacgacaatccgtatgtcatcggcattgacaggggcgagcgcaatctgctctatatcgtggtcgtggatgggaagggcaatattgtggagcagtactccctgaacgagattatcaacaacttcaatgggattaggattaagaccgactatcacagcctgctcgacaagaaagaaaaagagaggtttgaggcccgccaaaactggacctccattgagaatatcaaagaattaaaggccggctatatttcccaagtcgtccacaagatctgcgagctggtggagaaatatgacgccgtgattgcgctcgaagacttaaattctgggttcaagaactcccgcgtgaaggtggaaaaacaggtgtatcagaaattcgagaaaatgctgatcgacaaactcaattatatggtggataagaagtccaacccgtgtgccacagggggcgcgctgaagggctatcagatcaccaacaagttcgagagcttcaagagcatgagcacccagaacgggtttattttctacatcccggcgtggctcacctccaagattgacccgagcaccggcttcgtgaacctcctgaagacaaagtatacctccattgccgacagcaagaagtttatctcctccttcgaccgcattatgtatgtgccggaggaggacctcttcgagttcgccctcgactacaaaaacttcagccgcacagatgcggattacatcaagaagtggaagctgtactcctacgggaacaggatccgcatcttcaggaatccaaaaaaaaataacgtctttgactgggaggaagtgtgcctgacatccgcctacaaggaactgttcaataaatacggcatcaattaccagcagggcgacattcgcgccctcctctgtgagcagtccgacaaagcgttttactccagcttcatggccctcatgtccctgatgctccaaatgaggaatagcatcacagggcgcaccgacgtcgacttcctcatcagcccggtgaagaactccgacgggatcttttacgactcccgcaactatgaggcgcaagagaatgcgatcctcccgaagaacgccgatgcgaacggggcctataatatcgccaggaaagtgctctgggccatcgggcagttcaaaaaggcggaggatgagaagctcgacaaggtgaaaattgccatttccaacaaggagtggctggagtacgcgcagacctccgtgaagcacggctcctctggcagctccggctctagcggctcctctggcagctccggctccaagctggagaagtttacaaactgttacagcctctccaaaaccctcaggtttaaagcgatcccggtgggcaagacccaggagaacatcgacaacaagaggctcctggtggaagacgagaagcgcgccgaagactacaagggcgtgaagaagctgctcgataggtactacctcagctttattaacgacgtgctgcacagcatcaaactcaagaatctcaacaactacatctccctcttccgcaaaaagacccgcaccgagaaggagaacaaggagctggagaacctggagatcaacctccgcaaggaaatcgccaaagcgttcaagggcaatgaagggtacaagagcctcttcaagaaagacatcatcgaaactatcctcccagagtttctcgatgacaaggacgagatcgcgctggtgaactcctttaacgggttcacaaccgcgtttaccggcttctttgataacagggaaaatatgttctccgaggaggccaagtccaccagcatcgccttcaggtgtatcaacgagaacctcacccgctacatttccaatatggacattttcgagaaggtggatgcgatcttcgataagcacgaggtgcaggagatcaaagagaagattctcaattccgattatgacgtcgaggatttcttcgaaggggagttctttaattttgtgctcacacaagagggcattgacgtgtacaacgcgattatcgggggcttcgtcacagagtccggggagaagattaaggggctgaatgagtacatcaatctgtacaatcagaagaccaagcagaaactgccgaaattcaagccgctctacaagcaagtcctgtccgatagggaaagcctctccttctacggcgagggctataccagcgacgaggaggtgctggaagtcttccgcaacacactgaataagaatagcgagattttctcctccatcaagaagctcgagaagctctttaagaactttgacgagtacagctccgccgggattttcgtgaagaacgggccggcgatcagcaccatctccaaggacatctttggcgagtggaacgtcatcagggacaagtggaacgccgagtacgacgacatccacctgaagaagaaggcggtggtgaccgagaagtatgaggacgatcgcaggaagtccttcaaaaaaatcggctccttcagcctcgaacagctccaggagtatgccgatgcggatctgtccgtcgtcgagaagctgaaggaaatcatcattcagaaggtcgacgagatctataaagtgtacgggtccagcgagaagctgttcgacgccgactttgtg

SEQ ID NO: 579 - DNA, 3729 bp, synthetic construct
  source 1..3729: mol_type = other DNA
aaaaagaatgacgccgtggtggccattatgaaagacctgctcgactccgtgaagtccttcgaaaattacattaaagcgttctttggggaggggaaggaaactaacagggatgagtccttctatggcgactttgtcctcgcgtacgacatcctgctgaaggtcgaccacatttacgacgcgatccgcaactacgtgacacagaagccgtactccaaagacaagttcaagctgtacttccagaacccgcaatttatggggggctgggacaaggataaagagacagactaccgcgcgacaattctccgctatggctccaaatactatctggccatcatggacaagaagtacgcgaagtgcctgcagaagatcgacaaagacgacgtcaatggcaactatgaaaagatcaactacaagctgctgccgggcccgaacaagatgctcccgaaggtgttcttcagcaagaagtggatggcctactacaatccaagcgaggatattcagaaaatctataaaaacgggaccttcaagaagggggacatgtttaacctcaacgactgccacaagctcattgatttcttcaaggatagcatttcccgctacccgaaatggtccaatgcgtacgattttaacttctccgagacagaaaagtacaaagacatcgcgggcttttacagggaggtggaggagcaagggtataaagtttcttttgaatccgcgagcaagaaggaagtcgacaagctcgtcgaggagggcaagctctacatgttccaaatttataacaaggacttttccgacaagagccatgggaccccaaacctccacaccatgtacttcaaactgctctttgacgagaacaaccacgggcaaatcaggctgagcggcggcgccgaattattcatgcgcagggcctccctcaagaaggaagagctggtcgtccatccagccaattccccgatcgcgaacaagaacccggacaatccgaaaaagaccaccaccctgtcctacgacgtctacaaggacaaacgcttcagcgaagaccagtacgaattacacatcccaattgcgattaataagtgcccaaagaatatcttcaaaattaatacagaggtcagggtgctgctcaaacacgacgacaatccgtatgtcatcggcattgacaggggcgagcgcaatctgctctatatcgtggtcgtggatgggaagggcaatattgtggagcagtactccctgaacgagattatcaacaacttcaatgggattaggattaagaccgactatcacagcctgctcgacaagaaagaaaaagagaggtttgaggcccgccaaaactggacctccattgagaatatcaaagaattaaaggccggctatatttcccaagtcgtccacaagatctgcgagctggtggagaaatatgacgccgtgattgcgctcgaagacttaaattctgggttcaagaactcccgcgtgaaggtggaaaaacaggtgtatcagaaattcgagaaaatgctgatcgacaaactcaattatatggtggataagaagtccaacccgtgtgccacagggggcgcgctgaagggctatcagatcaccaacaagttcgagagcttcaagagcatgagcacccagaacgggtttattttctacatcccggcgtggctcacctccaagattgacccgagcaccggcttcgtgaacctcctgaagacaaagtatacctccattgccgacagcaagaagtttatctcctccttcgaccgcattatgtatgtgccggaggaggacctcttcgagttcgccctcgactacaaaaacttcagccgcacagatgcggattacatcaagaagtggaagctgtactcctacgggaacaggatccgcatcttcaggaatccaaaaaaaaataacgtctttgactgggaggaagtgtgcctgacatccgcctacaaggaactgttcaataaatacggcatcaattaccagcagggcgacattcgcgccctcctctgtgagcagtccgacaaagcgttttactccagcttcatggccctcatgtccctgatgctccaaatgaggaatagcatcacagggcgcaccgacgtcgacttcctcatcagcccggtgaagaactccgacgggatcttttacgactcccgcaactatgaggcgcaagagaatgcgatcctcccgaagaacgccgatgcgaacggggcctataatatcgccaggaaagtgctctgggccatcgggcagttcaaaaaggcggaggatgagaagctcgacaaggtgaaaattgccatttccaacaaggagtggctggagtacgcgcagacctccgtgaagcacggctcctctggcagctccggctctagcggctcctctggcagctccggctccaagctggagaagtttacaaactgttacagcctctccaaaaccctcaggtttaaagcgatcccggtgggcaagacccaggagaacatcgacaacaagaggctcctggtggaagacgagaagcgcgccgaagactacaagggcgtgaagaagctgctcgataggtactacctcagctttattaacgacgtgctgcacagcatcaaactcaagaatctcaacaactacatctccctcttccgcaaaaagacccgcaccgagaaggagaacaaggagctggagaacctggagatcaacctccgcaaggaaatcgccaaagcgttcaagggcaatgaagggtacaagagcctcttcaagaaagacatcatcgaaactatcctcccagagtttctcgatgacaaggacgagatcgcgctggtgaactcctttaacgggttcacaaccgcgtttaccggcttctttgataacagggaaaatatgttctccgaggaggccaagtccaccagcatcgccttcaggtgtatcaacgagaacctcacccgctacatttccaatatggacattttcgagaaggtggatgcgatcttcgataagcacgaggtgcaggagatcaaagagaagattctcaattccgattatgacgtcgaggatttcttcgaaggggagttctttaattttgtgctcacacaagagggcattgacgtgtacaacgcgattatcgggggcttcgtcacagagtccggggagaagattaaggggctgaatgagtacatcaatctgtacaatcagaagaccaagcagaaactgccgaaattcaagccgctctacaagcaagtcctgtccgatagggaaagcctctccttctacggcgagggctataccagcgacgaggaggtgctggaagtcttccgcaacacactgaataagaatagcgagattttctcctccatcaagaagctcgagaagctctttaagaactttgacgagtacagctccgccgggattttcgtgaagaacgggccggcgatcagcaccatctccaaggacatctttggcgagtggaacgtcatcagggacaagtggaacgccgagtacgacgacatccacctgaagaagaaggcggtggtgaccgagaagtatgaggacgatcgcaggaagtccttcaaaaaaatcggctccttcagcctcgaacagctccaggagtatgccgatgcggatctgtccgtcgtcgagaagctgaaggaaatcatcattcagaaggtcgacgagatctataaagtgtacgggtccagcgagaagctgttcgacgccgactttgtgctcgagaagtccctc

SEQ ID NO: 580 - DNA, 3729 bp, synthetic construct
  source 1..3729: mol_type = other DNA
gacgccgtggtggccattatgaaagacctgctcgactccgtgaagtccttcgaaaattacattaaagcgttctttggggaggggaaggaaactaacagggatgagtccttctatggcgactttgtcctcgcgtacgacatcctgctgaaggtcgaccacatttacgacgcgatccgcaactacgtgacacagaagccgtactccaaagacaagttcaagctgtacttccagaacccgcaatttatggggggctgggacaaggataaagagacagactaccgcgcgacaattctccgctatggctccaaatactatctggccatcatggacaagaagtacgcgaagtgcctgcagaagatcgacaaagacgacgtcaatggcaactatgaaaagatcaactacaagctgctgccgggcccgaacaagatgctcccgaaggtgttcttcagcaagaagtggatggcctactacaatccaagcgaggatattcagaaaatctataaaaacgggaccttcaagaagggggacatgtttaacctcaacgactgccacaagctcattgatttcttcaaggatagcatttcccgctacccgaaatggtccaatgcgtacgattttaacttctccgagacagaaaagtacaaagacatcgcgggcttttacagggaggtggaggagcaagggtataaagtttcttttgaatccgcgagcaagaaggaagtcgacaagctcgtcgaggagggcaagctctacatgttccaaatttataacaaggacttttccgacaagagccatgggaccccaaacctccacaccatgtacttcaaactgctctttgacgagaacaaccacgggcaaatcaggctgagcggcggcgccgaattattcatgcgcagggcctccctcaagaaggaagagctggtcgtccatccagccaattccccgatcgcgaacaagaacccggacaatccgaaaaagaccaccaccctgtcctacgacgtctacaaggacaaacgcttcagcgaagaccagtacgaattacacatcccaattgcgattaataagtgcccaaagaatatcttcaaaattaatacagaggtcagggtgctgctcaaacacgacgacaatccgtatgtcatcggcattgacaggggcgagcgcaatctgctctatatcgtggtcgtggatgggaagggcaatattgtggagcagtactccctgaacgagattatcaacaacttcaatgggattaggattaagaccgactatcacagcctgctcgacaagaaagaaaaagagaggtttgaggcccgccaaaactggacctccattgagaatatcaaagaattaaaggccggctatatttcccaagtcgtccacaagatctgcgagctggtggagaaatatgacgccgtgattgcgctcgaagacttaaattctgggttcaagaactcccgcgtgaaggtggaaaaacaggtgtatcagaaattcgagaaaatgctgatcgacaaactcaattatatggtggataagaagtccaacccgtgtgccacagggggcgcgctgaagggctatcagatcaccaacaagttcgagagcttcaagagcatgagcacccagaacgggtttattttctacatcccggcgtggctcacctccaagattgacccgagcaccggcttcgtgaacctcctgaagacaaagtatacctccattgccgacagcaagaagtttatctcctccttcgaccgcattatgtatgtgccggaggaggacctcttcgagttcgccctcgactacaaaaacttcagccgcacagatgcggattacatcaagaagtggaagctgtactcctacgggaacaggatccgcatcttcaggaatccaaaaaaaaataacgtctttgactgggaggaagtgtgcctgacatccgcctacaaggaactgttcaataaatacggcatcaattaccagcagggcgacattcgcgccctcctctgtgagcagtccgacaaagcgttttactccagcttcatggccctcatgtccctgatgctccaaatgaggaatagcatcacagggcgcaccgacgtcgacttcctcatcagcccggtgaagaactccgacgggatcttttacgactcccgcaactatgaggcgcaagagaatgcgatcctcccgaagaacgccgatgcgaacggggcctataatatcgccaggaaagtgctctgggccatcgggcagttcaaaaaggcggaggatgagaagctcgacaaggtgaaaattgccatttccaacaaggagtggctggagtacgcgcagacctccgtgaagcacggctcctctggcagctccggctctagcggctcctctggcagctccggctccaagctggagaagtttacaaactgttacagcctctccaaaaccctcaggtttaaagcgatcccggtgggcaagacccaggagaacatcgacaacaagaggctcctggtggaagacgagaagcgcgccgaagactacaagggcgtgaagaagctgctcgataggtactacctcagctttattaacgacgtgctgcacagcatcaaactcaagaatctcaacaactacatctccctcttccgcaaaaagacccgcaccgagaaggagaacaaggagctggagaacctggagatcaacctccgcaaggaaatcgccaaagcgttcaagggcaatgaagggtacaagagcctcttcaagaaagacatcatcgaaactatcctcccagagtttctcgatgacaaggacgagatcgcgctggtgaactcctttaacgggttcacaaccgcgtttaccggcttctttgataacagggaaaatatgttctccgaggaggccaagtccaccagcatcgccttcaggtgtatcaacgagaacctcacccgctacatttccaatatggacattttcgagaaggtggatgcgatcttcgataagcacgaggtgcaggagatcaaagagaagattctcaattccgattatgacgtcgaggatttcttcgaaggggagttctttaattttgtgctcacacaagagggcattgacgtgtacaacgcgattatcgggggcttcgtcacagagtccggggagaagattaaggggctgaatgagtacatcaatctgtacaatcagaagaccaagcagaaactgccgaaattcaagccgctctacaagcaagtcctgtccgatagggaaagcctctccttctacggcgagggctataccagcgacgaggaggtgctggaagtcttccgcaacacactgaataagaatagcgagattttctcctccatcaagaagctcgagaagctctttaagaactttgacgagtacagctccgccgggattttcgtgaagaacgggccggcgatcagcaccatctccaaggacatctttggcgagtggaacgtcatcagggacaagtggaacgccgagtacgacgacatccacctgaagaagaaggcggtggtgaccgagaagtatgaggacgatcgcaggaagtccttcaaaaaaatcggctccttcagcctcgaacagctccaggagtatgccgatgcggatctgtccgtcgtcgagaagctgaaggaaatcatcattcagaaggtcgacgagatctataaagtgtacgggtccagcgagaagctgttcgacgccgactttgtgctcgagaagtccctcaaaaagaat

SEQ ID NO: 581 - DNA, 3729 bp, synthetic construct
  source 1..3729: mol_type = other DNA
gagcagtccgacaaagcgttttactccagcttcatggccctcatgtccctgatgctccaaatgaggaatagcatcacagggcgcaccgacgtcgacttcctcatcagcccggtgaagaactccgacgggatcttttacgactcccgcaactatgaggcgcaagagaatgcgatcctcccgaagaacgccgatgcgaacggggcctataatatcgccaggaaagtgctctgggccatcgggcagttcaaaaaggcggaggatgagaagctcgacaaggtgaaaattgccatttccaacaaggagtggctggagtacgcgcagacctccgtgaagcacggctcctctggcagctccggctctagcggctcctctggcagctccggctccaagctggagaagtttacaaactgttacagcctctccaaaaccctcaggtttaaagcgatcccggtgggcaagacccaggagaacatcgacaacaagaggctcctggtggaagacgagaagcgcgccgaagactacaagggcgtgaagaagctgctcgataggtactacctcagctttattaacgacgtgctgcacagcatcaaactcaagaatctcaacaactacatctccctcttccgcaaaaagacccgcaccgagaaggagaacaaggagctggagaacctggagatcaacctccgcaaggaaatcgccaaagcgttcaagggcaatgaagggtacaagagcctcttcaagaaagacatcatcgaaactatcctcccagagtttctcgatgacaaggacgagatcgcgctggtgaactcctttaacgggttcacaaccgcgtttaccggcttctttgataacagggaaaatatgttctccgaggaggccaagtccaccagcatcgccttcaggtgtatcaacgagaacctcacccgctacatttccaatatggacattttcgagaaggtggatgcgatcttcgataagcacgaggtgcaggagatcaaagagaagattctcaattccgattatgacgtcgaggatttcttcgaaggggagttctttaattttgtgctcacacaagagggcattgacgtgtacaacgcgattatcgggggcttcgtcacagagtccggggagaagattaaggggctgaatgagtacatcaatctgtacaatcagaagaccaagcagaaactgccgaaattcaagccgctctacaagcaagtcctgtccgatagggaaagcctctccttctacggcgagggctataccagcgacgaggaggtgctggaagtcttccgcaacacactgaataagaatagcgagattttctcctccatcaagaagctcgagaagctctttaagaactttgacgagtacagctccgccgggattttcgtgaagaacgggccggcgatcagcaccatctccaaggacatctttggcgagtggaacgtcatcagggacaagtggaacgccgagtacgacgacatccacctgaagaagaaggcggtggtgaccgagaagtatgaggacgatcgcaggaagtccttcaaaaaaatcggctccttcagcctcgaacagctccaggagtatgccgatgcggatctgtccgtcgtcgagaagctgaaggaaatcatcattcagaaggtcgacgagatctataaagtgtacgggtccagcgagaagctgttcgacgccgactttgtgctcgagaagtccctcaaaaagaatgacgccgtggtggccattatgaaagacctgctcgactccgtgaagtccttcgaaaattacattaaagcgttctttggggaggggaaggaaactaacagggatgagtccttctatggcgactttgtcctcgcgtacgacatcctgctgaaggtcgaccacatttacgacgcgatccgcaactacgtgacacagaagccgtactccaaagacaagttcaagctgtacttccagaacccgcaatttatggggggctgggacaaggataaagagacagactaccgcgcgacaattctccgctatggctccaaatactatctggccatcatggacaagaagtacgcgaagtgcctgcagaagatcgacaaagacgacgtcaatggcaactatgaaaagatcaactacaagctgctgccgggcccgaacaagatgctcccgaaggtgttcttcagcaagaagtggatggcctactacaatccaagcgaggatattcagaaaatctataaaaacgggaccttcaagaagggggacatgtttaacctcaacgactgccacaagctcattgatttcttcaaggatagcatttcccgctacccgaaatggtccaatgcgtacgattttaacttctccgagacagaaaagtacaaagacatcgcgggcttttacagggaggtggaggagcaagggtataaagtttcttttgaatccgcgagcaagaaggaagtcgacaagctcgtcgaggagggcaagctctacatgttccaaatttataacaaggacttttccgacaagagccatgggaccccaaacctccacaccatgtacttcaaactgctctttgacgagaacaaccacgggcaaatcaggctgagcggcggcgccgaattattcatgcgcagggcctccctcaagaaggaagagctggtcgtccatccagccaattccccgatcgcgaacaagaacccggacaatccgaaaaagaccaccaccctgtcctacgacgtctacaaggacaaacgcttcagcgaagaccagtacgaattacacatcccaattgcgattaataagtgcccaaagaatatcttcaaaattaatacagaggtcagggtgctgctcaaacacgacgacaatccgtatgtcatcggcattgacaggggcgagcgcaatctgctctatatcgtggtcgtggatgggaagggcaatattgtggagcagtactccctgaacgagattatcaacaacttcaatgggattaggattaagaccgactatcacagcctgctcgacaagaaagaaaaagagaggtttgaggcccgccaaaactggacctccattgagaatatcaaagaattaaaggccggctatatttcccaagtcgtccacaagatctgcgagctggtggagaaatatgacgccgtgattgcgctcgaagacttaaattctgggttcaagaactcccgcgtgaaggtggaaaaacaggtgtatcagaaattcgagaaaatgctgatcgacaaactcaattatatggtggataagaagtccaacccgtgtgccacagggggcgcgctgaagggctatcagatcaccaacaagttcgagagcttcaagagcatgagcacccagaacgggtttattttctacatcccggcgtggctcacctccaagattgacccgagcaccggcttcgtgaacctcctgaagacaaagtatacctccattgccgacagcaagaagtttatctcctccttcgaccgcattatgtatgtgccggaggaggacctcttcgagttcgccctcgactacaaaaacttcagccgcacagatgcggattacatcaagaagtggaagctgtactcctacgggaacaggatccgcatcttcaggaatccaaaaaaaaataacgtctttgactgggaggaagtgtgcctgacatccgcctacaaggaactgttcaataaatacggcatcaattaccagcagggcgacattcgcgccctcctctgt

SEQ ID NO: 582 - DNA, 3729 bp, synthetic construct
  source 1..3729: mol_type = other DNA
cagtccgacaaagcgttttactccagcttcatggccctcatgtccctgatgctccaaatgaggaatagcatcacagggcgcaccgacgtcgacttcctcatcagcccggtgaagaactccgacgggatcttttacgactcccgcaactatgaggcgcaagagaatgcgatcctcccgaagaacgccgatgcgaacggggcctataatatcgccaggaaagtgctctgggccatcgggcagttcaaaaaggcggaggatgagaagctcgacaaggtgaaaattgccatttccaacaaggagtggctggagtacgcgcagacctccgtgaagcacggctcctctggcagctccggctctagcggctcctctggcagctccggctccaagctggagaagtttacaaactgttacagcctctccaaaaccctcaggtttaaagcgatcccggtgggcaagacccaggagaacatcgacaacaagaggctcctggtggaagacgagaagcgcgccgaagactacaagggcgtgaagaagctgctcgataggtactacctcagctttattaacgacgtgctgcacagcatcaaactcaagaatctcaacaactacatctccctcttccgcaaaaagacccgcaccgagaaggagaacaaggagctggagaacctggagatcaacctccgcaaggaaatcgccaaagcgttcaagggcaatgaagggtacaagagcctcttcaagaaagacatcatcgaaactatcctcccagagtttctcgatgacaaggacgagatcgcgctggtgaactcctttaacgggttcacaaccgcgtttaccggcttctttgataacagggaaaatatgttctccgaggaggccaagtccaccagcatcgccttcaggtgtatcaacgagaacctcacccgctacatttccaatatggacattttcgagaaggtggatgcgatcttcgataagcacgaggtgcaggagatcaaagagaagattctcaattccgattatgacgtcgaggatttcttcgaaggggagttctttaattttgtgctcacacaagagggcattgacgtgtacaacgcgattatcgggggcttcgtcacagagtccggggagaagattaaggggctgaatgagtacatcaatctgtacaatcagaagaccaagcagaaactgccgaaattcaagccgctctacaagcaagtcctgtccgatagggaaagcctctccttctacggcgagggctataccagcgacgaggaggtgctggaagtcttccgcaacacactgaataagaatagcgagattttctcctccatcaagaagctcgagaagctctttaagaactttgacgagtacagctccgccgggattttcgtgaagaacgggccggcgatcagcaccatctccaaggacatctttggcgagtggaacgtcatcagggacaagtggaacgccgagtacgacgacatccacctgaagaagaaggcggtggtgaccgagaagtatgaggacgatcgcaggaagtccttcaaaaaaatcggctccttcagcctcgaacagctccaggagtatgccgatgcggatctgtccgtcgtcgagaagctgaaggaaatcatcattcagaaggtcgacgagatctataaagtgtacgggtccagcgagaagctgttcgacgccgactttgtgctcgagaagtccctcaaaaagaatgacgccgtggtggccattatgaaagacctgctcgactccgtgaagtccttcgaaaattacattaaagcgttctttggggaggggaaggaaactaacagggatgagtccttctatggcgactttgtcctcgcgtacgacatcctgctgaaggtcgaccacatttacgacgcgatccgcaactacgtgacacagaagccgtactccaaagacaagttcaagctgtacttccagaacccgcaatttatggggggctgggacaaggataaagagacagactaccgcgcgacaattctccgctatggctccaaatactatctggccatcatggacaagaagtacgcgaagtgcctgcagaagatcgacaaagacgacgtcaatggcaactatgaaaagatcaactacaagctgctgccgggcccgaacaagatgctcccgaaggtgttcttcagcaagaagtggatggcctactacaatccaagcgaggatattcagaaaatctataaaaacgggaccttcaagaagggggacatgtttaacctcaacgactgccacaagctcattgatttcttcaaggatagcatttcccgctacccgaaatggtccaatgcgtacgattttaacttctccgagacagaaaagtacaaagacatcgcgggcttttacagggaggtggaggagcaagggtataaagtttcttttgaatccgcgagcaagaaggaagtcgacaagctcgtcgaggagggcaagctctacatgttccaaatttataacaaggacttttccgacaagagccatgggaccccaaacctccacaccatgtacttcaaactgctctttgacgagaacaaccacgggcaaatcaggctgagcggcggcgccgaattattcatgcgcagggcctccctcaagaaggaagagctggtcgtccatccagccaattccccgatcgcgaacaagaacccggacaatccgaaaaagaccaccaccctgtcctacgacgtctacaaggacaaacgcttcagcgaagaccagtacgaattacacatcccaattgcgattaataagtgcccaaagaatatcttcaaaattaatacagaggtcagggtgctgctcaaacacgacgacaatccgtatgtcatcggcattgacaggggcgagcgcaatctgctctatatcgtggtcgtggatgggaagggcaatattgtggagcagtactccctgaacgagattatcaacaacttcaatgggattaggattaagaccgactatcacagcctgctcgacaagaaagaaaaagagaggtttgaggcccgccaaaactggacctccattgagaatatcaaagaattaaaggccggctatatttcccaagtcgtccacaagatctgcgagctggtggagaaatatgacgccgtgattgcgctcgaagacttaaattctgggttcaagaactcccgcgtgaaggtggaaaaacaggtgtatcagaaattcgagaaaatgctgatcgacaaactcaattatatggtggataagaagtccaacccgtgtgccacagggggcgcgctgaagggctatcagatcaccaacaagttcgagagcttcaagagcatgagcacccagaacgggtttattttctacatcccggcgtggctcacctccaagattgacccgagcaccggcttcgtgaacctcctgaagacaaagtatacctccattgccgacagcaagaagtttatctcctccttcgaccgcattatgtatgtgccggaggaggacctcttcgagttcgccctcgactacaaaaacttcagccgcacagatgcggattacatcaagaagtggaagctgtactcctacgggaacaggatccgcatcttcaggaatccaaaaaaaaataacgtctttgactgggaggaagtgtgcctgacatccgcctacaaggaactgttcaataaatacggcatcaattaccagcagggcgacattcgcgccctcctctgtgag

SEQ ID NO: 583 - DNA, 3729 bp, synthetic construct
  source 1..3729: mol_type = other DNA
aaagcgttttactccagcttcatggccctcatgtccctgatgctccaaatgaggaatagcatcacagggcgcaccgacgtcgacttcctcatcagcccggtgaagaactccgacgggatcttttacgactcccgcaactatgaggcgcaagagaatgcgatcctcccgaagaacgccgatgcgaacggggcctataatatcgccaggaaagtgctctgggccatcgggcagttcaaaaaggcggaggatgagaagctcgacaaggtgaaaattgccatttccaacaaggagtggctggagtacgcgcagacctccgtgaagcacggctcctctggcagctccggctctagcggctcctctggcagctccggctccaagctggagaagtttacaaactgttacagcctctccaaaaccctcaggtttaaagcgatcccggtgggcaagacccaggagaacatcgacaacaagaggctcctggtggaagacgagaagcgcgccgaagactacaagggcgtgaagaagctgctcgataggtactacctcagctttattaacgacgtgctgcacagcatcaaactcaagaatctcaacaactacatctccctcttccgcaaaaagacccgcaccgagaaggagaacaaggagctggagaacctggagatcaacctccgcaaggaaatcgccaaagcgttcaagggcaatgaagggtacaagagcctcttcaagaaagacatcatcgaaactatcctcccagagtttctcgatgacaaggacgagatcgcgctggtgaactcctttaacgggttcacaaccgcgtttaccggcttctttgataacagggaaaatatgttctccgaggaggccaagtccaccagcatcgccttcaggtgtatcaacgagaacctcacccgctacatttccaatatggacattttcgagaaggtggatgcgatcttcgataagcacgaggtgcaggagatcaaagagaagattctcaattccgattatgacgtcgaggatttcttcgaaggggagttctttaattttgtgctcacacaagagggcattgacgtgtacaacgcgattatcgggggcttcgtcacagagtccggggagaagattaaggggctgaatgagtacatcaatctgtacaatcagaagaccaagcagaaactgccgaaattcaagccgctctacaagcaagtcctgtccgatagggaaagcctctccttctacggcgagggctataccagcgacgaggaggtgctggaagtcttccgcaacacactgaataagaatagcgagattttctcctccatcaagaagctcgagaagctctttaagaactttgacgagtacagctccgccgggattttcgtgaagaacgggccggcgatcagcaccatctccaaggacatctttggcgagtggaacgtcatcagggacaagtggaacgccgagtacgacgacatccacctgaagaagaaggcggtggtgaccgagaagtatgaggacgatcgcaggaagtccttcaaaaaaatcggctccttcagcctcgaacagctccaggagtatgccgatgcggatctgtccgtcgtcgagaagctgaaggaaatcatcattcagaaggtcgacgagatctataaagtgtacgggtccagcgagaagctgttcgacgccgactttgtgctcgagaagtccctcaaaaagaatgacgccgtggtggccattatgaaagacctgctcgactccgtgaagtccttcgaaaattacattaaagcgttctttggggaggggaaggaaactaacagggatgagtccttctatggcgactttgtcctcgcgtacgacatcctgctgaaggtcgaccacatttacgacgcgatccgcaactacgtgacacagaagccgtactccaaagacaagttcaagctgtacttccagaacccgcaatttatggggggctgggacaaggataaagagacagactaccgcgcgacaattctccgctatggctccaaatactatctggccatcatggacaagaagtacgcgaagtgcctgcagaagatcgacaaagacgacgtcaatggcaactatgaaaagatcaactacaagctgctgccgggcccgaacaagatgctcccgaaggtgttcttcagcaagaagtggatggcctactacaatccaagcgaggatattcagaaaatctataaaaacgggaccttcaagaagggggacatgtttaacctcaacgactgccacaagctcattgatttcttcaaggatagcatttcccgctacccgaaatggtccaatgcgtacgattttaacttctccgagacagaaaagtacaaagacatcgcgggcttttacagggaggtggaggagcaagggtataaagtttcttttgaatccgcgagcaagaaggaagtcgacaagctcgtcgaggagggcaagctctacatgttccaaatttataacaaggacttttccgacaagagccatgggaccccaaacctccacaccatgtacttcaaactgctctttgacgagaacaaccacgggcaaatcaggctgagcggcggcgccgaattattcatgcgcagggcctccctcaagaaggaagagctggtcgtccatccagccaattccccgatcgcgaacaagaacccggacaatccgaaaaagaccaccaccctgtcctacgacgtctacaaggacaaacgcttcagcgaagaccagtacgaattacacatcccaattgcgattaataagtgcccaaagaatatcttcaaaattaatacagaggtcagggtgctgctcaaacacgacgacaatccgtatgtcatcggcattgacaggggcgagcgcaatctgctctatatcgtggtcgtggatgggaagggcaatattgtggagcagtactccctgaacgagattatcaacaacttcaatgggattaggattaagaccgactatcacagcctgctcgacaagaaagaaaaagagaggtttgaggcccgccaaaactggacctccattgagaatatcaaagaattaaaggccggctatatttcccaagtcgtccacaagatctgcgagctggtggagaaatatgacgccgtgattgcgctcgaagacttaaattctgggttcaagaactcccgcgtgaaggtggaaaaacaggtgtatcagaaattcgagaaaatgctgatcgacaaactcaattatatggtggataagaagtccaacccgtgtgccacagggggcgcgctgaagggctatcagatcaccaacaagttcgagagcttcaagagcatgagcacccagaacgggtttattttctacatcccggcgtggctcacctccaagattgacccgagcaccggcttcgtgaacctcctgaagacaaagtatacctccattgccgacagcaagaagtttatctcctccttcgaccgcattatgtatgtgccggaggaggacctcttcgagttcgccctcgactacaaaaacttcagccgcacagatgcggattacatcaagaagtggaagctgtactcctacgggaacaggatccgcatcttcaggaatccaaaaaaaaataacgtctttgactgggaggaagtgtgcctgacatccgcctacaaggaactgttcaataaatacggcatcaattaccagcagggcgacattcgcgccctcctctgtgagcagtccgac

SEQ ID NO: 584 - DNA, 3729 bp, synthetic construct
  source 1..3729: mol_type = other DNA
gcgttttactccagcttcatggccctcatgtccctgatgctccaaatgaggaatagcatcacagggcgcaccgacgtcgacttcctcatcagcccggtgaagaactccgacgggatcttttacgactcccgcaactatgaggcgcaagagaatgcgatcctcccgaagaacgccgatgcgaacggggcctataatatcgccaggaaagtgctctgggccatcgggcagttcaaaaaggcggaggatgagaagctcgacaaggtgaaaattgccatttccaacaaggagtggctggagtacgcgcagacctccgtgaagcacggctcctctggcagctccggctctagcggctcctctggcagctccggctccaagctggagaagtttacaaactgttacagcctctccaaaaccctcaggtttaaagcgatcccggtgggcaagacccaggagaacatcgacaacaagaggctcctggtggaagacgagaagcgcgccgaagactacaagggcgtgaagaagctgctcgataggtactacctcagctttattaacgacgtgctgcacagcatcaaactcaagaatctcaacaactacatctccctcttccgcaaaaagacccgcaccgagaaggagaacaaggagctggagaacctggagatcaacctccgcaaggaaatcgccaaagcgttcaagggcaatgaagggtacaagagcctcttcaagaaagacatcatcgaaactatcctcccagagtttctcgatgacaaggacgagatcgcgctggtgaactcctttaacgggttcacaaccgcgtttaccggcttctttgataacagggaaaatatgttctccgaggaggccaagtccaccagcatcgccttcaggtgtatcaacgagaacctcacccgctacatttccaatatggacattttcgagaaggtggatgcgatcttcgataagcacgaggtgcaggagatcaaagagaagattctcaattccgattatgacgtcgaggatttcttcgaaggggagttctttaattttgtgctcacacaagagggcattgacgtgtacaacgcgattatcgggggcttcgtcacagagtccggggagaagattaaggggctgaatgagtacatcaatctgtacaatcagaagaccaagcagaaactgccgaaattcaagccgctctacaagcaagtcctgtccgatagggaaagcctctccttctacggcgagggctataccagcgacgaggaggtgctggaagtcttccgcaacacactgaataagaatagcgagattttctcctccatcaagaagctcgagaagctctttaagaactttgacgagtacagctccgccgggattttcgtgaagaacgggccggcgatcagcaccatctccaaggacatctttggcgagtggaacgtcatcagggacaagtggaacgccgagtacgacgacatccacctgaagaagaaggcggtggtgaccgagaagtatgaggacgatcgcaggaagtccttcaaaaaaatcggctccttcagcctcgaacagctccaggagtatgccgatgcggatctgtccgtcgtcgagaagctgaaggaaatcatcattcagaaggtcgacgagatctataaagtgtacgggtccagcgagaagctgttcgacgccgactttgtgctcgagaagtccctcaaaaagaatgacgccgtggtggccattatgaaagacctgctcgactccgtgaagtccttcgaaaattacattaaagcgttctttggggaggggaaggaaactaacagggatgagtccttctatggcgactttgtcctcgcgtacgacatcctgctgaaggtcgaccacatttacgacgcgatccgcaactacgtgacacagaagccgtactccaaagacaagttcaagctgtacttccagaacccgcaatttatggggggctgggacaaggataaagagacagactaccgcgcgacaattctccgctatggctccaaatactatctggccatcatggacaagaagtacgcgaagtgcctgcagaagatcgacaaagacgacgtcaatggcaactatgaaaagatcaactacaagctgctgccgggcccgaacaagatgctcccgaaggtgttcttcagcaagaagtggatggcctactacaatccaagcgaggatattcagaaaatctataaaaacgggaccttcaagaagggggacatgtttaacctcaacgactgccacaagctcattgatttcttcaaggatagcatttcccgctacccgaaatggtccaatgcgtacgattttaacttctccgagacagaaaagtacaaagacatcgcgggcttttacagggaggtggaggagcaagggtataaagtttcttttgaatccgcgagcaagaaggaagtcgacaagctcgtcgaggagggcaagctctacatgttccaaatttataacaaggacttttccgacaagagccatgggaccccaaacctccacaccatgtacttcaaactgctctttgacgagaacaaccacgggcaaatcaggctgagcggcggcgccgaattattcatgcgcagggcctccctcaagaaggaagagctggtcgtccatccagccaattccccgatcgcgaacaagaacccggacaatccgaaaaagaccaccaccctgtcctacgacgtctacaaggacaaacgcttcagcgaagaccagtacgaattacacatcccaattgcgattaataagtgcccaaagaatatcttcaaaattaatacagaggtcagggtgctgctcaaacacgacgacaatccgtatgtcatcggcattgacaggggcgagcgcaatctgctctatatcgtggtcgtggatgggaagggcaatattgtggagcagtactccctgaacgagattatcaacaacttcaatgggattaggattaagaccgactatcacagcctgctcgacaagaaagaaaaagagaggtttgaggcccgccaaaactggacctccattgagaatatcaaagaattaaaggccggctatatttcccaagtcgtccacaagatctgcgagctggtggagaaatatgacgccgtgattgcgctcgaagacttaaattctgggttcaagaactcccgcgtgaaggtggaaaaacaggtgtatcagaaattcgagaaaatgctgatcgacaaactcaattatatggtggataagaagtccaacccgtgtgccacagggggcgcgctgaagggctatcagatcaccaacaagttcgagagcttcaagagcatgagcacccagaacgggtttattttctacatcccggcgtggctcacctccaagattgacccgagcaccggcttcgtgaacctcctgaagacaaagtatacctccattgccgacagcaagaagtttatctcctccttcgaccgcattatgtatgtgccggaggaggacctcttcgagttcgccctcgactacaaaaacttcagccgcacagatgcggattacatcaagaagtggaagctgtactcctacgggaacaggatccgcatcttcaggaatccaaaaaaaaataacgtctttgactgggaggaagtgtgcctgacatccgcctacaaggaactgttcaataaatacggcatcaattaccagcagggcgacattcgcgccctcctctgtgagcagtccgacaaa

SEQ ID NO: 585 - DNA, 8067 bp, synthetic construct
  source 1..8067: mol_type = other DNA
gacattgattattgactagttattaatagtaatcaattacggggtcattagttcatagcccatatatggagttccgcgttacataacttacggtaaatggcccgcctggctgaccgcccaacgacccccgcccattgacgtcaataatgacgtatgttcccatagtaacgccaatagggactttccattgacgtcaatgggtggagtatttacggtaaactgcccacttggcagtacatcaagtgtatcatatgccaagtacgccccctattgacgtcaatgacggtaaatggcccgcctggcattatgcccagtacatgaccttatgggactttcctacttggcagtacatctacgtattagtcatcgctattaccatggtgatgcggttttggcagtacatcaatgggcgtggatagcggtttgactcacggggatttccaagtctccaccccattgacgtcaatgggagtttgttttggcaccaaaatcaacgggactttccaaaatgtcgtaacaactccgccccattgacgcaaatgggcggtaggcgtgtacggtgggaggtctatataagcagagctggtttagtgaaccgtcagatccgctagagatccgcggccgctaatacgactcactatagggagagccgccaccatgaaacggacagccgacggaagcgagttcgagtcaccaaagaagaagcggaaagtcaagacccgcaccgagaaggagaacaaggagctggagaacctggagatcaacctccgcaaggaaatcgccaaagcgttcaagggcaatgaagggtacaagagcctcttcaagaaagacatcatcgaaactatcctcccagagtttctcgatgacaaggacgagatcgcgctggtgaactcctttaacgggttcacaaccgcgtttaccggcttctttgataacagggaaaatatgttctccgaggaggccaagtccaccagcatcgccttcaggtgtatcaacgagaacctcacccgctacatttccaatatggacattttcgagaaggtggatgcgatcttcgataagcacgaggtgcaggagatcaaagagaagattctcaattccgattatgacgtcgaggatttcttcgaaggggagttctttaattttgtgctcacacaagagggcattgacgtgtacaacgcgattatcgggggcttcgtcacagagtccggggagaagattaaggggctgaatgagtacatcaatctgtacaatcagaagaccaagcagaaactgccgaaattcaagccgctctacaagcaagtcctgtccgatagggaaagcctctccttctacggcgagggctataccagcgacgaggaggtgctggaagtcttccgcaacacactgaataagaatagcgagattttctcctccatcaagaagctcgagaagctctttaagaactttgacgagtacagctccgccgggattttcgtgaagaacgggccggcgatcagcaccatctccaaggacatctttggcgagtggaacgtcatcagggacaagtggaacgccgagtacgacgacatccacctgaagaagaaggcggtggtgaccgagaagtatgaggacgatcgcaggaagtccttcaaaaaaatcggctccttcagcctcgaacagctccaggagtatgccgatgcggatctgtccgtcgtcgagaagctgaaggaaatcatcattcagaaggtcgacgagatctataaagtgtacgggtccagcgagaagctgttcgacgccgactttgtgctcgagaagtccctcaaaaagaatgacgccgtggtggccattatgaaagacctgctcgactccgtgaagtccttcgaaaattacattaaagcgttctttggggaggggaaggaaactaacagggatgagtccttctatggcgactttgtcctcgcgtacgacatcctgctgaaggtcgaccacatttacgacgcgatccgcaactacgtgacacagaagccgtactccaaagacaagttcaagctgtacttccagaacccgcaatttatggggggctgggacaaggataaagagacagactaccgcgcgacaattctccgctatggctccaaatactatctggccatcatggacaagaagtacgcgaagtgcctgcagaagatcgacaaagacgacgtcaatggcaactatgaaaagatcaactacaagctgctgccgggcccgaacaagatgctcccgaaggtgttcttcagcaagaagtggatggcctactacaatccaagcgaggatattcagaaaatctataaaaacgggaccttcaagaagggggacatgtttaacctcaacgactgccacaagctcattgatttcttcaaggatagcatttcccgctacccgaaatggtccaatgcgtacgattttaacttctccgagacagaaaagtacaaagacatcgcgggcttttacagggaggtggaggagcaagggtataaagtttcttttgaatccgcgagcaagaaggaagtcgacaagctcgtcgaggagggcaagctctacatgttccaaatttataacaaggacttttccgacaagagccatgggaccccaaacctccacaccatgtacttcaaactgctctttgacgagaacaaccacgggcaaatcaggctgagcggcggcgccgaattattcatgcgcagggcctccctcaagaaggaagagctggtcgtccatccagccaattccccgatcgcgaacaagaacccggacaatccgaaaaagaccaccaccctgtcctacgacgtctacaaggacaaacgcttcagcgaagaccagtacgaattacacatcccaattgcgattaataagtgcccaaagaatatcttcaaaattaatacagaggtcagggtgctgctcaaacacgacgacaatccgtatgtcatcggcattgacaggggcgagcgcaatctgctctatatcgtggtcgtggatgggaagggcaatattgtggagcagtactccctgaacgagattatcaacaacttcaatgggattaggattaagaccgactatcacagcctgctcgacaagaaagaaaaagagaggtttgaggcccgccaaaactggacctccattgagaatatcaaagaattaaaggccggctatatttcccaagtcgtccacaagatctgcgagctggtggagaaatatgacgccgtgattgcgctcgaagacttaaattctgggttcaagaactcccgcgtgaaggtggaaaaacaggtgtatcagaaattcgagaaaatgctgatcgacaaactcaattatatggtggataagaagtccaacccgtgtgccacagggggcgcgctgaagggctatcagatcaccaacaagttcgagagcttcaagagcatgagcacccagaacgggtttattttctacatcccggcgtggctcacctccaagattgacccgagcaccggcttcgtgaacctcctgaagacaaagtatacctccattgccgacagcaagaagtttatctcctccttcgaccgcattatgtatgtgccggaggaggacctcttcgagttcgccctcgactacaaaaacttcagccgcacagatgcggattacatcaagaagtggaagctgtactcctacgggaacaggatccgcatcttcaggaatccaaaaaaaaataacgtctttgactgggaggaagtgtgcctgacatccgcctacaaggaactgttcaataaatacggcatcaattaccagcagggcgacattcgcgccctcctctgtgagcagtccgacaaagcgttttactccagcttcatggccctcatgtccctgatgctccaaatgaggaatagcatcacagggcgcaccgacgtcgacttcctcatcagcccggtgaagaactccgacgggatcttttacgactcccgcaactatgaggcgcaagagaatgcgatcctcccgaagaacgccgatgcgaacggggcctataatatcgccaggaaagtgctctgggccatcgggcagttcaaaaaggcggaggatgagaagctcgacaaggtgaaaattgccatttccaacaaggagtggctggagtacgcgcagacctccgtgaagcacggctcctctggcagctccggctctagcggctcctctggcagctccggctccaagctggagaagtttacaaactgttacagcctctccaaaaccctcaggtttaaagcgatcccggtgggcaagacccaggagaacatcgacaacaagaggctcctggtggaagacgagaagcgcgccgaagactacaagggcgtgaagaagctgctcgataggtactacctcagctttattaacgacgtgctgcacagcatcaaactcaagaatctcaacaactacatctccctcttccgcaaatctggcggctcaaaaagaaccgccgacggcagcgaattcgagcccaagaagaagaggaaagtcggaagcggagctactaacttcagcctgctgaagcaggctggagacgtggaggagaaccctggacctatggtgagcaagggcgaggagctgttcaccggggtggtgcccatcctggtcgagctggacggcgacgtaaacggccacaagttcagcgtgtccggcgagggcgagggcgatgccacctacggcaagctgaccctgaagttcatctgcaccaccggcaagctgcccgtgccctggcccaccctcgtgaccaccctgacctatggagtgcagtgcttcagccgctaccccgaccacatgaagcagcacgacttcttcaagtccgccatgcccgaaggctacgtccaggagcgcaccatcttcttcaaggacgacggcaactacaagacccgcgccgaggtgaagttcgagggcgacaccctggtgaaccgcatcgagctgaagggcatcgacttcaaggaggacggcaacatcctggggcacaagctggagtacaactacaacagccacaacgtctatatcatggccgacaagcagaagaacggcatcaaggtgaacttcaagatccgccacaacatcgaggacggcagcgtgcagctcgccgaccactaccagcagaacacccccatcggcgacggccccgtgctgctgcccgacaaccactacctgagcacccagtccgccctgagcaaagaccccaacgagaagcgcgatcacatggtcctgctggagttcgtgaccgccgccgggatcactctcggcatggacgagctgtacaagtctggtggttctcccaagaagaagaggaaagtctaaccggtcatcatcaccatcaccattgagtttaaacccgctgatcagcctcgactgtgccttctagttgccagccatctgttgtttgcccctcccccgtgccttccttgaccctggaaggtgccactcccactgtcctttcctaataaaatgaggaaattgcatcgcattgtctgagtaggtgtcattctattctggggggtggggtggggcaggacagcaagggggaggattgggaagacaatagcaggcatgctggggatgcggtgggctctatggcttctgaggcggaaagaaccagctggggctcgataccgtcgacctctagctagagcttggcgtaatcatggtcatagctgtttcctgtgtgaaattgttatccgctcacaattccacacaacatacgagccggaagcataaagtgtaaagcctagggtgcctaatgagtgagctaactcacattaattgcgttgcgctcactgcccgctttccagtcgggaaacctgtcgtgccagctgcattaatgaatcggccaacgcgcggggagaggcggtttgcgtattgggcgctcttccgcttcctcgctcactgactcgctgcgctcggtcgttcggctgcggcgagcggtatcagctcactcaaaggcggtaatacggttatccacagaatcaggggataacgcaggaaagaacatgtgagcaaaaggccagcaaaaggccaggaaccgtaaaaaggccgcgttgctggcgtttttccataggctccgcccccctgacgagcatcacaaaaatcgacgctcaagtcagaggtggcgaaacccgacaggactataaagataccaggcgtttccccctggaagctccctcgtgcgctctcctgttccgaccctgccgcttaccggatacctgtccgcctttctcccttcgggaagcgtggcgctttctcatagctcacgctgtaggtatctcagttcggtgtaggtcgttcgctccaagctgggctgtgtgcacgaaccccccgttcagcccgaccgctgcgccttatccggtaactatcgtcttgagtccaacccggtaagacacgacttatcgccactggcagcagccactggtaacaggattagcagagcgaggtatgtaggcggtgctacagagttcttgaagtggtggcctaactacggctacactagaagaacagtatttggtatctgcgctctgctgaagccagttaccttcggaaaaagagttggtagctcttgatccggcaaacaaaccaccgctggtagcggtggtttttttgtttgcaagcagcagattacgcgcagaaaaaaaggatctcaagaagatcctttgatcttttctacggggtctgacactcagtggaacgaaaactcacgttaagggattttggtcatgagattatcaaaaaggatcttcacctagatccttttaaattaaaaatgaagttttaaatcaatctaaagtatatatgagtaaacttggtctgacagttaccaatgcttaatcagtgaggcacctatctcagcgatctgtctatttcgttcatccatagttgcctgactccccgtcgtgtagataactacgatacgggagggcttaccatctggccccagtgctgcaatgataccgcgagacccacgctcaccggctccagatttatcagcaataaaccagccagccggaagggccgagcgcagaagtggtcctgcaactttatccgcctccatccagtctattaattgttgccgggaagctagagtaagtagttcgccagttaatagtttgcgcaacgttgttgccattgctacaggcatcgtggtgtcacgctcgtcgtttggtatggcttcattcagctccggttcccaacgatcaaggcgagttacatgatcccccatgttgtgcaaaaaagcggttagctccttcggtcctccgatcgttgtcagaagtaagttggccgcagtgttatcactcatggttatggcagcactgcataattctcttactgtcatgccatccgtaagatgcttttctgtgactggtgagtactcaaccaagtcattctgagaatagtgtatgcggcgaccgagttgctcttgcccggcgtcaatacgggataataccgcgccacatagcagaactttaaaagtgctcatcattggaaaacgttcttcggggcgaaaactctcaaggatcttaccgctgttgagatccagttcgatgtaacccactcgtgcacccaactgatcttcagcatcttttactttcaccagcgtttctgggtgagcaaaaacaggaaggcaaaatgccgcaaaaaagggaataagggcgacacggaaatgttgaatactcatactcttcctttttcaatattattgaagcatttatcagggttattgtctcatgagcggatacatatttgaatgtatttagaaaaataaacaaataggggttccgcgcacatttccccgaaaagtgccacctgacgtcgacggatcgggagatcgatctcccgatcccctagggtcgactctcagtacaatctgctctgatgccgcatagttaagccagtatctgctccctgcttgtgtgttggaggtcgctgagtagtgcgcgagcaaaatttaagctacaacaaggcaaggcttgaccgacaattgcatgaagaatctgcttagggttaggcgttttgcgctgcttcgcgatgtacgggccagatatacgcgtt

SEQ ID NO: 586 - DNA, 8067 bp, synthetic construct
  source 1..8067: mol_type = other DNA
gacattgattattgactagttattaatagtaatcaattacggggtcattagttcatagcccatatatggagttccgcgttacataacttacggtaaatggcccgcctggctgaccgcccaacgacccccgcccattgacgtcaataatgacgtatgttcccatagtaacgccaatagggactttccattgacgtcaatgggtggagtatttacggtaaactgcccacttggcagtacatcaagtgtatcatatgccaagtacgccccctattgacgtcaatgacggtaaatggcccgcctggcattatgcccagtacatgaccttatgggactttcctacttggcagtacatctacgtattagtcatcgctattaccatggtgatgcggttttggcagtacatcaatgggcgtggatagcggtttgactcacggggatttccaagtctccaccccattgacgtcaatgggagtttgttttggcaccaaaatcaacgggactttccaaaatgtcgtaacaactccgccccattgacgcaaatgggcggtaggcgtgtacggtgggaggtctatataagcagagctggtttagtgaaccgtcagatccgctagagatccgcggccgctaatacgactcactatagggagagccgccaccatgaaacggacagccgacggaagcgagttcgagtcaccaaagaagaagcggaaagtcacccgcaccgagaaggagaacaaggagctggagaacctggagatcaacctccgcaaggaaatcgccaaagcgttcaagggcaatgaagggtacaagagcctcttcaagaaagacatcatcgaaactatcctcccagagtttctcgatgacaaggacgagatcgcgctggtgaactcctttaacgggttcacaaccgcgtttaccggcttctttgataacagggaaaatatgttctccgaggaggccaagtccaccagcatcgccttcaggtgtatcaacgagaacctcacccgctacatttccaatatggacattttcgagaaggtggatgcgatcttcgataagcacgaggtgcaggagatcaaagagaagattctcaattccgattatgacgtcgaggatttcttcgaaggggagttctttaattttgtgctcacacaagagggcattgacgtgtacaacgcgattatcgggggcttcgtcacagagtccggggagaagattaaggggctgaatgagtacatcaatctgtacaatcagaagaccaagcagaaactgccgaaattcaagccgctctacaagcaagtcctgtccgatagggaaagcctctccttctacggcgagggctataccagcgacgaggaggtgctggaagtcttccgcaacacactgaataagaatagcgagattttctcctccatcaagaagctcgagaagctctttaagaactttgacgagtacagctccgccgggattttcgtgaagaacgggccggcgatcagcaccatctccaaggacatctttggcgagtggaacgtcatcagggacaagtggaacgccgagtacgacgacatccacctgaagaagaaggcggtggtgaccgagaagtatgaggacgatcgcaggaagtccttcaaaaaaatcggctccttcagcctcgaacagctccaggagtatgccgatgcggatctgtccgtcgtcgagaagctgaaggaaatcatcattcagaaggtcgacgagatctataaagtgtacgggtccagcgagaagctgttcgacgccgactttgtgctcgagaagtccctcaaaaagaatgacgccgtggtggccattatgaaagacctgctcgactccgtgaagtccttcgaaaattacattaaagcgttctttggggaggggaaggaaactaacagggatgagtccttctatggcgactttgtcctcgcgtacgacatcctgctgaaggtcgaccacatttacgacgcgatccgcaactacgtgacacagaagccgtactccaaagacaagttcaagctgtacttccagaacccgcaatttatggggggctgggacaaggataaagagacagactaccgcgcgacaattctccgctatggctccaaatactatctggccatcatggacaagaagtacgcgaagtgcctgcagaagatcgacaaagacgacgtcaatggcaactatgaaaagatcaactacaagctgctgccgggcccgaacaagatgctcccgaaggtgttcttcagcaagaagtggatggcctactacaatccaagcgaggatattcagaaaatctataaaaacgggaccttcaagaagggggacatgtttaacctcaacgactgccacaagctcattgatttcttcaaggatagcatttcccgctacccgaaatggtccaatgcgtacgattttaacttctccgagacagaaaagtacaaagacatcgcgggcttttacagggaggtggaggagcaagggtataaagtttcttttgaatccgcgagcaagaaggaagtcgacaagctcgtcgaggagggcaagctctacatgttccaaatttataacaaggacttttccgacaagagccatgggaccccaaacctccacaccatgtacttcaaactgctctttgacgagaacaaccacgggcaaatcaggctgagcggcggcgccgaattattcatgcgcagggcctccctcaagaaggaagagctggtcgtccatccagccaattccccgatcgcgaacaagaacccggacaatccgaaaaagaccaccaccctgtcctacgacgtctacaaggacaaacgcttcagcgaagaccagtacgaattacacatcccaattgcgattaataagtgcccaaagaatatcttcaaaattaatacagaggtcagggtgctgctcaaacacgacgacaatccgtatgtcatcggcattgacaggggcgagcgcaatctgctctatatcgtggtcgtggatgggaagggcaatattgtggagcagtactccctgaacgagattatcaacaacttcaatgggattaggattaagaccgactatcacagcctgctcgacaagaaagaaaaagagaggtttgaggcccgccaaaactggacctccattgagaatatcaaagaattaaaggccggctatatttcccaagtcgtccacaagatctgcgagctggtggagaaatatgacgccgtgattgcgctcgaagacttaaattctgggttcaagaactcccgcgtgaaggtggaaaaacaggtgtatcagaaattcgagaaaatgctgatcgacaaactcaattatatggtggataagaagtccaacccgtgtgccacagggggcgcgctgaagggctatcagatcaccaacaagttcgagagcttcaagagcatgagcacccagaacgggtttattttctacatcccggcgtggctcacctccaagattgacccgagcaccggcttcgtgaacctcctgaagacaaagtatacctccattgccgacagcaagaagtttatctcctccttcgaccgcattatgtatgtgccggaggaggacctcttcgagttcgccctcgactacaaaaacttcagccgcacagatgcggattacatcaagaagtggaagctgtactcctacgggaacaggatccgcatcttcaggaatccaaaaaaaaataacgtctttgactgggaggaagtgtgcctgacatccgcctacaaggaactgttcaataaatacggcatcaattaccagcagggcgacattcgcgccctcctctgtgagcagtccgacaaagcgttttactccagcttcatggccctcatgtccctgatgctccaaatgaggaatagcatcacagggcgcaccgacgtcgacttcctcatcagcccggtgaagaactccgacgggatcttttacgactcccgcaactatgaggcgcaagagaatgcgatcctcccgaagaacgccgatgcgaacggggcctataatatcgccaggaaagtgctctgggccatcgggcagttcaaaaaggcggaggatgagaagctcgacaaggtgaaaattgccatttccaacaaggagtggctggagtacgcgcagacctccgtgaagcacggctcctctggcagctccggctctagcggctcctctggcagctccggctccaagctggagaagtttacaaactgttacagcctctccaaaaccctcaggtttaaagcgatcccggtgggcaagacccaggagaacatcgacaacaagaggctcctggtggaagacgagaagcgcgccgaagactacaagggcgtgaagaagctgctcgataggtactacctcagctttattaacgacgtgctgcacagcatcaaactcaagaatctcaacaactacatctccctcttccgcaaaaagtctggcggctcaaaaagaaccgccgacggcagcgaattcgagcccaagaagaagaggaaagtcggaagcggagctactaacttcagcctgctgaagcaggctggagacgtggaggagaaccctggacctatggtgagcaagggcgaggagctgttcaccggggtggtgcccatcctggtcgagctggacggcgacgtaaacggccacaagttcagcgtgtccggcgagggcgagggcgatgccacctacggcaagctgaccctgaagttcatctgcaccaccggcaagctgcccgtgccctggcccaccctcgtgaccaccctgacctatggagtgcagtgcttcagccgctaccccgaccacatgaagcagcacgacttcttcaagtccgccatgcccgaaggctacgtccaggagcgcaccatcttcttcaaggacgacggcaactacaagacccgcgccgaggtgaagttcgagggcgacaccctggtgaaccgcatcgagctgaagggcatcgacttcaaggaggacggcaacatcctggggcacaagctggagtacaactacaacagccacaacgtctatatcatggccgacaagcagaagaacggcatcaaggtgaacttcaagatccgccacaacatcgaggacggcagcgtgcagctcgccgaccactaccagcagaacacccccatcggcgacggccccgtgctgctgcccgacaaccactacctgagcacccagtccgccctgagcaaagaccccaacgagaagcgcgatcacatggtcctgctggagttcgtgaccgccgccgggatcactctcggcatggacgagctgtacaagtctggtggttctcccaagaagaagaggaaagtctaaccggtcatcatcaccatcaccattgagtttaaacccgctgatcagcctcgactgtgccttctagttgccagccatctgttgtttgcccctcccccgtgccttccttgaccctggaaggtgccactcccactgtcctttcctaataaaatgaggaaattgcatcgcattgtctgagtaggtgtcattctattctggggggtggggtggggcaggacagcaagggggaggattgggaagacaatagcaggcatgctggggatgcggtgggctctatggcttctgaggcggaaagaaccagctggggctcgataccgtcgacctctagctagagcttggcgtaatcatggtcatagctgtttcctgtgtgaaattgttatccgctcacaattccacacaacatacgagccggaagcataaagtgtaaagcctagggtgcctaatgagtgagctaactcacattaattgcgttgcgctcactgcccgctttccagtcgggaaacctgtcgtgccagctgcattaatgaatcggccaacgcgcggggagaggcggtttgcgtattgggcgctcttccgcttcctcgctcactgactcgctgcgctcggtcgttcggctgcggcgagcggtatcagctcactcaaaggcggtaatacggttatccacagaatcaggggataacgcaggaaagaacatgtgagcaaaaggccagcaaaaggccaggaaccgtaaaaaggccgcgttgctggcgtttttccataggctccgcccccctgacgagcatcacaaaaatcgacgctcaagtcagaggtggcgaaacccgacaggactataaagataccaggcgtttccccctggaagctccctcgtgcgctctcctgttccgaccctgccgcttaccggatacctgtccgcctttctcccttcgggaagcgtggcgctttctcatagctcacgctgtaggtatctcagttcggtgtaggtcgttcgctccaagctgggctgtgtgcacgaaccccccgttcagcccgaccgctgcgccttatccggtaactatcgtcttgagtccaacccggtaagacacgacttatcgccactggcagcagccactggtaacaggattagcagagcgaggtatgtaggcggtgctacagagttcttgaagtggtggcctaactacggctacactagaagaacagtatttggtatctgcgctctgctgaagccagttaccttcggaaaaagagttggtagctcttgatccggcaaacaaaccaccgctggtagcggtggtttttttgtttgcaagcagcagattacgcgcagaaaaaaaggatctcaagaagatcctttgatcttttctacggggtctgacactcagtggaacgaaaactcacgttaagggattttggtcatgagattatcaaaaaggatcttcacctagatccttttaaattaaaaatgaagttttaaatcaatctaaagtatatatgagtaaacttggtctgacagttaccaatgcttaatcagtgaggcacctatctcagcgatctgtctatttcgttcatccatagttgcctgactccccgtcgtgtagataactacgatacgggagggcttaccatctggccccagtgctgcaatgataccgcgagacccacgctcaccggctccagatttatcagcaataaaccagccagccggaagggccgagcgcagaagtggtcctgcaactttatccgcctccatccagtctattaattgttgccgggaagctagagtaagtagttcgccagttaatagtttgcgcaacgttgttgccattgctacaggcatcgtggtgtcacgctcgtcgtttggtatggcttcattcagctccggttcccaacgatcaaggcgagttacatgatcccccatgttgtgcaaaaaagcggttagctccttcggtcctccgatcgttgtcagaagtaagttggccgcagtgttatcactcatggttatggcagcactgcataattctcttactgtcatgccatccgtaagatgcttttctgtgactggtgagtactcaaccaagtcattctgagaatagtgtatgcggcgaccgagttgctcttgcccggcgtcaatacgggataataccgcgccacatagcagaactttaaaagtgctcatcattggaaaacgttcttcggggcgaaaactctcaaggatcttaccgctgttgagatccagttcgatgtaacccactcgtgcacccaactgatcttcagcatcttttactttcaccagcgtttctgggtgagcaaaaacaggaaggcaaaatgccgcaaaaaagggaataagggcgacacggaaatgttgaatactcatactcttcctttttcaatattattgaagcatttatcagggttattgtctcatgagcggatacatatttgaatgtatttagaaaaataaacaaataggggttccgcgcacatttccccgaaaagtgccacctgacgtcgacggatcgggagatcgatctcccgatcccctagggtcgactctcagtacaatctgctctgatgccgcatagttaagccagtatctgctccctgcttgtgtgttggaggtcgctgagtagtgcgcgagcaaaatttaagctacaacaaggcaaggcttgaccgacaattgcatgaagaatctgcttagggttaggcgttttgcgctgcttcgcgatgtacgggccagatatacgcgtt

SEQ ID NO: 587 - DNA, 8067 bp, synthetic construct
  source 1..8067: mol_type = other DNA
gacattgattattgactagttattaatagtaatcaattacggggtcattagttcatagcccatatatggagttccgcgttacataacttacggtaaatggcccgcctggctgaccgcccaacgacccccgcccattgacgtcaataatgacgtatgttcccatagtaacgccaatagggactttccattgacgtcaatgggtggagtatttacggtaaactgcccacttggcagtacatcaagtgtatcatatgccaagtacgccccctattgacgtcaatgacggtaaatggcccgcctggcattatgcccagtacatgaccttatgggactttcctacttggcagtacatctacgtattagtcatcgctattaccatggtgatgcggttttggcagtacatcaatgggcgtggatagcggtttgactcacggggatttccaagtctccaccccattgacgtcaatgggagtttgttttggcaccaaaatcaacgggactttccaaaatgtcgtaacaactccgccccattgacgcaaatgggcggtaggcgtgtacggtgggaggtctatataagcagagctggtttagtgaaccgtcagatccgctagagatccgcggccgctaatacgactcactatagggagagccgccaccatgaaacggacagccgacggaagcgagttcgagtcaccaaagaagaagcggaaagtcgagaaggagaacaaggagctggagaacctggagatcaacctccgcaaggaaatcgccaaagcgttcaagggcaatgaagggtacaagagcctcttcaagaaagacatcatcgaaactatcctcccagagtttctcgatgacaaggacgagatcgcgctggtgaactcctttaacgggttcacaaccgcgtttaccggcttctttgataacagggaaaatatgttctccgaggaggccaagtccaccagcatcgccttcaggtgtatcaacgagaacctcacccgctacatttccaatatggacattttcgagaaggtggatgcgatcttcgataagcacgaggtgcaggagatcaaagagaagattctcaattccgattatgacgtcgaggatttcttcgaaggggagttctttaattttgtgctcacacaagagggcattgacgtgtacaacgcgattatcgggggcttcgtcacagagtccggggagaagattaaggggctgaatgagtacatcaatctgtacaatcagaagaccaagcagaaactgccgaaattcaagccgctctacaagcaagtcctgtccgatagggaaagcctctccttctacggcgagggctataccagcgacgaggaggtgctggaagtcttccgcaacacactgaataagaatagcgagattttctcctccatcaagaagctcgagaagctctttaagaactttgacgagtacagctccgccgggattttcgtgaagaacgggccggcgatcagcaccatctccaaggacatctttggcgagtggaacgtcatcagggacaagtggaacgccgagtacgacgacatccacctgaagaagaaggcggtggtgaccgagaagtatgaggacgatcgcaggaagtccttcaaaaaaatcggctccttcagcctcgaacagctccaggagtatgccgatgcggatctgtccgtcgtcgagaagctgaaggaaatcatcattcagaaggtcgacgagatctataaagtgtacgggtccagcgagaagctgttcgacgccgactttgtgctcgagaagtccctcaaaaagaatgacgccgtggtggccattatgaaagacctgctcgactccgtgaagtccttcgaaaattacattaaagcgttctttggggaggggaaggaaactaacagggatgagtccttctatggcgactttgtcctcgcgtacgacatcctgctgaaggtcgaccacatttacgacgcgatccgcaactacgtgacacagaagccgtactccaaagacaagttcaagctgtacttccagaacccgcaatttatggggggctgggacaaggataaagagacagactaccgcgcgacaattctccgctatggctccaaatactatctggccatcatggacaagaagtacgcgaagtgcctgcagaagatcgacaaagacgacgtcaatggcaactatgaaaagatcaactacaagctgctgccgggcccgaacaagatgctcccgaaggtgttcttcagcaagaagtggatggcctactacaatccaagcgaggatattcagaaaatctataaaaacgggaccttcaagaagggggacatgtttaacctcaacgactgccacaagctcattgatttcttcaaggatagcatttcccgctacccgaaatggtccaatgcgtacgattttaacttctccgagacagaaaagtacaaagacatcgcgggcttttacagggaggtggaggagcaagggtataaagtttcttttgaatccgcgagcaagaaggaagtcgacaagctcgtcgaggagggcaagctctacatgttccaaatttataacaaggacttttccgacaagagccatgggaccccaaacctccacaccatgtacttcaaactgctctttgacgagaacaaccacgggcaaatcaggctgagcggcggcgccgaattattcatgcgcagggcctccctcaagaaggaagagctggtcgtccatccagccaattccccgatcgcgaacaagaacccggacaatccgaaaaagaccaccaccctgtcctacgacgtctacaaggacaaacgcttcagcgaagaccagtacgaattacacatcccaattgcgattaataagtgcccaaagaatatcttcaaaattaatacagaggtcagggtgctgctcaaacacgacgacaatccgtatgtcatcggcattgacaggggcgagcgcaatctgctctatatcgtggtcgtggatgggaagggcaatattgtggagcagtactccctgaacgagattatcaacaacttcaatgggattaggattaagaccgactatcacagcctgctcgacaagaaagaaaaagagaggtttgaggcccgccaaaactggacctccattgagaatatcaaagaattaaaggccggctatatttcccaagtcgtccacaagatctgcgagctggtggagaaatatgacgccgtgattgcgctcgaagacttaaattctgggttcaagaactcccgcgtgaaggtggaaaaacaggtgtatcagaaattcgagaaaatgctgatcgacaaactcaattatatggtggataagaagtccaacccgtgtgccacagggggcgcgctgaagggctatcagatcaccaacaagttcgagagcttcaagagcatgagcacccagaacgggtttattttctacatcccggcgtggctcacctccaagattgacccgagcaccggcttcgtgaacctcctgaagacaaagtatacctccattgccgacagcaagaagtttatctcctccttcgaccgcattatgtatgtgccggaggaggacctcttcgagttcgccctcgactacaaaaacttcagccgcacagatgcggattacatcaagaagtggaagctgtactcctacgggaacaggatccgcatcttcaggaatccaaaaaaaaataacgtctttgactgggaggaagtgtgcctgacatccgcctacaaggaactgttcaataaatacggcatcaattaccagcagggcgacattcgcgccctcctctgtgagcagtccgacaaagcgttttactccagcttcatggccctcatgtccctgatgctccaaatgaggaatagcatcacagggcgcaccgacgtcgacttcctcatcagcccggtgaagaactccgacgggatcttttacgactcccgcaactatgaggcgcaagagaatgcgatcctcccgaagaacgccgatgcgaacggggcctataatatcgccaggaaagtgctctgggccatcgggcagttcaaaaaggcggaggatgagaagctcgacaaggtgaaaattgccatttccaacaaggagtggctggagtacgcgcagacctccgtgaagcacggctcctctggcagctccggctctagcggctcctctggcagctccggctccaagctggagaagtttacaaactgttacagcctctccaaaaccctcaggtttaaagcgatcccggtgggcaagacccaggagaacatcgacaacaagaggctcctggtggaagacgagaagcgcgccgaagactacaagggcgtgaagaagctgctcgataggtactacctcagctttattaacgacgtgctgcacagcatcaaactcaagaatctcaacaactacatctccctcttccgcaaaaagacccgcacctctggcggctcaaaaagaaccgccgacggcagcgaattcgagcccaagaagaagaggaaagtcggaagcggagctactaacttcagcctgctgaagcaggctggagacgtggaggagaaccctggacctatggtgagcaagggcgaggagctgttcaccggggtggtgcccatcctggtcgagctggacggcgacgtaaacggccacaagttcagcgtgtccggcgagggcgagggcgatgccacctacggcaagctgaccctgaagttcatctgcaccaccggcaagctgcccgtgccctggcccaccctcgtgaccaccctgacctatggagtgcagtgcttcagccgctaccccgaccacatgaagcagcacgacttcttcaagtccgccatgcccgaaggctacgtccaggagcgcaccatcttcttcaaggacgacggcaactacaagacccgcgccgaggtgaagttcgagggcgacaccctggtgaaccgcatcgagctgaagggcatcgacttcaaggaggacggcaacatcctggggcacaagctggagtacaactacaacagccacaacgtctatatcatggccgacaagcagaagaacggcatcaaggtgaacttcaagatccgccacaacatcgaggacggcagcgtgcagctcgccgaccactaccagcagaacacccccatcggcgacggccccgtgctgctgcccgacaaccactacctgagcacccagtccgccctgagcaaagaccccaacgagaagcgcgatcacatggtcctgctggagttcgtgaccgccgccgggatcactctcggcatggacgagctgtacaagtctggtggttctcccaagaagaagaggaaagtctaaccggtcatcatcaccatcaccattgagtttaaacccgctgatcagcctcgactgtgccttctagttgccagccatctgttgtttgcccctcccccgtgccttccttgaccctggaaggtgccactcccactgtcctttcctaataaaatgaggaaattgcatcgcattgtctgagtaggtgtcattctattctggggggtggggtggggcaggacagcaagggggaggattgggaagacaatagcaggcatgctggggatgcggtgggctctatggcttctgaggcggaaagaaccagctggggctcgataccgtcgacctctagctagagcttggcgtaatcatggtcatagctgtttcctgtgtgaaattgttatccgctcacaattccacacaacatacgagccggaagcataaagtgtaaagcctagggtgcctaatgagtgagctaactcacattaattgcgttgcgctcactgcccgctttccagtcgggaaacctgtcgtgccagctgcattaatgaatcggccaacgcgcggggagaggcggtttgcgtattgggcgctcttccgcttcctcgctcactgactcgctgcgctcggtcgttcggctgcggcgagcggtatcagctcactcaaaggcggtaatacggttatccacagaatcaggggataacgcaggaaagaacatgtgagcaaaaggccagcaaaaggccaggaaccgtaaaaaggccgcgttgctggcgtttttccataggctccgcccccctgacgagcatcacaaaaatcgacgctcaagtcagaggtggcgaaacccgacaggactataaagataccaggcgtttccccctggaagctccctcgtgcgctctcctgttccgaccctgccgcttaccggatacctgtccgcctttctcccttcgggaagcgtggcgctttctcatagctcacgctgtaggtatctcagttcggtgtaggtcgttcgctccaagctgggctgtgtgcacgaaccccccgttcagcccgaccgctgcgccttatccggtaactatcgtcttgagtccaacccggtaagacacgacttatcgccactggcagcagccactggtaacaggattagcagagcgaggtatgtaggcggtgctacagagttcttgaagtggtggcctaactacggctacactagaagaacagtatttggtatctgcgctctgctgaagccagttaccttcggaaaaagagttggtagctcttgatccggcaaacaaaccaccgctggtagcggtggtttttttgtttgcaagcagcagattacgcgcagaaaaaaaggatctcaagaagatcctttgatcttttctacggggtctgacactcagtggaacgaaaactcacgttaagggattttggtcatgagattatcaaaaaggatcttcacctagatccttttaaattaaaaatgaagttttaaatcaatctaaagtatatatgagtaaacttggtctgacagttaccaatgcttaatcagtgaggcacctatctcagcgatctgtctatttcgttcatccatagttgcctgactccccgtcgtgtagataactacgatacgggagggcttaccatctggccccagtgctgcaatgataccgcgagacccacgctcaccggctccagatttatcagcaataaaccagccagccggaagggccgagcgcagaagtggtcctgcaactttatccgcctccatccagtctattaattgttgccgggaagctagagtaagtagttcgccagttaatagtttgcgcaacgttgttgccattgctacaggcatcgtggtgtcacgctcgtcgtttggtatggcttcattcagctccggttcccaacgatcaaggcgagttacatgatcccccatgttgtgcaaaaaagcggttagctccttcggtcctccgatcgttgtcagaagtaagttggccgcagtgttatcactcatggttatggcagcactgcataattctcttactgtcatgccatccgtaagatgcttttctgtgactggtgagtactcaaccaagtcattctgagaatagtgtatgcggcgaccgagttgctcttgcccggcgtcaatacgggataataccgcgccacatagcagaactttaaaagtgctcatcattggaaaacgttcttcggggcgaaaactctcaaggatcttaccgctgttgagatccagttcgatgtaacccactcgtgcacccaactgatcttcagcatcttttactttcaccagcgtttctgggtgagcaaaaacaggaaggcaaaatgccgcaaaaaagggaataagggcgacacggaaatgttgaatactcatactcttcctttttcaatattattgaagcatttatcagggttattgtctcatgagcggatacatatttgaatgtatttagaaaaataaacaaataggggttccgcgcacatttccccgaaaagtgccacctgacgtcgacggatcgggagatcgatctcccgatcccctagggtcgactctcagtacaatctgctctgatgccgcatagttaagccagtatctgctccctgcttgtgtgttggaggtcgctgagtagtgcgcgagcaaaatttaagctacaacaaggcaaggcttgaccgacaattgcatgaagaatctgcttagggttaggcgttttgcgctgcttcgcgatgtacgggccagatatacgcgtt

SEQ ID NO: 588 - DNA, 8067 bp, synthetic construct
  source 1..8067: mol_type = other DNA
gacattgattattgactagttattaatagtaatcaattacggggtcattagttcatagcccatatatggagttccgcgttacataacttacggtaaatggcccgcctggctgaccgcccaacgacccccgcccattgacgtcaataatgacgtatgttcccatagtaacgccaatagggactttccattgacgtcaatgggtggagtatttacggtaaactgcccacttggcagtacatcaagtgtatcatatgccaagtacgccccctattgacgtcaatgacggtaaatggcccgcctggcattatgcccagtacatgaccttatgggactttcctacttggcagtacatctacgtattagtcatcgctattaccatggtgatgcggttttggcagtacatcaatgggcgtggatagcggtttgactcacggggatttccaagtctccaccccattgacgtcaatgggagtttgttttggcaccaaaatcaacgggactttccaaaatgtcgtaacaactccgccccattgacgcaaatgggcggtaggcgtgtacggtgggaggtctatataagcagagctggtttagtgaaccgtcagatccgctagagatccgcggccgctaatacgactcactatagggagagccgccaccatgaaacggacagccgacggaagcgagttcgagtcaccaaagaagaagcggaaagtcaaggagaacaaggagctggagaacctggagatcaacctccgcaaggaaatcgccaaagcgttcaagggcaatgaagggtacaagagcctcttcaagaaagacatcatcgaaactatcctcccagagtttctcgatgacaaggacgagatcgcgctggtgaactcctttaacgggttcacaaccgcgtttaccggcttctttgataacagggaaaatatgttctccgaggaggccaagtccaccagcatcgccttcaggtgtatcaacgagaacctcacccgctacatttccaatatggacattttcgagaaggtggatgcgatcttcgataagcacgaggtgcaggagatcaaagagaagattctcaattccgattatgacgtcgaggatttcttcgaaggggagttctttaattttgtgctcacacaagagggcattgacgtgtacaacgcgattatcgggggcttcgtcacagagtccggggagaagattaaggggctgaatgagtacatcaatctgtacaatcagaagaccaagcagaaactgccgaaattcaagccgctctacaagcaagtcctgtccgatagggaaagcctctccttctacggcgagggctataccagcgacgaggaggtgctggaagtcttccgcaacacactgaataagaatagcgagattttctcctccatcaagaagctcgagaagctctttaagaactttgacgagtacagctccgccgggattttcgtgaagaacgggccggcgatcagcaccatctccaaggacatctttggcgagtggaacgtcatcagggacaagtggaacgccgagtacgacgacatccacctgaagaagaaggcggtggtgaccgagaagtatgaggacgatcgcaggaagtccttcaaaaaaatcggctccttcagcctcgaacagctccaggagtatgccgatgcggatctgtccgtcgtcgagaagctgaaggaaatcatcattcagaaggtcgacgagatctataaagtgtacgggtccagcgagaagctgttcgacgccgactttgtgctcgagaagtccctcaaaaagaatgacgccgtggtggccattatgaaagacctgctcgactccgtgaagtccttcgaaaattacattaaagcgttctttggggaggggaaggaaactaacagggatgagtccttctatggcgactttgtcctcgcgtacgacatcctgctgaaggtcgaccacatttacgacgcgatccgcaactacgtgacacagaagccgtactccaaagacaagttcaagctgtacttccagaacccgcaatttatggggggctgggacaaggataaagagacagactaccgcgcgacaattctccgctatggctccaaatactatctggccatcatggacaagaagtacgcgaagtgcctgcagaagatcgacaaagacgacgtcaatggcaactatgaaaagatcaactacaagctgctgccgggcccgaacaagatgctcccgaaggtgttcttcagcaagaagtggatggcctactacaatccaagcgaggatattcagaaaatctataaaaacgggaccttcaagaagggggacatgtttaacctcaacgactgccacaagctcattgatttcttcaaggatagcatttcccgctacccgaaatggtccaatgcgtacgattttaacttctccgagacagaaaagtacaaagacatcgcgggcttttacagggaggtggaggagcaagggtataaagtttcttttgaatccgcgagcaagaaggaagtcgacaagctcgtcgaggagggcaagctctacatgttccaaatttataacaaggacttttccgacaagagccatgggaccccaaacctccacaccatgtacttcaaactgctctttgacgagaacaaccacgggcaaatcaggctgagcggcggcgccgaattattcatgcgcagggcctccctcaagaaggaagagctggtcgtccatccagccaattccccgatcgcgaacaagaacccggacaatccgaaaaagaccaccaccctgtcctacgacgtctacaaggacaaacgcttcagcgaagaccagtacgaattacacatcccaattgcgattaataagtgcccaaagaatatcttcaaaattaatacagaggtcagggtgctgctcaaacacgacgacaatccgtatgtcatcggcattgacaggggcgagcgcaatctgctctatatcgtggtcgtggatgggaagggcaatattgtggagcagtactccctgaacgagattatcaacaacttcaatgggattaggattaagaccgactatcacagcctgctcgacaagaaagaaaaagagaggtttgaggcccgccaaaactggacctccattgagaatatcaaagaattaaaggccggctatatttcccaagtcgtccacaagatctgcgagctggtggagaaatatgacgccgtgattgcgctcgaagacttaaattctgggttcaagaactcccgcgtgaaggtggaaaaacaggtgtatcagaaattcgagaaaatgctgatcgacaaactcaattatatggtggataagaagtccaacccgtgtgccacagggggcgcgctgaagggctatcagatcaccaacaagttcgagagcttcaagagcatgagcacccagaacgggtttattttctacatcccggcgtggctcacctccaagattgacccgagcaccggcttcgtgaacctcctgaagacaaagtatacctccattgccgacagcaagaagtttatctcctccttcgaccgcattatgtatgtgccggaggaggacctcttcgagttcgccctcgactacaaaaacttcagccgcacagatgcggattacatcaagaagtggaagctgtactcctacgggaacaggatccgcatcttcaggaatccaaaaaaaaataacgtctttgactgggaggaagtgtgcctgacatccgcctacaaggaactgttcaataaatacggcatcaattaccagcagggcgacattcgcgccctcctctgtgagcagtccgacaaagcgttttactccagcttcatggccctcatgtccctgatgctccaaatgaggaatagcatcacagggcgcaccgacgtcgacttcctcatcagcccggtgaagaactccgacgggatcttttacgactcccgcaactatgaggcgcaagagaatgcgatcctcccgaagaacgccgatgcgaacggggcctataatatcgccaggaaagtgctctgggccatcgggcagttcaaaaaggcggaggatgagaagctcgacaaggtgaaaattgccatttccaacaaggagtggctggagtacgcgcagacctccgtgaagcacggctcctctggcagctccggctctagcggctcctctggcagctccggctccaagctggagaagtttacaaactgttacagcctctccaaaaccctcaggtttaaagcgatcccggtgggcaagacccaggagaacatcgacaacaagaggctcctggtggaagacgagaagcgcgccgaagactacaagggcgtgaagaagctgctcgataggtactacctcagctttattaacgacgtgctgcacagcatcaaactcaagaatctcaacaactacatctccctcttccgcaaaaagacccgcaccgagtctggcggctcaaaaagaaccgccgacggcagcgaattcgagcccaagaagaagaggaaagtcggaagcggagctactaacttcagcctgctgaagcaggctggagacgtggaggagaaccctggacctatggtgagcaagggcgaggagctgttcaccggggtggtgcccatcctggtcgagctggacggcgacgtaaacggccacaagttcagcgtgtccggcgagggcgagggcgatgccacctacggcaagctgaccctgaagttcatctgcaccaccggcaagctgcccgtgccctggcccaccctcgtgaccaccctgacctatggagtgcagtgcttcagccgctaccccgaccacatgaagcagcacgacttcttcaagtccgccatgcccgaaggctacgtccaggagcgcaccatcttcttcaaggacgacggcaactacaagacccgcgccgaggtgaagttcgagggcgacaccctggtgaaccgcatcgagctgaagggcatcgacttcaaggaggacggcaacatcctggggcacaagctggagtacaactacaacagccacaacgtctatatcatggccgacaagcagaagaacggcatcaaggtgaacttcaagatccgccacaacatcgaggacggcagcgtgcagctcgccgaccactaccagcagaacacccccatcggcgacggccccgtgctgctgcccgacaaccactacctgagcacccagtccgccctgagcaaagaccccaacgagaagcgcgatcacatggtcctgctggagttcgtgaccgccgccgggatcactctcggcatggacgagctgtacaagtctggtggttctcccaagaagaagaggaaagtctaaccggtcatcatcaccatcaccattgagtttaaacccgctgatcagcctcgactgtgccttctagttgccagccatctgttgtttgcccctcccccgtgccttccttgaccctggaaggtgccactcccactgtcctttcctaataaaatgaggaaattgcatcgcattgtctgagtaggtgtcattctattctggggggtggggtggggcaggacagcaagggggaggattgggaagacaatagcaggcatgctggggatgcggtgggctctatggcttctgaggcggaaagaaccagctggggctcgataccgtcgacctctagctagagcttggcgtaatcatggtcatagctgtttcctgtgtgaaattgttatccgctcacaattccacacaacatacgagccggaagcataaagtgtaaagcctagggtgcctaatgagtgagctaactcacattaattgcgttgcgctcactgcccgctttccagtcgggaaacctgtcgtgccagctgcattaatgaatcggccaacgcgcggggagaggcggtttgcgtattgggcgctcttccgcttcctcgctcactgactcgctgcgctcggtcgttcggctgcggcgagcggtatcagctcactcaaaggcggtaatacggttatccacagaatcaggggataacgcaggaaagaacatgtgagcaaaaggccagcaaaaggccaggaaccgtaaaaaggccgcgttgctggcgtttttccataggctccgcccccctgacgagcatcacaaaaatcgacgctcaagtcagaggtggcgaaacccgacaggactataaagataccaggcgtttccccctggaagctccctcgtgcgctctcctgttccgaccctgccgcttaccggatacctgtccgcctttctcccttcgggaagcgtggcgctttctcatagctcacgctgtaggtatctcagttcggtgtaggtcgttcgctccaagctgggctgtgtgcacgaaccccccgttcagcccgaccgctgcgccttatccggtaactatcgtcttgagtccaacccggtaagacacgacttatcgccactggcagcagccactggtaacaggattagcagagcgaggtatgtaggcggtgctacagagttcttgaagtggtggcctaactacggctacactagaagaacagtatttggtatctgcgctctgctgaagccagttaccttcggaaaaagagttggtagctcttgatccggcaaacaaaccaccgctggtagcggtggtttttttgtttgcaagcagcagattacgcgcagaaaaaaaggatctcaagaagatcctttgatcttttctacggggtctgacactcagtggaacgaaaactcacgttaagggattttggtcatgagattatcaaaaaggatcttcacctagatccttttaaattaaaaatgaagttttaaatcaatctaaagtatatatgagtaaacttggtctgacagttaccaatgcttaatcagtgaggcacctatctcagcgatctgtctatttcgttcatccatagttgcctgactccccgtcgtgtagataactacgatacgggagggcttaccatctggccccagtgctgcaatgataccgcgagacccacgctcaccggctccagatttatcagcaataaaccagccagccggaagggccgagcgcagaagtggtcctgcaactttatccgcctccatccagtctattaattgttgccgggaagctagagtaagtagttcgccagttaatagtttgcgcaacgttgttgccattgctacaggcatcgtggtgtcacgctcgtcgtttggtatggcttcattcagctccggttcccaacgatcaaggcgagttacatgatcccccatgttgtgcaaaaaagcggttagctccttcggtcctccgatcgttgtcagaagtaagttggccgcagtgttatcactcatggttatggcagcactgcataattctcttactgtcatgccatccgtaagatgcttttctgtgactggtgagtactcaaccaagtcattctgagaatagtgtatgcggcgaccgagttgctcttgcccggcgtcaatacgggataataccgcgccacatagcagaactttaaaagtgctcatcattggaaaacgttcttcggggcgaaaactctcaaggatcttaccgctgttgagatccagttcgatgtaacccactcgtgcacccaactgatcttcagcatcttttactttcaccagcgtttctgggtgagcaaaaacaggaaggcaaaatgccgcaaaaaagggaataagggcgacacggaaatgttgaatactcatactcttcctttttcaatattattgaagcatttatcagggttattgtctcatgagcggatacatatttgaatgtatttagaaaaataaacaaataggggttccgcgcacatttccccgaaaagtgccacctgacgtcgacggatcgggagatcgatctcccgatcccctagggtcgactctcagtacaatctgctctgatgccgcatagttaagccagtatctgctccctgcttgtgtgttggaggtcgctgagtagtgcgcgagcaaaatttaagctacaacaaggcaaggcttgaccgacaattgcatgaagaatctgcttagggttaggcgttttgcgctgcttcgcgatgtacgggccagatatacgcgtt

SEQ ID NO: 589 - DNA, 8067 bp, synthetic construct
  source 1..8067: mol_type = other DNA
gacattgattattgactagttattaatagtaatcaattacggggtcattagttcatagcccatatatggagttccgcgttacataacttacggtaaatggcccgcctggctgaccgcccaacgacccccgcccattgacgtcaataatgacgtatgttcccatagtaacgccaatagggactttccattgacgtcaatgggtggagtatttacggtaaactgcccacttggcagtacatcaagtgtatcatatgccaagtacgccccctattgacgtcaatgacggtaaatggcccgcctggcattatgcccagtacatgaccttatgggactttcctacttggcagtacatctacgtattagtcatcgctattaccatggtgatgcggttttggcagtacatcaatgggcgtggatagcggtttgactcacggggatttccaagtctccaccccattgacgtcaatgggagtttgttttggcaccaaaatcaacgggactttccaaaatgtcgtaacaactccgccccattgacgcaaatgggcggtaggcgtgtacggtgggaggtctatataagcagagctggtttagtgaaccgtcagatccgctagagatccgcggccgctaatacgactcactatagggagagccgccaccatgaaacggacagccgacggaagcgagttcgagtcaccaaagaagaagcggaaagtccagaaactgccgaaattcaagccgctctacaagcaagtcctgtccgatagggaaagcctctccttctacggcgagggctataccagcgacgaggaggtgctggaagtcttccgcaacacactgaataagaatagcgagattttctcctccatcaagaagctcgagaagctctttaagaactttgacgagtacagctccgccgggattttcgtgaagaacgggccggcgatcagcaccatctccaaggacatctttggcgagtggaacgtcatcagggacaagtggaacgccgagtacgacgacatccacctgaagaagaaggcggtggtgaccgagaagtatgaggacgatcgcaggaagtccttcaaaaaaatcggctccttcagcctcgaacagctccaggagtatgccgatgcggatctgtccgtcgtcgagaagctgaaggaaatcatcattcagaaggtcgacgagatctataaagtgtacgggtccagcgagaagctgttcgacgccgactttgtgctcgagaagtccctcaaaaagaatgacgccgtggtggccattatgaaagacctgctcgactccgtgaagtccttcgaaaattacattaaagcgttctttggggaggggaaggaaactaacagggatgagtccttctatggcgactttgtcctcgcgtacgacatcctgctgaaggtcgaccacatttacgacgcgatccgcaactacgtgacacagaagccgtactccaaagacaagttcaagctgtacttccagaacccgcaatttatggggggctgggacaaggataaagagacagactaccgcgcgacaattctccgctatggctccaaatactatctggccatcatggacaagaagtacgcgaagtgcctgcagaagatcgacaaagacgacgtcaatggcaactatgaaaagatcaactacaagctgctgccgggcccgaacaagatgctcccgaaggtgttcttcagcaagaagtggatggcctactacaatccaagcgaggatattcagaaaatctataaaaacgggaccttcaagaagggggacatgtttaacctcaacgactgccacaagctcattgatttcttcaaggatagcatttcccgctacccgaaatggtccaatgcgtacgattttaacttctccgagacagaaaagtacaaagacatcgcgggcttttacagggaggtggaggagcaagggtataaagtttcttttgaatccgcgagcaagaaggaagtcgacaagctcgtcgaggagggcaagctctacatgttccaaatttataacaaggacttttccgacaagagccatgggaccccaaacctccacaccatgtacttcaaactgctctttgacgagaacaaccacgggcaaatcaggctgagcggcggcgccgaattattcatgcgcagggcctccctcaagaaggaagagctggtcgtccatccagccaattccccgatcgcgaacaagaacccggacaatccgaaaaagaccaccaccctgtcctacgacgtctacaaggacaaacgcttcagcgaagaccagtacgaattacacatcccaattgcgattaataagtgcccaaagaatatcttcaaaattaatacagaggtcagggtgctgctcaaacacgacgacaatccgtatgtcatcggcattgacaggggcgagcgcaatctgctctatatcgtggtcgtggatgggaagggcaatattgtggagcagtactccctgaacgagattatcaacaacttcaatgggattaggattaagaccgactatcacagcctgctcgacaagaaagaaaaagagaggtttgaggcccgccaaaactggacctccattgagaatatcaaagaattaaaggccggctatatttcccaagtcgtccacaagatctgcgagctggtggagaaatatgacgccgtgattgcgctcgaagacttaaattctgggttcaagaactcccgcgtgaaggtggaaaaacaggtgtatcagaaattcgagaaaatgctgatcgacaaactcaattatatggtggataagaagtccaacccgtgtgccacagggggcgcgctgaagggctatcagatcaccaacaagttcgagagcttcaagagcatgagcacccagaacgggtttattttctacatcccggcgtggctcacctccaagattgacccgagcaccggcttcgtgaacctcctgaagacaaagtatacctccattgccgacagcaagaagtttatctcctccttcgaccgcattatgtatgtgccggaggaggacctcttcgagttcgccctcgactacaaaaacttcagccgcacagatgcggattacatcaagaagtggaagctgtactcctacgggaacaggatccgcatcttcaggaatccaaaaaaaaataacgtctttgactgggaggaagtgtgcctgacatccgcctacaaggaactgttcaataaatacggcatcaattaccagcagggcgacattcgcgccctcctctgtgagcagtccgacaaagcgttttactccagcttcatggccctcatgtccctgatgctccaaatgaggaatagcatcacagggcgcaccgacgtcgacttcctcatcagcccggtgaagaactccgacgggatcttttacgactcccgcaactatgaggcgcaagagaatgcgatcctcccgaagaacgccgatgcgaacggggcctataatatcgccaggaaagtgctctgggccatcgggcagttcaaaaaggcggaggatgagaagctcgacaaggtgaaaattgccatttccaacaaggagtggctggagtacgcgcagacctccgtgaagcacggctcctctggcagctccggctctagcggctcctctggcagctccggctccaagctggagaagtttacaaactgttacagcctctccaaaaccctcaggtttaaagcgatcccggtgggcaagacccaggagaacatcgacaacaagaggctcctggtggaagacgagaagcgcgccgaagactacaagggcgtgaagaagctgctcgataggtactacctcagctttattaacgacgtgctgcacagcatcaaactcaagaatctcaacaactacatctccctcttccgcaaaaagacccgcaccgagaaggagaacaaggagctggagaacctggagatcaacctccgcaaggaaatcgccaaagcgttcaagggcaatgaagggtacaagagcctcttcaagaaagacatcatcgaaactatcctcccagagtttctcgatgacaaggacgagatcgcgctggtgaactcctttaacgggttcacaaccgcgtttaccggcttctttgataacagggaaaatatgttctccgaggaggccaagtccaccagcatcgccttcaggtgtatcaacgagaacctcacccgctacatttccaatatggacattttcgagaaggtggatgcgatcttcgataagcacgaggtgcaggagatcaaagagaagattctcaattccgattatgacgtcgaggatttcttcgaaggggagttctttaattttgtgctcacacaagagggcattgacgtgtacaacgcgattatcgggggcttcgtcacagagtccggggagaagattaaggggctgaatgagtacatcaatctgtacaatcagaagaccaagtctggcggctcaaaaagaaccgccgacggcagcgaattcgagcccaagaagaagaggaaagtcggaagcggagctactaacttcagcctgctgaagcaggctggagacgtggaggagaaccctggacctatggtgagcaagggcgaggagctgttcaccggggtggtgcccatcctggtcgagctggacggcgacgtaaacggccacaagttcagcgtgtccggcgagggcgagggcgatgccacctacggcaagctgaccctgaagttcatctgcaccaccggcaagctgcccgtgccctggcccaccctcgtgaccaccctgacctatggagtgcagtgcttcagccgctaccccgaccacatgaagcagcacgacttcttcaagtccgccatgcccgaaggctacgtccaggagcgcaccatcttcttcaaggacgacggcaactacaagacccgcgccgaggtgaagttcgagggcgacaccctggtgaaccgcatcgagctgaagggcatcgacttcaaggaggacggcaacatcctggggcacaagctggagtacaactacaacagccacaacgtctatatcatggccgacaagcagaagaacggcatcaaggtgaacttcaagatccgccacaacatcgaggacggcagcgtgcagctcgccgaccactaccagcagaacacccccatcggcgacggccccgtgctgctgcccgacaaccactacctgagcacccagtccgccctgagcaaagaccccaacgagaagcgcgatcacatggtcctgctggagttcgtgaccgccgccgggatcactctcggcatggacgagctgtacaagtctggtggttctcccaagaagaagaggaaagtctaaccggtcatcatcaccatcaccattgagtttaaacccgctgatcagcctcgactgtgccttctagttgccagccatctgttgtttgcccctcccccgtgccttccttgaccctggaaggtgccactcccactgtcctttcctaataaaatgaggaaattgcatcgcattgtctgagtaggtgtcattctattctggggggtggggtggggcaggacagcaagggggaggattgggaagacaatagcaggcatgctggggatgcggtgggctctatggcttctgaggcggaaagaaccagctggggctcgataccgtcgacctctagctagagcttggcgtaatcatggtcatagctgtttcctgtgtgaaattgttatccgctcacaattccacacaacatacgagccggaagcataaagtgtaaagcctagggtgcctaatgagtgagctaactcacattaattgcgttgcgctcactgcccgctttccagtcgggaaacctgtcgtgccagctgcattaatgaatcggccaacgcgcggggagaggcggtttgcgtattgggcgctcttccgcttcctcgctcactgactcgctgcgctcggtcgttcggctgcggcgagcggtatcagctcactcaaaggcggtaatacggttatccacagaatcaggggataacgcaggaaagaacatgtgagcaaaaggccagcaaaaggccaggaaccgtaaaaaggccgcgttgctggcgtttttccataggctccgcccccctgacgagcatcacaaaaatcgacgctcaagtcagaggtggcgaaacccgacaggactataaagataccaggcgtttccccctggaagctccctcgtgcgctctcctgttccgaccctgccgcttaccggatacctgtccgcctttctcccttcgggaagcgtggcgctttctcatagctcacgctgtaggtatctcagttcggtgtaggtcgttcgctccaagctgggctgtgtgcacgaaccccccgttcagcccgaccgctgcgccttatccggtaactatcgtcttgagtccaacccggtaagacacgacttatcgccactggcagcagccactggtaacaggattagcagagcgaggtatgtaggcggtgctacagagttcttgaagtggtggcctaactacggctacactagaagaacagtatttggtatctgcgctctgctgaagccagttaccttcggaaaaagagttggtagctcttgatccggcaaacaaaccaccgctggtagcggtggtttttttgtttgcaagcagcagattacgcgcagaaaaaaaggatctcaagaagatcctttgatcttttctacggggtctgacactcagtggaacgaaaactcacgttaagggattttggtcatgagattatcaaaaaggatcttcacctagatccttttaaattaaaaatgaagttttaaatcaatctaaagtatatatgagtaaacttggtctgacagttaccaatgcttaatcagtgaggcacctatctcagcgatctgtctatttcgttcatccatagttgcctgactccccgtcgtgtagataactacgatacgggagggcttaccatctggccccagtgctgcaatgataccgcgagacccacgctcaccggctccagatttatcagcaataaaccagccagccggaagggccgagcgcagaagtggtcctgcaactttatccgcctccatccagtctattaattgttgccgggaagctagagtaagtagttcgccagttaatagtttgcgcaacgttgttgccattgctacaggcatcgtggtgtcacgctcgtcgtttggtatggcttcattcagctccggttcccaacgatcaaggcgagttacatgatcccccatgttgtgcaaaaaagcggttagctccttcggtcctccgatcgttgtcagaagtaagttggccgcagtgttatcactcatggttatggcagcactgcataattctcttactgtcatgccatccgtaagatgcttttctgtgactggtgagtactcaaccaagtcattctgagaatagtgtatgcggcgaccgagttgctcttgcccggcgtcaatacgggataataccgcgccacatagcagaactttaaaagtgctcatcattggaaaacgttcttcggggcgaaaactctcaaggatcttaccgctgttgagatccagttcgatgtaacccactcgtgcacccaactgatcttcagcatcttttactttcaccagcgtttctgggtgagcaaaaacaggaaggcaaaatgccgcaaaaaagggaataagggcgacacggaaatgttgaatactcatactcttcctttttcaatattattgaagcatttatcagggttattgtctcatgagcggatacatatttgaatgtatttagaaaaataaacaaataggggttccgcgcacatttccccgaaaagtgccacctgacgtcgacggatcgggagatcgatctcccgatcccctagggtcgactctcagtacaatctgctctgatgccgcatagttaagccagtatctgctccctgcttgtgtgttggaggtcgctgagtagtgcgcgagcaaaatttaagctacaacaaggcaaggcttgaccgacaattgcatgaagaatctgcttagggttaggcgttttgcgctgcttcgcgatgtacgggccagatatacgcgtt

SEQ ID NO: 590 - DNA, 8067 bp, synthetic construct
  source 1..8067: mol_type = other DNA
gacattgattattgactagttattaatagtaatcaattacggggtcattagttcatagcccatatatggagttccgcgttacataacttacggtaaatggcccgcctggctgaccgcccaacgacccccgcccattgacgtcaataatgacgtatgttcccatagtaacgccaatagggactttccattgacgtcaatgggtggagtatttacggtaaactgcccacttggcagtacatcaagtgtatcatatgccaagtacgccccctattgacgtcaatgacggtaaatggcccgcctggcattatgcccagtacatgaccttatgggactttcctacttggcagtacatctacgtattagtcatcgctattaccatggtgatgcggttttggcagtacatcaatgggcgtggatagcggtttgactcacggggatttccaagtctccaccccattgacgtcaatgggagtttgttttggcaccaaaatcaacgggactttccaaaatgtcgtaacaactccgccccattgacgcaaatgggcggtaggcgtgtacggtgggaggtctatataagcagagctggtttagtgaaccgtcagatccgctagagatccgcggccgctaatacgactcactatagggagagccgccaccatgaaacggacagccgacggaagcgagttcgagtcaccaaagaagaagcggaaagtcgtcctgtccgatagggaaagcctctccttctacggcgagggctataccagcgacgaggaggtgctggaagtcttccgcaacacactgaataagaatagcgagattttctcctccatcaagaagctcgagaagctctttaagaactttgacgagtacagctccgccgggattttcgtgaagaacgggccggcgatcagcaccatctccaaggacatctttggcgagtggaacgtcatcagggacaagtggaacgccgagtacgacgacatccacctgaagaagaaggcggtggtgaccgagaagtatgaggacgatcgcaggaagtccttcaaaaaaatcggctccttcagcctcgaacagctccaggagtatgccgatgcggatctgtccgtcgtcgagaagctgaaggaaatcatcattcagaaggtcgacgagatctataaagtgtacgggtccagcgagaagctgttcgacgccgactttgtgctcgagaagtccctcaaaaagaatgacgccgtggtggccattatgaaagacctgctcgactccgtgaagtccttcgaaaattacattaaagcgttctttggggaggggaaggaaactaacagggatgagtccttctatggcgactttgtcctcgcgtacgacatcctgctgaaggtcgaccacatttacgacgcgatccgcaactacgtgacacagaagccgtactccaaagacaagttcaagctgtacttccagaacccgcaatttatggggggctgggacaaggataaagagacagactaccgcgcgacaattctccgctatggctccaaatactatctggccatcatggacaagaagtacgcgaagtgcctgcagaagatcgacaaagacgacgtcaatggcaactatgaaaagatcaactacaagctgctgccgggcccgaacaagatgctcccgaaggtgttcttcagcaagaagtggatggcctactacaatccaagcgaggatattcagaaaatctataaaaacgggaccttcaagaagggggacatgtttaacctcaacgactgccacaagctcattgatttcttcaaggatagcatttcccgctacccgaaatggtccaatgcgtacgattttaacttctccgagacagaaaagtacaaagacatcgcgggcttttacagggaggtggaggagcaagggtataaagtttcttttgaatccgcgagcaagaaggaagtcgacaagctcgtcgaggagggcaagctctacatgttccaaatttataacaaggacttttccgacaagagccatgggaccccaaacctccacaccatgtacttcaaactgctctttgacgagaacaaccacgggcaaatcaggctgagcggcggcgccgaattattcatgcgcagggcctccctcaagaaggaagagctggtcgtccatccagccaattccccgatcgcgaacaagaacccggacaatccgaaaaagaccaccaccctgtcctacgacgtctacaaggacaaacgcttcagcgaagaccagtacgaattacacatcccaattgcgattaataagtgcccaaagaatatcttcaaaattaatacagaggtcagggtgctgctcaaacacgacgacaatccgtatgtcatcggcattgacaggggcgagcgcaatctgctctatatcgtggtcgtggatgggaagggcaatattgtggagcagtactccctgaacgagattatcaacaacttcaatgggattaggattaagaccgactatcacagcctgctcgacaagaaagaaaaagagaggtttgaggcccgccaaaactggacctccattgagaatatcaaagaattaaaggccggctatatttcccaagtcgtccacaagatctgcgagctggtggagaaatatgacgccgtgattgcgctcgaagacttaaattctgggttcaagaactcccgcgtgaaggtggaaaaacaggtgtatcagaaattcgagaaaatgctgatcgacaaactcaattatatggtggataagaagtccaacccgtgtgccacagggggcgcgctgaagggctatcagatcaccaacaagttcgagagcttcaagagcatgagcacccagaacgggtttattttctacatcccggcgtggctcacctccaagattgacccgagcaccggcttcgtgaacctcctgaagacaaagtatacctccattgccgacagcaagaagtttatctcctccttcgaccgcattatgtatgtgccggaggaggacctcttcgagttcgccctcgactacaaaaacttcagccgcacagatgcggattacatcaagaagtggaagctgtactcctacgggaacaggatccgcatcttcaggaatccaaaaaaaaataacgtctttgactgggaggaagtgtgcctgacatccgcctacaaggaactgttcaataaatacggcatcaattaccagcagggcgacattcgcgccctcctctgtgagcagtccgacaaagcgttttactccagcttcatggccctcatgtccctgatgctccaaatgaggaatagcatcacagggcgcaccgacgtcgacttcctcatcagcccggtgaagaactccgacgggatcttttacgactcccgcaactatgaggcgcaagagaatgcgatcctcccgaagaacgccgatgcgaacggggcctataatatcgccaggaaagtgctctgggccatcgggcagttcaaaaaggcggaggatgagaagctcgacaaggtgaaaattgccatttccaacaaggagtggctggagtacgcgcagacctccgtgaagcacggctcctctggcagctccggctctagcggctcctctggcagctccggctccaagctggagaagtttacaaactgttacagcctctccaaaaccctcaggtttaaagcgatcccggtgggcaagacccaggagaacatcgacaacaagaggctcctggtggaagacgagaagcgcgccgaagactacaagggcgtgaagaagctgctcgataggtactacctcagctttattaacgacgtgctgcacagcatcaaactcaagaatctcaacaactacatctccctcttccgcaaaaagacccgcaccgagaaggagaacaaggagctggagaacctggagatcaacctccgcaaggaaatcgccaaagcgttcaagggcaatgaagggtacaagagcctcttcaagaaagacatcatcgaaactatcctcccagagtttctcgatgacaaggacgagatcgcgctggtgaactcctttaacgggttcacaaccgcgtttaccggcttctttgataacagggaaaatatgttctccgaggaggccaagtccaccagcatcgccttcaggtgtatcaacgagaacctcacccgctacatttccaatatggacattttcgagaaggtggatgcgatcttcgataagcacgaggtgcaggagatcaaagagaagattctcaattccgattatgacgtcgaggatttcttcgaaggggagttctttaattttgtgctcacacaagagggcattgacgtgtacaacgcgattatcgggggcttcgtcacagagtccggggagaagattaaggggctgaatgagtacatcaatctgtacaatcagaagaccaagcagaaactgccgaaattcaagccgctctacaagcaatctggcggctcaaaaagaaccgccgacggcagcgaattcgagcccaagaagaagaggaaagtcggaagcggagctactaacttcagcctgctgaagcaggctggagacgtggaggagaaccctggacctatggtgagcaagggcgaggagctgttcaccggggtggtgcccatcctggtcgagctggacggcgacgtaaacggccacaagttcagcgtgtccggcgagggcgagggcgatgccacctacggcaagctgaccctgaagttcatctgcaccaccggcaagctgcccgtgccctggcccaccctcgtgaccaccctgacctatggagtgcagtgcttcagccgctaccccgaccacatgaagcagcacgacttcttcaagtccgccatgcccgaaggctacgtccaggagcgcaccatcttcttcaaggacgacggcaactacaagacccgcgccgaggtgaagttcgagggcgacaccctggtgaaccgcatcgagctgaagggcatcgacttcaaggaggacggcaacatcctggggcacaagctggagtacaactacaacagccacaacgtctatatcatggccgacaagcagaagaacggcatcaaggtgaacttcaagatccgccacaacatcgaggacggcagcgtgcagctcgccgaccactaccagcagaacacccccatcggcgacggccccgtgctgctgcccgacaaccactacctgagcacccagtccgccctgagcaaagaccccaacgagaagcgcgatcacatggtcctgctggagttcgtgaccgccgccgggatcactctcggcatggacgagctgtacaagtctggtggttctcccaagaagaagaggaaagtctaaccggtcatcatcaccatcaccattgagtttaaacccgctgatcagcctcgactgtgccttctagttgccagccatctgttgtttgcccctcccccgtgccttccttgaccctggaaggtgccactcccactgtcctttcctaataaaatgaggaaattgcatcgcattgtctgagtaggtgtcattctattctggggggtggggtggggcaggacagcaagggggaggattgggaagacaatagcaggcatgctggggatgcggtgggctctatggcttctgaggcggaaagaaccagctggggctcgataccgtcgacctctagctagagcttggcgtaatcatggtcatagctgtttcctgtgtgaaattgttatccgctcacaattccacacaacatacgagccggaagcataaagtgtaaagcctagggtgcctaatgagtgagctaactcacattaattgcgttgcgctcactgcccgctttccagtcgggaaacctgtcgtgccagctgcattaatgaatcggccaacgcgcggggagaggcggtttgcgtattgggcgctcttccgcttcctcgctcactgactcgctgcgctcggtcgttcggctgcggcgagcggtatcagctcactcaaaggcggtaatacggttatccacagaatcaggggataacgcaggaaagaacatgtgagcaaaaggccagcaaaaggccaggaaccgtaaaaaggccgcgttgctggcgtttttccataggctccgcccccctgacgagcatcacaaaaatcgacgctcaagtcagaggtggcgaaacccgacaggactataaagataccaggcgtttccccctggaagctccctcgtgcgctctcctgttccgaccctgccgcttaccggatacctgtccgcctttctcccttcgggaagcgtggcgctttctcatagctcacgctgtaggtatctcagttcggtgtaggtcgttcgctccaagctgggctgtgtgcacgaaccccccgttcagcccgaccgctgcgccttatccggtaactatcgtcttgagtccaacccggtaagacacgacttatcgccactggcagcagccactggtaacaggattagcagagcgaggtatgtaggcggtgctacagagttcttgaagtggtggcctaactacggctacactagaagaacagtatttggtatctgcgctctgctgaagccagttaccttcggaaaaagagttggtagctcttgatccggcaaacaaaccaccgctggtagcggtggtttttttgtttgcaagcagcagattacgcgcagaaaaaaaggatctcaagaagatcctttgatcttttctacggggtctgacactcagtggaacgaaaactcacgttaagggattttggtcatgagattatcaaaaaggatcttcacctagatccttttaaattaaaaatgaagttttaaatcaatctaaagtatatatgagtaaacttggtctgacagttaccaatgcttaatcagtgaggcacctatctcagcgatctgtctatttcgttcatccatagttgcctgactccccgtcgtgtagataactacgatacgggagggcttaccatctggccccagtgctgcaatgataccgcgagacccacgctcaccggctccagatttatcagcaataaaccagccagccggaagggccgagcgcagaagtggtcctgcaactttatccgcctccatccagtctattaattgttgccgggaagctagagtaagtagttcgccagttaatagtttgcgcaacgttgttgccattgctacaggcatcgtggtgtcacgctcgtcgtttggtatggcttcattcagctccggttcccaacgatcaaggcgagttacatgatcccccatgttgtgcaaaaaagcggttagctccttcggtcctccgatcgttgtcagaagtaagttggccgcagtgttatcactcatggttatggcagcactgcataattctcttactgtcatgccatccgtaagatgcttttctgtgactggtgagtactcaaccaagtcattctgagaatagtgtatgcggcgaccgagttgctcttgcccggcgtcaatacgggataataccgcgccacatagcagaactttaaaagtgctcatcattggaaaacgttcttcggggcgaaaactctcaaggatcttaccgctgttgagatccagttcgatgtaacccactcgtgcacccaactgatcttcagcatcttttactttcaccagcgtttctgggtgagcaaaaacaggaaggcaaaatgccgcaaaaaagggaataagggcgacacggaaatgttgaatactcatactcttcctttttcaatattattgaagcatttatcagggttattgtctcatgagcggatacatatttgaatgtatttagaaaaataaacaaataggggttccgcgcacatttccccgaaaagtgccacctgacgtcgacggatcgggagatcgatctcccgatcccctagggtcgactctcagtacaatctgctctgatgccgcatagttaagccagtatctgctccctgcttgtgtgttggaggtcgctgagtagtgcgcgagcaaaatttaagctacaacaaggcaaggcttgaccgacaattgcatgaagaatctgcttagggttaggcgttttgcgctgcttcgcgatgtacgggccagatatacgcgtt

SEQ ID NO: 591 - DNA, 8067 bp, synthetic construct
  source 1..8067: mol_type = other DNA
gacattgattattgactagttattaatagtaatcaattacggggtcattagttcatagcccatatatggagttccgcgttacataacttacggtaaatggcccgcctggctgaccgcccaacgacccccgcccattgacgtcaataatgacgtatgttcccatagtaacgccaatagggactttccattgacgtcaatgggtggagtatttacggtaaactgcccacttggcagtacatcaagtgtatcatatgccaagtacgccccctattgacgtcaatgacggtaaatggcccgcctggcattatgcccagtacatgaccttatgggactttcctacttggcagtacatctacgtattagtcatcgctattaccatggtgatgcggttttggcagtacatcaatgggcgtggatagcggtttgactcacggggatttccaagtctccaccccattgacgtcaatgggagtttgttttggcaccaaaatcaacgggactttccaaaatgtcgtaacaactccgccccattgacgcaaatgggcggtaggcgtgtacggtgggaggtctatataagcagagctggtttagtgaaccgtcagatccgctagagatccgcggccgctaatacgactcactatagggagagccgccaccatgaaacggacagccgacggaagcgagttcgagtcaccaaagaagaagcggaaagtcaccagcgacgaggaggtgctggaagtcttccgcaacacactgaataagaatagcgagattttctcctccatcaagaagctcgagaagctctttaagaactttgacgagtacagctccgccgggattttcgtgaagaacgggccggcgatcagcaccatctccaaggacatctttggcgagtggaacgtcatcagggacaagtggaacgccgagtacgacgacatccacctgaagaagaaggcggtggtgaccgagaagtatgaggacgatcgcaggaagtccttcaaaaaaatcggctccttcagcctcgaacagctccaggagtatgccgatgcggatctgtccgtcgtcgagaagctgaaggaaatcatcattcagaaggtcgacgagatctataaagtgtacgggtccagcgagaagctgttcgacgccgactttgtgctcgagaagtccctcaaaaagaatgacgccgtggtggccattatgaaagacctgctcgactccgtgaagtccttcgaaaattacattaaagcgttctttggggaggggaaggaaactaacagggatgagtccttctatggcgactttgtcctcgcgtacgacatcctgctgaaggtcgaccacatttacgacgcgatccgcaactacgtgacacagaagccgtactccaaagacaagttcaagctgtacttccagaacccgcaatttatggggggctgggacaaggataaagagacagactaccgcgcgacaattctccgctatggctccaaatactatctggccatcatggacaagaagtacgcgaagtgcctgcagaagatcgacaaagacgacgtcaatggcaactatgaaaagatcaactacaagctgctgccgggcccgaacaagatgctcccgaaggtgttcttcagcaagaagtggatggcctactacaatccaagcgaggatattcagaaaatctataaaaacgggaccttcaagaagggggacatgtttaacctcaacgactgccacaagctcattgatttcttcaaggatagcatttcccgctacccgaaatggtccaatgcgtacgattttaacttctccgagacagaaaagtacaaagacatcgcgggcttttacagggaggtggaggagcaagggtataaagtttcttttgaatccgcgagcaagaaggaagtcgacaagctcgtcgaggagggcaagctctacatgttccaaatttataacaaggacttttccgacaagagccatgggaccccaaacctccacaccatgtacttcaaactgctctttgacgagaacaaccacgggcaaatcaggctgagcggcggcgccgaattattcatgcgcagggcctccctcaagaaggaagagctggtcgtccatccagccaattccccgatcgcgaacaagaacccggacaatccgaaaaagaccaccaccctgtcctacgacgtctacaaggacaaacgcttcagcgaagaccagtacgaattacacatcccaattgcgattaataagtgcccaaagaatatcttcaaaattaatacagaggtcagggtgctgctcaaacacgacgacaatccgtatgtcatcggcattgacaggggcgagcgcaatctgctctatatcgtggtcgtggatgggaagggcaatattgtggagcagtactccctgaacgagattatcaacaacttcaatgggattaggattaagaccgactatcacagcctgctcgacaagaaagaaaaagagaggtttgaggcccgccaaaactggacctccattgagaatatcaaagaattaaaggccggctatatttcccaagtcgtccacaagatctgcgagctggtggagaaatatgacgccgtgattgcgctcgaagacttaaattctgggttcaagaactcccgcgtgaaggtggaaaaacaggtgtatcagaaattcgagaaaatgctgatcgacaaactcaattatatggtggataagaagtccaacccgtgtgccacagggggcgcgctgaagggctatcagatcaccaacaagttcgagagcttcaagagcatgagcacccagaacgggtttattttctacatcccggcgtggctcacctccaagattgacccgagcaccggcttcgtgaacctcctgaagacaaagtatacctccattgccgacagcaagaagtttatctcctccttcgaccgcattatgtatgtgccggaggaggacctcttcgagttcgccctcgactacaaaaacttcagccgcacagatgcggattacatcaagaagtggaagctgtactcctacgggaacaggatccgcatcttcaggaatccaaaaaaaaataacgtctttgactgggaggaagtgtgcctgacatccgcctacaaggaactgttcaataaatacggcatcaattaccagcagggcgacattcgcgccctcctctgtgagcagtccgacaaagcgttttactccagcttcatggccctcatgtccctgatgctccaaatgaggaatagcatcacagggcgcaccgacgtcgacttcctcatcagcccggtgaagaactccgacgggatcttttacgactcccgcaactatgaggcgcaagagaatgcgatcctcccgaagaacgccgatgcgaacggggcctataatatcgccaggaaagtgctctgggccatcgggcagttcaaaaaggcggaggatgagaagctcgacaaggtgaaaattgccatttccaacaaggagtggctggagtacgcgcagacctccgtgaagcacggctcctctggcagctccggctctagcggctcctctggcagctccggctccaagctggagaagtttacaaactgttacagcctctccaaaaccctcaggtttaaagcgatcccggtgggcaagacccaggagaacatcgacaacaagaggctcctggtggaagacgagaagcgcgccgaagactacaagggcgtgaagaagctgctcgataggtactacctcagctttattaacgacgtgctgcacagcatcaaactcaagaatctcaacaactacatctccctcttccgcaaaaagacccgcaccgagaaggagaacaaggagctggagaacctggagatcaacctccgcaaggaaatcgccaaagcgttcaagggcaatgaagggtacaagagcctcttcaagaaagacatcatcgaaactatcctcccagagtttctcgatgacaaggacgagatcgcgctggtgaactcctttaacgggttcacaaccgcgtttaccggcttctttgataacagggaaaatatgttctccgaggaggccaagtccaccagcatcgccttcaggtgtatcaacgagaacctcacccgctacatttccaatatggacattttcgagaaggtggatgcgatcttcgataagcacgaggtgcaggagatcaaagagaagattctcaattccgattatgacgtcgaggatttcttcgaaggggagttctttaattttgtgctcacacaagagggcattgacgtgtacaacgcgattatcgggggcttcgtcacagagtccggggagaagattaaggggctgaatgagtacatcaatctgtacaatcagaagaccaagcagaaactgccgaaattcaagccgctctacaagcaagtcctgtccgatagggaaagcctctccttctacggcgagggctattctggcggctcaaaaagaaccgccgacggcagcgaattcgagcccaagaagaagaggaaagtcggaagcggagctactaacttcagcctgctgaagcaggctggagacgtggaggagaaccctggacctatggtgagcaagggcgaggagctgttcaccggggtggtgcccatcctggtcgagctggacggcgacgtaaacggccacaagttcagcgtgtccggcgagggcgagggcgatgccacctacggcaagctgaccctgaagttcatctgcaccaccggcaagctgcccgtgccctggcccaccctcgtgaccaccctgacctatggagtgcagtgcttcagccgctaccccgaccacatgaagcagcacgacttcttcaagtccgccatgcccgaaggctacgtccaggagcgcaccatcttcttcaaggacgacggcaactacaagacccgcgccgaggtgaagttcgagggcgacaccctggtgaaccgcatcgagctgaagggcatcgacttcaaggaggacggcaacatcctggggcacaagctggagtacaactacaacagccacaacgtctatatcatggccgacaagcagaagaacggcatcaaggtgaacttcaagatccgccacaacatcgaggacggcagcgtgcagctcgccgaccactaccagcagaacacccccatcggcgacggccccgtgctgctgcccgacaaccactacctgagcacccagtccgccctgagcaaagaccccaacgagaagcgcgatcacatggtcctgctggagttcgtgaccgccgccgggatcactctcggcatggacgagctgtacaagtctggtggttctcccaagaagaagaggaaagtctaaccggtcatcatcaccatcaccattgagtttaaacccgctgatcagcctcgactgtgccttctagttgccagccatctgttgtttgcccctcccccgtgccttccttgaccctggaaggtgccactcccactgtcctttcctaataaaatgaggaaattgcatcgcattgtctgagtaggtgtcattctattctggggggtggggtggggcaggacagcaagggggaggattgggaagacaatagcaggcatgctggggatgcggtgggctctatggcttctgaggcggaaagaaccagctggggctcgataccgtcgacctctagctagagcttggcgtaatcatggtcatagctgtttcctgtgtgaaattgttatccgctcacaattccacacaacatacgagccggaagcataaagtgtaaagcctagggtgcctaatgagtgagctaactcacattaattgcgttgcgctcactgcccgctttccagtcgggaaacctgtcgtgccagctgcattaatgaatcggccaacgcgcggggagaggcggtttgcgtattgggcgctcttccgcttcctcgctcactgactcgctgcgctcggtcgttcggctgcggcgagcggtatcagctcactcaaaggcggtaatacggttatccacagaatcaggggataacgcaggaaagaacatgtgagcaaaaggccagcaaaaggccaggaaccgtaaaaaggccgcgttgctggcgtttttccataggctccgcccccctgacgagcatcacaaaaatcgacgctcaagtcagaggtggcgaaacccgacaggactataaagataccaggcgtttccccctggaagctccctcgtgcgctctcctgttccgaccctgccgcttaccggatacctgtccgcctttctcccttcgggaagcgtggcgctttctcatagctcacgctgtaggtatctcagttcggtgtaggtcgttcgctccaagctgggctgtgtgcacgaaccccccgttcagcccgaccgctgcgccttatccggtaactatcgtcttgagtccaacccggtaagacacgacttatcgccactggcagcagccactggtaacaggattagcagagcgaggtatgtaggcggtgctacagagttcttgaagtggtggcctaactacggctacactagaagaacagtatttggtatctgcgctctgctgaagccagttaccttcggaaaaagagttggtagctcttgatccggcaaacaaaccaccgctggtagcggtggtttttttgtttgcaagcagcagattacgcgcagaaaaaaaggatctcaagaagatcctttgatcttttctacggggtctgacactcagtggaacgaaaactcacgttaagggattttggtcatgagattatcaaaaaggatcttcacctagatccttttaaattaaaaatgaagttttaaatcaatctaaagtatatatgagtaaacttggtctgacagttaccaatgcttaatcagtgaggcacctatctcagcgatctgtctatttcgttcatccatagttgcctgactccccgtcgtgtagataactacgatacgggagggcttaccatctggccccagtgctgcaatgataccgcgagacccacgctcaccggctccagatttatcagcaataaaccagccagccggaagggccgagcgcagaagtggtcctgcaactttatccgcctccatccagtctattaattgttgccgggaagctagagtaagtagttcgccagttaatagtttgcgcaacgttgttgccattgctacaggcatcgtggtgtcacgctcgtcgtttggtatggcttcattcagctccggttcccaacgatcaaggcgagttacatgatcccccatgttgtgcaaaaaagcggttagctccttcggtcctccgatcgttgtcagaagtaagttggccgcagtgttatcactcatggttatggcagcactgcataattctcttactgtcatgccatccgtaagatgcttttctgtgactggtgagtactcaaccaagtcattctgagaatagtgtatgcggcgaccgagttgctcttgcccggcgtcaatacgggataataccgcgccacatagcagaactttaaaagtgctcatcattggaaaacgttcttcggggcgaaaactctcaaggatcttaccgctgttgagatccagttcgatgtaacccactcgtgcacccaactgatcttcagcatcttttactttcaccagcgtttctgggtgagcaaaaacaggaaggcaaaatgccgcaaaaaagggaataagggcgacacggaaatgttgaatactcatactcttcctttttcaatattattgaagcatttatcagggttattgtctcatgagcggatacatatttgaatgtatttagaaaaataaacaaataggggttccgcgcacatttccccgaaaagtgccacctgacgtcgacggatcgggagatcgatctcccgatcccctagggtcgactctcagtacaatctgctctgatgccgcatagttaagccagtatctgctccctgcttgtgtgttggaggtcgctgagtagtgcgcgagcaaaatttaagctacaacaaggcaaggcttgaccgacaattgcatgaagaatctgcttagggttaggcgttttgcgctgcttcgcgatgtacgggccagatatacgcgtt

SEQ ID NO: 592 - DNA, 8067 bp, synthetic construct
  source 1..8067: mol_type = other DNA
gacattgattattgactagttattaatagtaatcaattacggggtcattagttcatagcccatatatggagttccgcgttacataacttacggtaaatggcccgcctggctgaccgcccaacgacccccgcccattgacgtcaataatgacgtatgttcccatagtaacgccaatagggactttccattgacgtcaatgggtggagtatttacggtaaactgcccacttggcagtacatcaagtgtatcatatgccaagtacgccccctattgacgtcaatgacggtaaatggcccgcctggcattatgcccagtacatgaccttatgggactttcctacttggcagtacatctacgtattagtcatcgctattaccatggtgatgcggttttggcagtacatcaatgggcgtggatagcggtttgactcacggggatttccaagtctccaccccattgacgtcaatgggagtttgttttggcaccaaaatcaacgggactttccaaaatgtcgtaacaactccgccccattgacgcaaatgggcggtaggcgtgtacggtgggaggtctatataagcagagctggtttagtgaaccgtcagatccgctagagatccgcggccgctaatacgactcactatagggagagccgccaccatgaaacggacagccgacggaagcgagttcgagtcaccaaagaagaagcggaaagtcgacgaggaggtgctggaagtcttccgcaacacactgaataagaatagcgagattttctcctccatcaagaagctcgagaagctctttaagaactttgacgagtacagctccgccgggattttcgtgaagaacgggccggcgatcagcaccatctccaaggacatctttggcgagtggaacgtcatcagggacaagtggaacgccgagtacgacgacatccacctgaagaagaaggcggtggtgaccgagaagtatgaggacgatcgcaggaagtccttcaaaaaaatcggctccttcagcctcgaacagctccaggagtatgccgatgcggatctgtccgtcgtcgagaagctgaaggaaatcatcattcagaaggtcgacgagatctataaagtgtacgggtccagcgagaagctgttcgacgccgactttgtgctcgagaagtccctcaaaaagaatgacgccgtggtggccattatgaaagacctgctcgactccgtgaagtccttcgaaaattacattaaagcgttctttggggaggggaaggaaactaacagggatgagtccttctatggcgactttgtcctcgcgtacgacatcctgctgaaggtcgaccacatttacgacgcgatccgcaactacgtgacacagaagccgtactccaaagacaagttcaagctgtacttccagaacccgcaatttatggggggctgggacaaggataaagagacagactaccgcgcgacaattctccgctatggctccaaatactatctggccatcatggacaagaagtacgcgaagtgcctgcagaagatcgacaaagacgacgtcaatggcaactatgaaaagatcaactacaagctgctgccgggcccgaacaagatgctcccgaaggtgttcttcagcaagaagtggatggcctactacaatccaagcgaggatattcagaaaatctataaaaacgggaccttcaagaagggggacatgtttaacctcaacgactgccacaagctcattgatttcttcaaggatagcatttcccgctacccgaaatggtccaatgcgtacgattttaacttctccgagacagaaaagtacaaagacatcgcgggcttttacagggaggtggaggagcaagggtataaagtttcttttgaatccgcgagcaagaaggaagtcgacaagctcgtcgaggagggcaagctctacatgttccaaatttataacaaggacttttccgacaagagccatgggaccccaaacctccacaccatgtacttcaaactgctctttgacgagaacaaccacgggcaaatcaggctgagcggcggcgccgaattattcatgcgcagggcctccctcaagaaggaagagctggtcgtccatccagccaattccccgatcgcgaacaagaacccggacaatccgaaaaagaccaccaccctgtcctacgacgtctacaaggacaaacgcttcagcgaagaccagtacgaattacacatcccaattgcgattaataagtgcccaaagaatatcttcaaaattaatacagaggtcagggtgctgctcaaacacgacgacaatccgtatgtcatcggcattgacaggggcgagcgcaatctgctctatatcgtggtcgtggatgggaagggcaatattgtggagcagtactccctgaacgagattatcaacaacttcaatgggattaggattaagaccgactatcacagcctgctcgacaagaaagaaaaagagaggtttgaggcccgccaaaactggacctccattgagaatatcaaagaattaaaggccggctatatttcccaagtcgtccacaagatctgcgagctggtggagaaatatgacgccgtgattgcgctcgaagacttaaattctgggttcaagaactcccgcgtgaaggtggaaaaacaggtgtatcagaaattcgagaaaatgctgatcgacaaactcaattatatggtggataagaagtccaacccgtgtgccacagggggcgcgctgaagggctatcagatcaccaacaagttcgagagcttcaagagcatgagcacccagaacgggtttattttctacatcccggcgtggctcacctccaagattgacccgagcaccggcttcgtgaacctcctgaagacaaagtatacctccattgccgacagcaagaagtttatctcctccttcgaccgcattatgtatgtgccggaggaggacctcttcgagttcgccctcgactacaaaaacttcagccgcacagatgcggattacatcaagaagtggaagctgtactcctacgggaacaggatccgcatcttcaggaatccaaaaaaaaataacgtctttgactgggaggaagtgtgcctgacatccgcctacaaggaactgttcaataaatacggcatcaattaccagcagggcgacattcgcgccctcctctgtgagcagtccgacaaagcgttttactccagcttcatggccctcatgtccctgatgctccaaatgaggaatagcatcacagggcgcaccgacgtcgacttcctcatcagcccggtgaagaactccgacgggatcttttacgactcccgcaactatgaggcgcaagagaatgcgatcctcccgaagaacgccgatgcgaacggggcctataatatcgccaggaaagtgctctgggccatcgggcagttcaaaaaggcggaggatgagaagctcgacaaggtgaaaattgccatttccaacaaggagtggctggagtacgcgcagacctccgtgaagcacggctcctctggcagctccggctctagcggctcctctggcagctccggctccaagctggagaagtttacaaactgttacagcctctccaaaaccctcaggtttaaagcgatcccggtgggcaagacccaggagaacatcgacaacaagaggctcctggtggaagacgagaagcgcgccgaagactacaagggcgtgaagaagctgctcgataggtactacctcagctttattaacgacgtgctgcacagcatcaaactcaagaatctcaacaactacatctccctcttccgcaaaaagacccgcaccgagaaggagaacaaggagctggagaacctggagatcaacctccgcaaggaaatcgccaaagcgttcaagggcaatgaagggtacaagagcctcttcaagaaagacatcatcgaaactatcctcccagagtttctcgatgacaaggacgagatcgcgctggtgaactcctttaacgggttcacaaccgcgtttaccggcttctttgataacagggaaaatatgttctccgaggaggccaagtccaccagcatcgccttcaggtgtatcaacgagaacctcacccgctacatttccaatatggacattttcgagaaggtggatgcgatcttcgataagcacgaggtgcaggagatcaaagagaagattctcaattccgattatgacgtcgaggatttcttcgaaggggagttctttaattttgtgctcacacaagagggcattgacgtgtacaacgcgattatcgggggcttcgtcacagagtccggggagaagattaaggggctgaatgagtacatcaatctgtacaatcagaagaccaagcagaaactgccgaaattcaagccgctctacaagcaagtcctgtccgatagggaaagcctctccttctacggcgagggctataccagctctggcggctcaaaaagaaccgccgacggcagcgaattcgagcccaagaagaagaggaaagtcggaagcggagctactaacttcagcctgctgaagcaggctggagacgtggaggagaaccctggacctatggtgagcaagggcgaggagctgttcaccggggtggtgcccatcctggtcgagctggacggcgacgtaaacggccacaagttcagcgtgtccggcgagggcgagggcgatgccacctacggcaagctgaccctgaagttcatctgcaccaccggcaagctgcccgtgccctggcccaccctcgtgaccaccctgacctatggagtgcagtgcttcagccgctaccccgaccacatgaagcagcacgacttcttcaagtccgccatgcccgaaggctacgtccaggagcgcaccatcttcttcaaggacgacggcaactacaagacccgcgccgaggtgaagttcgagggcgacaccctggtgaaccgcatcgagctgaagggcatcgacttcaaggaggacggcaacatcctggggcacaagctggagtacaactacaacagccacaacgtctatatcatggccgacaagcagaagaacggcatcaaggtgaacttcaagatccgccacaacatcgaggacggcagcgtgcagctcgccgaccactaccagcagaacacccccatcggcgacggccccgtgctgctgcccgacaaccactacctgagcacccagtccgccctgagcaaagaccccaacgagaagcgcgatcacatggtcctgctggagttcgtgaccgccgccgggatcactctcggcatggacgagctgtacaagtctggtggttctcccaagaagaagaggaaagtctaaccggtcatcatcaccatcaccattgagtttaaacccgctgatcagcctcgactgtgccttctagttgccagccatctgttgtttgcccctcccccgtgccttccttgaccctggaaggtgccactcccactgtcctttcctaataaaatgaggaaattgcatcgcattgtctgagtaggtgtcattctattctggggggtggggtggggcaggacagcaagggggaggattgggaagacaatagcaggcatgctggggatgcggtgggctctatggcttctgaggcggaaagaaccagctggggctcgataccgtcgacctctagctagagcttggcgtaatcatggtcatagctgtttcctgtgtgaaattgttatccgctcacaattccacacaacatacgagccggaagcataaagtgtaaagcctagggtgcctaatgagtgagctaactcacattaattgcgttgcgctcactgcccgctttccagtcgggaaacctgtcgtgccagctgcattaatgaatcggccaacgcgcggggagaggcggtttgcgtattgggcgctcttccgcttcctcgctcactgactcgctgcgctcggtcgttcggctgcggcgagcggtatcagctcactcaaaggcggtaatacggttatccacagaatcaggggataacgcaggaaagaacatgtgagcaaaaggccagcaaaaggccaggaaccgtaaaaaggccgcgttgctggcgtttttccataggctccgcccccctgacgagcatcacaaaaatcgacgctcaagtcagaggtggcgaaacccgacaggactataaagataccaggcgtttccccctggaagctccctcgtgcgctctcctgttccgaccctgccgcttaccggatacctgtccgcctttctcccttcgggaagcgtggcgctttctcatagctcacgctgtaggtatctcagttcggtgtaggtcgttcgctccaagctgggctgtgtgcacgaaccccccgttcagcccgaccgctgcgccttatccggtaactatcgtcttgagtccaacccggtaagacacgacttatcgccactggcagcagccactggtaacaggattagcagagcgaggtatgtaggcggtgctacagagttcttgaagtggtggcctaactacggctacactagaagaacagtatttggtatctgcgctctgctgaagccagttaccttcggaaaaagagttggtagctcttgatccggcaaacaaaccaccgctggtagcggtggtttttttgtttgcaagcagcagattacgcgcagaaaaaaaggatctcaagaagatcctttgatcttttctacggggtctgacactcagtggaacgaaaactcacgttaagggattttggtcatgagattatcaaaaaggatcttcacctagatccttttaaattaaaaatgaagttttaaatcaatctaaagtatatatgagtaaacttggtctgacagttaccaatgcttaatcagtgaggcacctatctcagcgatctgtctatttcgttcatccatagttgcctgactccccgtcgtgtagataactacgatacgggagggcttaccatctggccccagtgctgcaatgataccgcgagacccacgctcaccggctccagatttatcagcaataaaccagccagccggaagggccgagcgcagaagtggtcctgcaactttatccgcctccatccagtctattaattgttgccgggaagctagagtaagtagttcgccagttaatagtttgcgcaacgttgttgccattgctacaggcatcgtggtgtcacgctcgtcgtttggtatggcttcattcagctccggttcccaacgatcaaggcgagttacatgatcccccatgttgtgcaaaaaagcggttagctccttcggtcctccgatcgttgtcagaagtaagttggccgcagtgttatcactcatggttatggcagcactgcataattctcttactgtcatgccatccgtaagatgcttttctgtgactggtgagtactcaaccaagtcattctgagaatagtgtatgcggcgaccgagttgctcttgcccggcgtcaatacgggataataccgcgccacatagcagaactttaaaagtgctcatcattggaaaacgttcttcggggcgaaaactctcaaggatcttaccgctgttgagatccagttcgatgtaacccactcgtgcacccaactgatcttcagcatcttttactttcaccagcgtttctgggtgagcaaaaacaggaaggcaaaatgccgcaaaaaagggaataagggcgacacggaaatgttgaatactcatactcttcctttttcaatattattgaagcatttatcagggttattgtctcatgagcggatacatatttgaatgtatttagaaaaataaacaaataggggttccgcgcacatttccccgaaaagtgccacctgacgtcgacggatcgggagatcgatctcccgatcccctagggtcgactctcagtacaatctgctctgatgccgcatagttaagccagtatctgctccctgcttgtgtgttggaggtcgctgagtagtgcgcgagcaaaatttaagctacaacaaggcaaggcttgaccgacaattgcatgaagaatctgcttagggttaggcgttttgcgctgcttcgcgatgtacgggccagatatacgcgtt

SEQ ID NO: 593 - DNA, 8067 bp, synthetic construct
  source 1..8067: mol_type = other DNA
gacattgattattgactagttattaatagtaatcaattacggggtcattagttcatagcccatatatggagttccgcgttacataacttacggtaaatggcccgcctggctgaccgcccaacgacccccgcccattgacgtcaataatgacgtatgttcccatagtaacgccaatagggactttccattgacgtcaatgggtggagtatttacggtaaactgcccacttggcagtacatcaagtgtatcatatgccaagtacgccccctattgacgtcaatgacggtaaatggcccgcctggcattatgcccagtacatgaccttatgggactttcctacttggcagtacatctacgtattagtcatcgctattaccatggtgatgcggttttggcagtacatcaatgggcgtggatagcggtttgactcacggggatttccaagtctccaccccattgacgtcaatgggagtttgttttggcaccaaaatcaacgggactttccaaaatgtcgtaacaactccgccccattgacgcaaatgggcggtaggcgtgtacggtgggaggtctatataagcagagctggtttagtgaaccgtcagatccgctagagatccgcggccgctaatacgactcactatagggagagccgccaccatgaaacggacagccgacggaagcgagttcgagtcaccaaagaagaagcggaaagtcaactccgacgggatcttttacgactcccgcaactatgaggcgcaagagaatgcgatcctcccgaagaacgccgatgcgaacggggcctataatatcgccaggaaagtgctctgggccatcgggcagttcaaaaaggcggaggatgagaagctcgacaaggtgaaaattgccatttccaacaaggagtggctggagtacgcgcagacctccgtgaagcacggctcctctggcagctccggctctagcggctcctctggcagctccggctccaagctggagaagtttacaaactgttacagcctctccaaaaccctcaggtttaaagcgatcccggtgggcaagacccaggagaacatcgacaacaagaggctcctggtggaagacgagaagcgcgccgaagactacaagggcgtgaagaagctgctcgataggtactacctcagctttattaacgacgtgctgcacagcatcaaactcaagaatctcaacaactacatctccctcttccgcaaaaagacccgcaccgagaaggagaacaaggagctggagaacctggagatcaacctccgcaaggaaatcgccaaagcgttcaagggcaatgaagggtacaagagcctcttcaagaaagacatcatcgaaactatcctcccagagtttctcgatgacaaggacgagatcgcgctggtgaactcctttaacgggttcacaaccgcgtttaccggcttctttgataacagggaaaatatgttctccgaggaggccaagtccaccagcatcgccttcaggtgtatcaacgagaacctcacccgctacatttccaatatggacattttcgagaaggtggatgcgatcttcgataagcacgaggtgcaggagatcaaagagaagattctcaattccgattatgacgtcgaggatttcttcgaaggggagttctttaattttgtgctcacacaagagggcattgacgtgtacaacgcgattatcgggggcttcgtcacagagtccggggagaagattaaggggctgaatgagtacatcaatctgtacaatcagaagaccaagcagaaactgccgaaattcaagccgctctacaagcaagtcctgtccgatagggaaagcctctccttctacggcgagggctataccagcgacgaggaggtgctggaagtcttccgcaacacactgaataagaatagcgagattttctcctccatcaagaagctcgagaagctctttaagaactttgacgagtacagctccgccgggattttcgtgaagaacgggccggcgatcagcaccatctccaaggacatctttggcgagtggaacgtcatcagggacaagtggaacgccgagtacgacgacatccacctgaagaagaaggcggtggtgaccgagaagtatgaggacgatcgcaggaagtccttcaaaaaaatcggctccttcagcctcgaacagctccaggagtatgccgatgcggatctgtccgtcgtcgagaagctgaaggaaatcatcattcagaaggtcgacgagatctataaagtgtacgggtccagcgagaagctgttcgacgccgactttgtgctcgagaagtccctcaaaaagaatgacgccgtggtggccattatgaaagacctgctcgactccgtgaagtccttcgaaaattacattaaagcgttctttggggaggggaaggaaactaacagggatgagtccttctatggcgactttgtcctcgcgtacgacatcctgctgaaggtcgaccacatttacgacgcgatccgcaactacgtgacacagaagccgtactccaaagacaagttcaagctgtacttccagaacccgcaatttatggggggctgggacaaggataaagagacagactaccgcgcgacaattctccgctatggctccaaatactatctggccatcatggacaagaagtacgcgaagtgcctgcagaagatcgacaaagacgacgtcaatggcaactatgaaaagatcaactacaagctgctgccgggcccgaacaagatgctcccgaaggtgttcttcagcaagaagtggatggcctactacaatccaagcgaggatattcagaaaatctataaaaacgggaccttcaagaagggggacatgtttaacctcaacgactgccacaagctcattgatttcttcaaggatagcatttcccgctacccgaaatggtccaatgcgtacgattttaacttctccgagacagaaaagtacaaagacatcgcgggcttttacagggaggtggaggagcaagggtataaagtttcttttgaatccgcgagcaagaaggaagtcgacaagctcgtcgaggagggcaagctctacatgttccaaatttataacaaggacttttccgacaagagccatgggaccccaaacctccacaccatgtacttcaaactgctctttgacgagaacaaccacgggcaaatcaggctgagcggcggcgccgaattattcatgcgcagggcctccctcaagaaggaagagctggtcgtccatccagccaattccccgatcgcgaacaagaacccggacaatccgaaaaagaccaccaccctgtcctacgacgtctacaaggacaaacgcttcagcgaagaccagtacgaattacacatcccaattgcgattaataagtgcccaaagaatatcttcaaaattaatacagaggtcagggtgctgctcaaacacgacgacaatccgtatgtcatcggcattgacaggggcgagcgcaatctgctctatatcgtggtcgtggatgggaagggcaatattgtggagcagtactccctgaacgagattatcaacaacttcaatgggattaggattaagaccgactatcacagcctgctcgacaagaaagaaaaagagaggtttgaggcccgccaaaactggacctccattgagaatatcaaagaattaaaggccggctatatttcccaagtcgtccacaagatctgcgagctggtggagaaatatgacgccgtgattgcgctcgaagacttaaattctgggttcaagaactcccgcgtgaaggtggaaaaacaggtgtatcagaaattcgagaaaatgctgatcgacaaactcaattatatggtggataagaagtccaacccgtgtgccacagggggcgcgctgaagggctatcagatcaccaacaagttcgagagcttcaagagcatgagcacccagaacgggtttattttctacatcccggcgtggctcacctccaagattgacccgagcaccggcttcgtgaacctcctgaagacaaagtatacctccattgccgacagcaagaagtttatctcctccttcgaccgcattatgtatgtgccggaggaggacctcttcgagttcgccctcgactacaaaaacttcagccgcacagatgcggattacatcaagaagtggaagctgtactcctacgggaacaggatccgcatcttcaggaatccaaaaaaaaataacgtctttgactgggaggaagtgtgcctgacatccgcctacaaggaactgttcaataaatacggcatcaattaccagcagggcgacattcgcgccctcctctgtgagcagtccgacaaagcgttttactccagcttcatggccctcatgtccctgatgctccaaatgaggaatagcatcacagggcgcaccgacgtcgacttcctcatcagcccggtgaagtctggcggctcaaaaagaaccgccgacggcagcgaattcgagcccaagaagaagaggaaagtcggaagcggagctactaacttcagcctgctgaagcaggctggagacgtggaggagaaccctggacctatggtgagcaagggcgaggagctgttcaccggggtggtgcccatcctggtcgagctggacggcgacgtaaacggccacaagttcagcgtgtccggcgagggcgagggcgatgccacctacggcaagctgaccctgaagttcatctgcaccaccggcaagctgcccgtgccctggcccaccctcgtgaccaccctgacctatggagtgcagtgcttcagccgctaccccgaccacatgaagcagcacgacttcttcaagtccgccatgcccgaaggctacgtccaggagcgcaccatcttcttcaaggacgacggcaactacaagacccgcgccgaggtgaagttcgagggcgacaccctggtgaaccgcatcgagctgaagggcatcgacttcaaggaggacggcaacatcctggggcacaagctggagtacaactacaacagccacaacgtctatatcatggccgacaagcagaagaacggcatcaaggtgaacttcaagatccgccacaacatcgaggacggcagcgtgcagctcgccgaccactaccagcagaacacccccatcggcgacggccccgtgctgctgcccgacaaccactacctgagcacccagtccgccctgagcaaagaccccaacgagaagcgcgatcacatggtcctgctggagttcgtgaccgccgccgggatcactctcggcatggacgagctgtacaagtctggtggttctcccaagaagaagaggaaagtctaaccggtcatcatcaccatcaccattgagtttaaacccgctgatcagcctcgactgtgccttctagttgccagccatctgttgtttgcccctcccccgtgccttccttgaccctggaaggtgccactcccactgtcctttcctaataaaatgaggaaattgcatcgcattgtctgagtaggtgtcattctattctggggggtggggtggggcaggacagcaagggggaggattgggaagacaatagcaggcatgctggggatgcggtgggctctatggcttctgaggcggaaagaaccagctggggctcgataccgtcgacctctagctagagcttggcgtaatcatggtcatagctgtttcctgtgtgaaattgttatccgctcacaattccacacaacatacgagccggaagcataaagtgtaaagcctagggtgcctaatgagtgagctaactcacattaattgcgttgcgctcactgcccgctttccagtcgggaaacctgtcgtgccagctgcattaatgaatcggccaacgcgcggggagaggcggtttgcgtattgggcgctcttccgcttcctcgctcactgactcgctgcgctcggtcgttcggctgcggcgagcggtatcagctcactcaaaggcggtaatacggttatccacagaatcaggggataacgcaggaaagaacatgtgagcaaaaggccagcaaaaggccaggaaccgtaaaaaggccgcgttgctggcgtttttccataggctccgcccccctgacgagcatcacaaaaatcgacgctcaagtcagaggtggcgaaacccgacaggactataaagataccaggcgtttccccctggaagctccctcgtgcgctctcctgttccgaccctgccgcttaccggatacctgtccgcctttctcccttcgggaagcgtggcgctttctcatagctcacgctgtaggtatctcagttcggtgtaggtcgttcgctccaagctgggctgtgtgcacgaaccccccgttcagcccgaccgctgcgccttatccggtaactatcgtcttgagtccaacccggtaagacacgacttatcgccactggcagcagccactggtaacaggattagcagagcgaggtatgtaggcggtgctacagagttcttgaagtggtggcctaactacggctacactagaagaacagtatttggtatctgcgctctgctgaagccagttaccttcggaaaaagagttggtagctcttgatccggcaaacaaaccaccgctggtagcggtggtttttttgtttgcaagcagcagattacgcgcagaaaaaaaggatctcaagaagatcctttgatcttttctacggggtctgacactcagtggaacgaaaactcacgttaagggattttggtcatgagattatcaaaaaggatcttcacctagatccttttaaattaaaaatgaagttttaaatcaatctaaagtatatatgagtaaacttggtctgacagttaccaatgcttaatcagtgaggcacctatctcagcgatctgtctatttcgttcatccatagttgcctgactccccgtcgtgtagataactacgatacgggagggcttaccatctggccccagtgctgcaatgataccgcgagacccacgctcaccggctccagatttatcagcaataaaccagccagccggaagggccgagcgcagaagtggtcctgcaactttatccgcctccatccagtctattaattgttgccgggaagctagagtaagtagttcgccagttaatagtttgcgcaacgttgttgccattgctacaggcatcgtggtgtcacgctcgtcgtttggtatggcttcattcagctccggttcccaacgatcaaggcgagttacatgatcccccatgttgtgcaaaaaagcggttagctccttcggtcctccgatcgttgtcagaagtaagttggccgcagtgttatcactcatggttatggcagcactgcataattctcttactgtcatgccatccgtaagatgcttttctgtgactggtgagtactcaaccaagtcattctgagaatagtgtatgcggcgaccgagttgctcttgcccggcgtcaatacgggataataccgcgccacatagcagaactttaaaagtgctcatcattggaaaacgttcttcggggcgaaaactctcaaggatcttaccgctgttgagatccagttcgatgtaacccactcgtgcacccaactgatcttcagcatcttttactttcaccagcgtttctgggtgagcaaaaacaggaaggcaaaatgccgcaaaaaagggaataagggcgacacggaaatgttgaatactcatactcttcctttttcaatattattgaagcatttatcagggttattgtctcatgagcggatacatatttgaatgtatttagaaaaataaacaaataggggttccgcgcacatttccccgaaaagtgccacctgacgtcgacggatcgggagatcgatctcccgatcccctagggtcgactctcagtacaatctgctctgatgccgcatagttaagccagtatctgctccctgcttgtgtgttggaggtcgctgagtagtgcgcgagcaaaatttaagctacaacaaggcaaggcttgaccgacaattgcatgaagaatctgcttagggttaggcgttttgcgctgcttcgcgatgtacgggccagatatacgcgtt

SEQ ID NO: 594 - DNA, 8067 bp, synthetic construct
  source 1..8067: mol_type = other DNA
gacattgattattgactagttattaatagtaatcaattacggggtcattagttcatagcccatatatggagttccgcgttacataacttacggtaaatggcccgcctggctgaccgcccaacgacccccgcccattgacgtcaataatgacgtatgttcccatagtaacgccaatagggactttccattgacgtcaatgggtggagtatttacggtaaactgcccacttggcagtacatcaagtgtatcatatgccaagtacgccccctattgacgtcaatgacggtaaatggcccgcctggcattatgcccagtacatgaccttatgggactttcctacttggcagtacatctacgtattagtcatcgctattaccatggtgatgcggttttggcagtacatcaatgggcgtggatagcggtttgactcacggggatttccaagtctccaccccattgacgtcaatgggagtttgttttggcaccaaaatcaacgggactttccaaaatgtcgtaacaactccgccccattgacgcaaatgggcggtaggcgtgtacggtgggaggtctatataagcagagctggtttagtgaaccgtcagatccgctagagatccgcggccgctaatacgactcactatagggagagccgccaccatgaaacggacagccgacggaagcgagttcgagtcaccaaagaagaagcggaaagtcatcttttacgactcccgcaactatgaggcgcaagagaatgcgatcctcccgaagaacgccgatgcgaacggggcctataatatcgccaggaaagtgctctgggccatcgggcagttcaaaaaggcggaggatgagaagctcgacaaggtgaaaattgccatttccaacaaggagtggctggagtacgcgcagacctccgtgaagcacggctcctctggcagctccggctctagcggctcctctggcagctccggctccaagctggagaagtttacaaactgttacagcctctccaaaaccctcaggtttaaagcgatcccggtgggcaagacccaggagaacatcgacaacaagaggctcctggtggaagacgagaagcgcgccgaagactacaagggcgtgaagaagctgctcgataggtactacctcagctttattaacgacgtgctgcacagcatcaaactcaagaatctcaacaactacatctccctcttccgcaaaaagacccgcaccgagaaggagaacaaggagctggagaacctggagatcaacctccgcaaggaaatcgccaaagcgttcaagggcaatgaagggtacaagagcctcttcaagaaagacatcatcgaaactatcctcccagagtttctcgatgacaaggacgagatcgcgctggtgaactcctttaacgggttcacaaccgcgtttaccggcttctttgataacagggaaaatatgttctccgaggaggccaagtccaccagcatcgccttcaggtgtatcaacgagaacctcacccgctacatttccaatatggacattttcgagaaggtggatgcgatcttcgataagcacgaggtgcaggagatcaaagagaagattctcaattccgattatgacgtcgaggatttcttcgaaggggagttctttaattttgtgctcacacaagagggcattgacgtgtacaacgcgattatcgggggcttcgtcacagagtccggggagaagattaaggggctgaatgagtacatcaatctgtacaatcagaagaccaagcagaaactgccgaaattcaagccgctctacaagcaagtcctgtccgatagggaaagcctctccttctacggcgagggctataccagcgacgaggaggtgctggaagtcttccgcaacacactgaataagaatagcgagattttctcctccatcaagaagctcgagaagctctttaagaactttgacgagtacagctccgccgggattttcgtgaagaacgggccggcgatcagcaccatctccaaggacatctttggcgagtggaacgtcatcagggacaagtggaacgccgagtacgacgacatccacctgaagaagaaggcggtggtgaccgagaagtatgaggacgatcgcaggaagtccttcaaaaaaatcggctccttcagcctcgaacagctccaggagtatgccgatgcggatctgtccgtcgtcgagaagctgaaggaaatcatcattcagaaggtcgacgagatctataaagtgtacgggtccagcgagaagctgttcgacgccgactttgtgctcgagaagtccctcaaaaagaatgacgccgtggtggccattatgaaagacctgctcgactccgtgaagtccttcgaaaattacattaaagcgttctttggggaggggaaggaaactaacagggatgagtccttctatggcgactttgtcctcgcgtacgacatcctgctgaaggtcgaccacatttacgacgcgatccgcaactacgtgacacagaagccgtactccaaagacaagttcaagctgtacttccagaacccgcaatttatggggggctgggacaaggataaagagacagactaccgcgcgacaattctccgctatggctccaaatactatctggccatcatggacaagaagtacgcgaagtgcctgcagaagatcgacaaagacgacgtcaatggcaactatgaaaagatcaactacaagctgctgccgggcccgaacaagatgctcccgaaggtgttcttcagcaagaagtggatggcctactacaatccaagcgaggatattcagaaaatctataaaaacgggaccttcaagaagggggacatgtttaacctcaacgactgccacaagctcattgatttcttcaaggatagcatttcccgctacccgaaatggtccaatgcgtacgattttaacttctccgagacagaaaagtacaaagacatcgcgggcttttacagggaggtggaggagcaagggtataaagtttcttttgaatccgcgagcaagaaggaagtcgacaagctcgtcgaggagggcaagctctacatgttccaaatttataacaaggacttttccgacaagagccatgggaccccaaacctccacaccatgtacttcaaactgctctttgacgagaacaaccacgggcaaatcaggctgagcggcggcgccgaattattcatgcgcagggcctccctcaagaaggaagagctggtcgtccatccagccaattccccgatcgcgaacaagaacccggacaatccgaaaaagaccaccaccctgtcctacgacgtctacaaggacaaacgcttcagcgaagaccagtacgaattacacatcccaattgcgattaataagtgcccaaagaatatcttcaaaattaatacagaggtcagggtgctgctcaaacacgacgacaatccgtatgtcatcggcattgacaggggcgagcgcaatctgctctatatcgtggtcgtggatgggaagggcaatattgtggagcagtactccctgaacgagattatcaacaacttcaatgggattaggattaagaccgactatcacagcctgctcgacaagaaagaaaaagagaggtttgaggcccgccaaaactggacctccattgagaatatcaaagaattaaaggccggctatatttcccaagtcgtccacaagatctgcgagctggtggagaaatatgacgccgtgattgcgctcgaagacttaaattctgggttcaagaactcccgcgtgaaggtggaaaaacaggtgtatcagaaattcgagaaaatgctgatcgacaaactcaattatatggtggataagaagtccaacccgtgtgccacagggggcgcgctgaagggctatcagatcaccaacaagttcgagagcttcaagagcatgagcacccagaacgggtttattttctacatcccggcgtggctcacctccaagattgacccgagcaccggcttcgtgaacctcctgaagacaaagtatacctccattgccgacagcaagaagtttatctcctccttcgaccgcattatgtatgtgccggaggaggacctcttcgagttcgccctcgactacaaaaacttcagccgcacagatgcggattacatcaagaagtggaagctgtactcctacgggaacaggatccgcatcttcaggaatccaaaaaaaaataacgtctttgactgggaggaagtgtgcctgacatccgcctacaaggaactgttcaataaatacggcatcaattaccagcagggcgacattcgcgccctcctctgtgagcagtccgacaaagcgttttactccagcttcatggccctcatgtccctgatgctccaaatgaggaatagcatcacagggcgcaccgacgtcgacttcctcatcagcccggtgaagaactccgacgggtctggcggctcaaaaagaaccgccgacggcagcgaattcgagcccaagaagaagaggaaagtcggaagcggagctactaacttcagcctgctgaagcaggctggagacgtggaggagaaccctggacctatggtgagcaagggcgaggagctgttcaccggggtggtgcccatcctggtcgagctggacggcgacgtaaacggccacaagttcagcgtgtccggcgagggcgagggcgatgccacctacggcaagctgaccctgaagttcatctgcaccaccggcaagctgcccgtgccctggcccaccctcgtgaccaccctgacctatggagtgcagtgcttcagccgctaccccgaccacatgaagcagcacgacttcttcaagtccgccatgcccgaaggctacgtccaggagcgcaccatcttcttcaaggacgacggcaactacaagacccgcgccgaggtgaagttcgagggcgacaccctggtgaaccgcatcgagctgaagggcatcgacttcaaggaggacggcaacatcctggggcacaagctggagtacaactacaacagccacaacgtctatatcatggccgacaagcagaagaacggcatcaaggtgaacttcaagatccgccacaacatcgaggacggcagcgtgcagctcgccgaccactaccagcagaacacccccatcggcgacggccccgtgctgctgcccgacaaccactacctgagcacccagtccgccctgagcaaagaccccaacgagaagcgcgatcacatggtcctgctggagttcgtgaccgccgccgggatcactctcggcatggacgagctgtacaagtctggtggttctcccaagaagaagaggaaagtctaaccggtcatcatcaccatcaccattgagtttaaacccgctgatcagcctcgactgtgccttctagttgccagccatctgttgtttgcccctcccccgtgccttccttgaccctggaaggtgccactcccactgtcctttcctaataaaatgaggaaattgcatcgcattgtctgagtaggtgtcattctattctggggggtggggtggggcaggacagcaagggggaggattgggaagacaatagcaggcatgctggggatgcggtgggctctatggcttctgaggcggaaagaaccagctggggctcgataccgtcgacctctagctagagcttggcgtaatcatggtcatagctgtttcctgtgtgaaattgttatccgctcacaattccacacaacatacgagccggaagcataaagtgtaaagcctagggtgcctaatgagtgagctaactcacattaattgcgttgcgctcactgcccgctttccagtcgggaaacctgtcgtgccagctgcattaatgaatcggccaacgcgcggggagaggcggtttgcgtattgggcgctcttccgcttcctcgctcactgactcgctgcgctcggtcgttcggctgcggcgagcggtatcagctcactcaaaggcggtaatacggttatccacagaatcaggggataacgcaggaaagaacatgtgagcaaaaggccagcaaaaggccaggaaccgtaaaaaggccgcgttgctggcgtttttccataggctccgcccccctgacgagcatcacaaaaatcgacgctcaagtcagaggtggcgaaacccgacaggactataaagataccaggcgtttccccctggaagctccctcgtgcgctctcctgttccgaccctgccgcttaccggatacctgtccgcctttctcccttcgggaagcgtggcgctttctcatagctcacgctgtaggtatctcagttcggtgtaggtcgttcgctccaagctgggctgtgtgcacgaaccccccgttcagcccgaccgctgcgccttatccggtaactatcgtcttgagtccaacccggtaagacacgacttatcgccactggcagcagccactggtaacaggattagcagagcgaggtatgtaggcggtgctacagagttcttgaagtggtggcctaactacggctacactagaagaacagtatttggtatctgcgctctgctgaagccagttaccttcggaaaaagagttggtagctcttgatccggcaaacaaaccaccgctggtagcggtggtttttttgtttgcaagcagcagattacgcgcagaaaaaaaggatctcaagaagatcctttgatcttttctacggggtctgacactcagtggaacgaaaactcacgttaagggattttggtcatgagattatcaaaaaggatcttcacctagatccttttaaattaaaaatgaagttttaaatcaatctaaagtatatatgagtaaacttggtctgacagttaccaatgcttaatcagtgaggcacctatctcagcgatctgtctatttcgttcatccatagttgcctgactccccgtcgtgtagataactacgatacgggagggcttaccatctggccccagtgctgcaatgataccgcgagacccacgctcaccggctccagatttatcagcaataaaccagccagccggaagggccgagcgcagaagtggtcctgcaactttatccgcctccatccagtctattaattgttgccgggaagctagagtaagtagttcgccagttaatagtttgcgcaacgttgttgccattgctacaggcatcgtggtgtcacgctcgtcgtttggtatggcttcattcagctccggttcccaacgatcaaggcgagttacatgatcccccatgttgtgcaaaaaagcggttagctccttcggtcctccgatcgttgtcagaagtaagttggccgcagtgttatcactcatggttatggcagcactgcataattctcttactgtcatgccatccgtaagatgcttttctgtgactggtgagtactcaaccaagtcattctgagaatagtgtatgcggcgaccgagttgctcttgcccggcgtcaatacgggataataccgcgccacatagcagaactttaaaagtgctcatcattggaaaacgttcttcggggcgaaaactctcaaggatcttaccgctgttgagatccagttcgatgtaacccactcgtgcacccaactgatcttcagcatcttttactttcaccagcgtttctgggtgagcaaaaacaggaaggcaaaatgccgcaaaaaagggaataagggcgacacggaaatgttgaatactcatactcttcctttttcaatattattgaagcatttatcagggttattgtctcatgagcggatacatatttgaatgtatttagaaaaataaacaaataggggttccgcgcacatttccccgaaaagtgccacctgacgtcgacggatcgggagatcgatctcccgatcccctagggtcgactctcagtacaatctgctctgatgccgcatagttaagccagtatctgctccctgcttgtgtgttggaggtcgctgagtagtgcgcgagcaaaatttaagctacaacaaggcaaggcttgaccgacaattgcatgaagaatctgcttagggttaggcgttttgcgctgcttcgcgatgtacgggccagatatacgcgtt

SEQ ID NO: 595 - DNA, 8067 bp, synthetic construct
  source 1..8067: mol_type = other DNA
gacattgattattgactagttattaatagtaatcaattacggggtcattagttcatagcccatatatggagttccgcgttacataacttacggtaaatggcccgcctggctgaccgcccaacgacccccgcccattgacgtcaataatgacgtatgttcccatagtaacgccaatagggactttccattgacgtcaatgggtggagtatttacggtaaactgcccacttggcagtacatcaagtgtatcatatgccaagtacgccccctattgacgtcaatgacggtaaatggcccgcctggcattatgcccagtacatgaccttatgggactttcctacttggcagtacatctacgtattagtcatcgctattaccatggtgatgcggttttggcagtacatcaatgggcgtggatagcggtttgactcacggggatttccaagtctccaccccattgacgtcaatgggagtttgttttggcaccaaaatcaacgggactttccaaaatgtcgtaacaactccgccccattgacgcaaatgggcggtaggcgtgtacggtgggaggtctatataagcagagctggtttagtgaaccgtcagatccgctagagatccgcggccgctaatacgactcactatagggagagccgccaccatgaaacggacagccgacggaagcgagttcgagtcaccaaagaagaagcggaaagtcgacgggatcttttacgactcccgcaactatgaggcgcaagagaatgcgatcctcccgaagaacgccgatgcgaacggggcctataatatcgccaggaaagtgctctgggccatcgggcagttcaaaaaggcggaggatgagaagctcgacaaggtgaaaattgccatttccaacaaggagtggctggagtacgcgcagacctccgtgaagcacggctcctctggcagctccggctctagcggctcctctggcagctccggctccaagctggagaagtttacaaactgttacagcctctccaaaaccctcaggtttaaagcgatcccggtgggcaagacccaggagaacatcgacaacaagaggctcctggtggaagacgagaagcgcgccgaagactacaagggcgtgaagaagctgctcgataggtactacctcagctttattaacgacgtgctgcacagcatcaaactcaagaatctcaacaactacatctccctcttccgcaaaaagacccgcaccgagaaggagaacaaggagctggagaacctggagatcaacctccgcaaggaaatcgccaaagcgttcaagggcaatgaagggtacaagagcctcttcaagaaagacatcatcgaaactatcctcccagagtttctcgatgacaaggacgagatcgcgctggtgaactcctttaacgggttcacaaccgcgtttaccggcttctttgataacagggaaaatatgttctccgaggaggccaagtccaccagcatcgccttcaggtgtatcaacgagaacctcacccgctacatttccaatatggacattttcgagaaggtggatgcgatcttcgataagcacgaggtgcaggagatcaaagagaagattctcaattccgattatgacgtcgaggatttcttcgaaggggagttctttaattttgtgctcacacaagagggcattgacgtgtacaacgcgattatcgggggcttcgtcacagagtccggggagaagattaaggggctgaatgagtacatcaatctgtacaatcagaagaccaagcagaaactgccgaaattcaagccgctctacaagcaagtcctgtccgatagggaaagcctctccttctacggcgagggctataccagcgacgaggaggtgctggaagtcttccgcaacacactgaataagaatagcgagattttctcctccatcaagaagctcgagaagctctttaagaactttgacgagtacagctccgccgggattttcgtgaagaacgggccggcgatcagcaccatctccaaggacatctttggcgagtggaacgtcatcagggacaagtggaacgccgagtacgacgacatccacctgaagaagaaggcggtggtgaccgagaagtatgaggacgatcgcaggaagtccttcaaaaaaatcggctccttcagcctcgaacagctccaggagtatgccgatgcggatctgtccgtcgtcgagaagctgaaggaaatcatcattcagaaggtcgacgagatctataaagtgtacgggtccagcgagaagctgttcgacgccgactttgtgctcgagaagtccctcaaaaagaatgacgccgtggtggccattatgaaagacctgctcgactccgtgaagtccttcgaaaattacattaaagcgttctttggggaggggaaggaaactaacagggatgagtccttctatggcgactttgtcctcgcgtacgacatcctgctgaaggtcgaccacatttacgacgcgatccgcaactacgtgacacagaagccgtactccaaagacaagttcaagctgtacttccagaacccgcaatttatggggggctgggacaaggataaagagacagactaccgcgcgacaattctccgctatggctccaaatactatctggccatcatggacaagaagtacgcgaagtgcctgcagaagatcgacaaagacgacgtcaatggcaactatgaaaagatcaactacaagctgctgccgggcccgaacaagatgctcccgaaggtgttcttcagcaagaagtggatggcctactacaatccaagcgaggatattcagaaaatctataaaaacgggaccttcaagaagggggacatgtttaacctcaacgactgccacaagctcattgatttcttcaaggatagcatttcccgctacccgaaatggtccaatgcgtacgattttaacttctccgagacagaaaagtacaaagacatcgcgggcttttacagggaggtggaggagcaagggtataaagtttcttttgaatccgcgagcaagaaggaagtcgacaagctcgtcgaggagggcaagctctacatgttccaaatttataacaaggacttttccgacaagagccatgggaccccaaacctccacaccatgtacttcaaactgctctttgacgagaacaaccacgggcaaatcaggctgagcggcggcgccgaattattcatgcgcagggcctccctcaagaaggaagagctggtcgtccatccagccaattccccgatcgcgaacaagaacccggacaatccgaaaaagaccaccaccctgtcctacgacgtctacaaggacaaacgcttcagcgaagaccagtacgaattacacatcccaattgcgattaataagtgcccaaagaatatcttcaaaattaatacagaggtcagggtgctgctcaaacacgacgacaatccgtatgtcatcggcattgacaggggcgagcgcaatctgctctatatcgtggtcgtggatgggaagggcaatattgtggagcagtactccctgaacgagattatcaacaacttcaatgggattaggattaagaccgactatcacagcctgctcgacaagaaagaaaaagagaggtttgaggcccgccaaaactggacctccattgagaatatcaaagaattaaaggccggctatatttcccaagtcgtccacaagatctgcgagctggtggagaaatatgacgccgtgattgcgctcgaagacttaaattctgggttcaagaactcccgcgtgaaggtggaaaaacaggtgtatcagaaattcgagaaaatgctgatcgacaaactcaattatatggtggataagaagtccaacccgtgtgccacagggggcgcgctgaagggctatcagatcaccaacaagttcgagagcttcaagagcatgagcacccagaacgggtttattttctacatcccggcgtggctcacctccaagattgacccgagcaccggcttcgtgaacctcctgaagacaaagtatacctccattgccgacagcaagaagtttatctcctccttcgaccgcattatgtatgtgccggaggaggacctcttcgagttcgccctcgactacaaaaacttcagccgcacagatgcggattacatcaagaagtggaagctgtactcctacgggaacaggatccgcatcttcaggaatccaaaaaaaaataacgtctttgactgggaggaagtgtgcctgacatccgcctacaaggaactgttcaataaatacggcatcaattaccagcagggcgacattcgcgccctcctctgtgagcagtccgacaaagcgttttactccagcttcatggccctcatgtccctgatgctccaaatgaggaatagcatcacagggcgcaccgacgtcgacttcctcatcagcccggtgaagaactcctctggcggctcaaaaagaaccgccgacggcagcgaattcgagcccaagaagaagaggaaagtcggaagcggagctactaacttcagcctgctgaagcaggctggagacgtggaggagaaccctggacctatggtgagcaagggcgaggagctgttcaccggggtggtgcccatcctggtcgagctggacggcgacgtaaacggccacaagttcagcgtgtccggcgagggcgagggcgatgccacctacggcaagctgaccctgaagttcatctgcaccaccggcaagctgcccgtgccctggcccaccctcgtgaccaccctgacctatggagtgcagtgcttcagccgctaccccgaccacatgaagcagcacgacttcttcaagtccgccatgcccgaaggctacgtccaggagcgcaccatcttcttcaaggacgacggcaactacaagacccgcgccgaggtgaagttcgagggcgacaccctggtgaaccgcatcgagctgaagggcatcgacttcaaggaggacggcaacatcctggggcacaagctggagtacaactacaacagccacaacgtctatatcatggccgacaagcagaagaacggcatcaaggtgaacttcaagatccgccacaacatcgaggacggcagcgtgcagctcgccgaccactaccagcagaacacccccatcggcgacggccccgtgctgctgcccgacaaccactacctgagcacccagtccgccctgagcaaagaccccaacgagaagcgcgatcacatggtcctgctggagttcgtgaccgccgccgggatcactctcggcatggacgagctgtacaagtctggtggttctcccaagaagaagaggaaagtctaaccggtcatcatcaccatcaccattgagtttaaacccgctgatcagcctcgactgtgccttctagttgccagccatctgttgtttgcccctcccccgtgccttccttgaccctggaaggtgccactcccactgtcctttcctaataaaatgaggaaattgcatcgcattgtctgagtaggtgtcattctattctggggggtggggtggggcaggacagcaagggggaggattgggaagacaatagcaggcatgctggggatgcggtgggctctatggcttctgaggcggaaagaaccagctggggctcgataccgtcgacctctagctagagcttggcgtaatcatggtcatagctgtttcctgtgtgaaattgttatccgctcacaattccacacaacatacgagccggaagcataaagtgtaaagcctagggtgcctaatgagtgagctaactcacattaattgcgttgcgctcactgcccgctttccagtcgggaaacctgtcgtgccagctgcattaatgaatcggccaacgcgcggggagaggcggtttgcgtattgggcgctcttccgcttcctcgctcactgactcgctgcgctcggtcgttcggctgcggcgagcggtatcagctcactcaaaggcggtaatacggttatccacagaatcaggggataacgcaggaaagaacatgtgagcaaaaggccagcaaaaggccaggaaccgtaaaaaggccgcgttgctggcgtttttccataggctccgcccccctgacgagcatcacaaaaatcgacgctcaagtcagaggtggcgaaacccgacaggactataaagataccaggcgtttccccctggaagctccctcgtgcgctctcctgttccgaccctgccgcttaccggatacctgtccgcctttctcccttcgggaagcgtggcgctttctcatagctcacgctgtaggtatctcagttcggtgtaggtcgttcgctccaagctgggctgtgtgcacgaaccccccgttcagcccgaccgctgcgccttatccggtaactatcgtcttgagtccaacccggtaagacacgacttatcgccactggcagcagccactggtaacaggattagcagagcgaggtatgtaggcggtgctacagagttcttgaagtggtggcctaactacggctacactagaagaacagtatttggtatctgcgctctgctgaagccagttaccttcggaaaaagagttggtagctcttgatccggcaaacaaaccaccgctggtagcggtggtttttttgtttgcaagcagcagattacgcgcagaaaaaaaggatctcaagaagatcctttgatcttttctacggggtctgacactcagtggaacgaaaactcacgttaagggattttggtcatgagattatcaaaaaggatcttcacctagatccttttaaattaaaaatgaagttttaaatcaatctaaagtatatatgagtaaacttggtctgacagttaccaatgcttaatcagtgaggcacctatctcagcgatctgtctatttcgttcatccatagttgcctgactccccgtcgtgtagataactacgatacgggagggcttaccatctggccccagtgctgcaatgataccgcgagacccacgctcaccggctccagatttatcagcaataaaccagccagccggaagggccgagcgcagaagtggtcctgcaactttatccgcctccatccagtctattaattgttgccgggaagctagagtaagtagttcgccagttaatagtttgcgcaacgttgttgccattgctacaggcatcgtggtgtcacgctcgtcgtttggtatggcttcattcagctccggttcccaacgatcaaggcgagttacatgatcccccatgttgtgcaaaaaagcggttagctccttcggtcctccgatcgttgtcagaagtaagttggccgcagtgttatcactcatggttatggcagcactgcataattctcttactgtcatgccatccgtaagatgcttttctgtgactggtgagtactcaaccaagtcattctgagaatagtgtatgcggcgaccgagttgctcttgcccggcgtcaatacgggataataccgcgccacatagcagaactttaaaagtgctcatcattggaaaacgttcttcggggcgaaaactctcaaggatcttaccgctgttgagatccagttcgatgtaacccactcgtgcacccaactgatcttcagcatcttttactttcaccagcgtttctgggtgagcaaaaacaggaaggcaaaatgccgcaaaaaagggaataagggcgacacggaaatgttgaatactcatactcttcctttttcaatattattgaagcatttatcagggttattgtctcatgagcggatacatatttgaatgtatttagaaaaataaacaaataggggttccgcgcacatttccccgaaaagtgccacctgacgtcgacggatcgggagatcgatctcccgatcccctagggtcgactctcagtacaatctgctctgatgccgcatagttaagccagtatctgctccctgcttgtgtgttggaggtcgctgagtagtgcgcgagcaaaatttaagctacaacaaggcaaggcttgaccgacaattgcatgaagaatctgcttagggttaggcgttttgcgctgcttcgcgatgtacgggccagatatacgcgtt

SEQ ID NO: 596 - DNA, 8067 bp, synthetic construct
  source 1..8067: mol_type = other DNA
gacattgattattgactagttattaatagtaatcaattacggggtcattagttcatagcccatatatggagttccgcgttacataacttacggtaaatggcccgcctggctgaccgcccaacgacccccgcccattgacgtcaataatgacgtatgttcccatagtaacgccaatagggactttccattgacgtcaatgggtggagtatttacggtaaactgcccacttggcagtacatcaagtgtatcatatgccaagtacgccccctattgacgtcaatgacggtaaatggcccgcctggcattatgcccagtacatgaccttatgggactttcctacttggcagtacatctacgtattagtcatcgctattaccatggtgatgcggttttggcagtacatcaatgggcgtggatagcggtttgactcacggggatttccaagtctccaccccattgacgtcaatgggagtttgttttggcaccaaaatcaacgggactttccaaaatgtcgtaacaactccgccccattgacgcaaatgggcggtaggcgtgtacggtgggaggtctatataagcagagctggtttagtgaaccgtcagatccgctagagatccgcggccgctaatacgactcactatagggagagccgccaccatgaaacggacagccgacggaagcgagttcgagtcaccaaagaagaagcggaaagtctacgactcccgcaactatgaggcgcaagagaatgcgatcctcccgaagaacgccgatgcgaacggggcctataatatcgccaggaaagtgctctgggccatcgggcagttcaaaaaggcggaggatgagaagctcgacaaggtgaaaattgccatttccaacaaggagtggctggagtacgcgcagacctccgtgaagcacggctcctctggcagctccggctctagcggctcctctggcagctccggctccaagctggagaagtttacaaactgttacagcctctccaaaaccctcaggtttaaagcgatcccggtgggcaagacccaggagaacatcgacaacaagaggctcctggtggaagacgagaagcgcgccgaagactacaagggcgtgaagaagctgctcgataggtactacctcagctttattaacgacgtgctgcacagcatcaaactcaagaatctcaacaactacatctccctcttccgcaaaaagacccgcaccgagaaggagaacaaggagctggagaacctggagatcaacctccgcaaggaaatcgccaaagcgttcaagggcaatgaagggtacaagagcctcttcaagaaagacatcatcgaaactatcctcccagagtttctcgatgacaaggacgagatcgcgctggtgaactcctttaacgggttcacaaccgcgtttaccggcttctttgataacagggaaaatatgttctccgaggaggccaagtccaccagcatcgccttcaggtgtatcaacgagaacctcacccgctacatttccaatatggacattttcgagaaggtggatgcgatcttcgataagcacgaggtgcaggagatcaaagagaagattctcaattccgattatgacgtcgaggatttcttcgaaggggagttctttaattttgtgctcacacaagagggcattgacgtgtacaacgcgattatcgggggcttcgtcacagagtccggggagaagattaaggggctgaatgagtacatcaatctgtacaatcagaagaccaagcagaaactgccgaaattcaagccgctctacaagcaagtcctgtccgatagggaaagcctctccttctacggcgagggctataccagcgacgaggaggtgctggaagtcttccgcaacacactgaataagaatagcgagattttctcctccatcaagaagctcgagaagctctttaagaactttgacgagtacagctccgccgggattttcgtgaagaacgggccggcgatcagcaccatctccaaggacatctttggcgagtggaacgtcatcagggacaagtggaacgccgagtacgacgacatccacctgaagaagaaggcggtggtgaccgagaagtatgaggacgatcgcaggaagtccttcaaaaaaatcggctccttcagcctcgaacagctccaggagtatgccgatgcggatctgtccgtcgtcgagaagctgaaggaaatcatcattcagaaggtcgacgagatctataaagtgtacgggtccagcgagaagctgttcgacgccgactttgtgctcgagaagtccctcaaaaagaatgacgccgtggtggccattatgaaagacctgctcgactccgtgaagtccttcgaaaattacattaaagcgttctttggggaggggaaggaaactaacagggatgagtccttctatggcgactttgtcctcgcgtacgacatcctgctgaaggtcgaccacatttacgacgcgatccgcaactacgtgacacagaagccgtactccaaagacaagttcaagctgtacttccagaacccgcaatttatggggggctgggacaaggataaagagacagactaccgcgcgacaattctccgctatggctccaaatactatctggccatcatggacaagaagtacgcgaagtgcctgcagaagatcgacaaagacgacgtcaatggcaactatgaaaagatcaactacaagctgctgccgggcccgaacaagatgctcccgaaggtgttcttcagcaagaagtggatggcctactacaatccaagcgaggatattcagaaaatctataaaaacgggaccttcaagaagggggacatgtttaacctcaacgactgccacaagctcattgatttcttcaaggatagcatttcccgctacccgaaatggtccaatgcgtacgattttaacttctccgagacagaaaagtacaaagacatcgcgggcttttacagggaggtggaggagcaagggtataaagtttcttttgaatccgcgagcaagaaggaagtcgacaagctcgtcgaggagggcaagctctacatgttccaaatttataacaaggacttttccgacaagagccatgggaccccaaacctccacaccatgtacttcaaactgctctttgacgagaacaaccacgggcaaatcaggctgagcggcggcgccgaattattcatgcgcagggcctccctcaagaaggaagagctggtcgtccatccagccaattccccgatcgcgaacaagaacccggacaatccgaaaaagaccaccaccctgtcctacgacgtctacaaggacaaacgcttcagcgaagaccagtacgaattacacatcccaattgcgattaataagtgcccaaagaatatcttcaaaattaatacagaggtcagggtgctgctcaaacacgacgacaatccgtatgtcatcggcattgacaggggcgagcgcaatctgctctatatcgtggtcgtggatgggaagggcaatattgtggagcagtactccctgaacgagattatcaacaacttcaatgggattaggattaagaccgactatcacagcctgctcgacaagaaagaaaaagagaggtttgaggcccgccaaaactggacctccattgagaatatcaaagaattaaaggccggctatatttcccaagtcgtccacaagatctgcgagctggtggagaaatatgacgccgtgattgcgctcgaagacttaaattctgggttcaagaactcccgcgtgaaggtggaaaaacaggtgtatcagaaattcgagaaaatgctgatcgacaaactcaattatatggtggataagaagtccaacccgtgtgccacagggggcgcgctgaagggctatcagatcaccaacaagttcgagagcttcaagagcatgagcacccagaacgggtttattttctacatcccggcgtggctcacctccaagattgacccgagcaccggcttcgtgaacctcctgaagacaaagtatacctccattgccgacagcaagaagtttatctcctccttcgaccgcattatgtatgtgccggaggaggacctcttcgagttcgccctcgactacaaaaacttcagccgcacagatgcggattacatcaagaagtggaagctgtactcctacgggaacaggatccgcatcttcaggaatccaaaaaaaaataacgtctttgactgggaggaagtgtgcctgacatccgcctacaaggaactgttcaataaatacggcatcaattaccagcagggcgacattcgcgccctcctctgtgagcagtccgacaaagcgttttactccagcttcatggccctcatgtccctgatgctccaaatgaggaatagcatcacagggcgcaccgacgtcgacttcctcatcagcccggtgaagaactccgacgggatcttttctggcggctcaaaaagaaccgccgacggcagcgaattcgagcccaagaagaagaggaaagtcggaagcggagctactaacttcagcctgctgaagcaggctggagacgtggaggagaaccctggacctatggtgagcaagggcgaggagctgttcaccggggtggtgcccatcctggtcgagctggacggcgacgtaaacggccacaagttcagcgtgtccggcgagggcgagggcgatgccacctacggcaagctgaccctgaagttcatctgcaccaccggcaagctgcccgtgccctggcccaccctcgtgaccaccctgacctatggagtgcagtgcttcagccgctaccccgaccacatgaagcagcacgacttcttcaagtccgccatgcccgaaggctacgtccaggagcgcaccatcttcttcaaggacgacggcaactacaagacccgcgccgaggtgaagttcgagggcgacaccctggtgaaccgcatcgagctgaagggcatcgacttcaaggaggacggcaacatcctggggcacaagctggagtacaactacaacagccacaacgtctatatcatggccgacaagcagaagaacggcatcaaggtgaacttcaagatccgccacaacatcgaggacggcagcgtgcagctcgccgaccactaccagcagaacacccccatcggcgacggccccgtgctgctgcccgacaaccactacctgagcacccagtccgccctgagcaaagaccccaacgagaagcgcgatcacatggtcctgctggagttcgtgaccgccgccgggatcactctcggcatggacgagctgtacaagtctggtggttctcccaagaagaagaggaaagtctaaccggtcatcatcaccatcaccattgagtttaaacccgctgatcagcctcgactgtgccttctagttgccagccatctgttgtttgcccctcccccgtgccttccttgaccctggaaggtgccactcccactgtcctttcctaataaaatgaggaaattgcatcgcattgtctgagtaggtgtcattctattctggggggtggggtggggcaggacagcaagggggaggattgggaagacaatagcaggcatgctggggatgcggtgggctctatggcttctgaggcggaaagaaccagctggggctcgataccgtcgacctctagctagagcttggcgtaatcatggtcatagctgtttcctgtgtgaaattgttatccgctcacaattccacacaacatacgagccggaagcataaagtgtaaagcctagggtgcctaatgagtgagctaactcacattaattgcgttgcgctcactgcccgctttccagtcgggaaacctgtcgtgccagctgcattaatgaatcggccaacgcgcggggagaggcggtttgcgtattgggcgctcttccgcttcctcgctcactgactcgctgcgctcggtcgttcggctgcggcgagcggtatcagctcactcaaaggcggtaatacggttatccacagaatcaggggataacgcaggaaagaacatgtgagcaaaaggccagcaaaaggccaggaaccgtaaaaaggccgcgttgctggcgtttttccataggctccgcccccctgacgagcatcacaaaaatcgacgctcaagtcagaggtggcgaaacccgacaggactataaagataccaggcgtttccccctggaagctccctcgtgcgctctcctgttccgaccctgccgcttaccggatacctgtccgcctttctcccttcgggaagcgtggcgctttctcatagctcacgctgtaggtatctcagttcggtgtaggtcgttcgctccaagctgggctgtgtgcacgaaccccccgttcagcccgaccgctgcgccttatccggtaactatcgtcttgagtccaacccggtaagacacgacttatcgccactggcagcagccactggtaacaggattagcagagcgaggtatgtaggcggtgctacagagttcttgaagtggtggcctaactacggctacactagaagaacagtatttggtatctgcgctctgctgaagccagttaccttcggaaaaagagttggtagctcttgatccggcaaacaaaccaccgctggtagcggtggtttttttgtttgcaagcagcagattacgcgcagaaaaaaaggatctcaagaagatcctttgatcttttctacggggtctgacactcagtggaacgaaaactcacgttaagggattttggtcatgagattatcaaaaaggatcttcacctagatccttttaaattaaaaatgaagttttaaatcaatctaaagtatatatgagtaaacttggtctgacagttaccaatgcttaatcagtgaggcacctatctcagcgatctgtctatttcgttcatccatagttgcctgactccccgtcgtgtagataactacgatacgggagggcttaccatctggccccagtgctgcaatgataccgcgagacccacgctcaccggctccagatttatcagcaataaaccagccagccggaagggccgagcgcagaagtggtcctgcaactttatccgcctccatccagtctattaattgttgccgggaagctagagtaagtagttcgccagttaatagtttgcgcaacgttgttgccattgctacaggcatcgtggtgtcacgctcgtcgtttggtatggcttcattcagctccggttcccaacgatcaaggcgagttacatgatcccccatgttgtgcaaaaaagcggttagctccttcggtcctccgatcgttgtcagaagtaagttggccgcagtgttatcactcatggttatggcagcactgcataattctcttactgtcatgccatccgtaagatgcttttctgtgactggtgagtactcaaccaagtcattctgagaatagtgtatgcggcgaccgagttgctcttgcccggcgtcaatacgggataataccgcgccacatagcagaactttaaaagtgctcatcattggaaaacgttcttcggggcgaaaactctcaaggatcttaccgctgttgagatccagttcgatgtaacccactcgtgcacccaactgatcttcagcatcttttactttcaccagcgtttctgggtgagcaaaaacaggaaggcaaaatgccgcaaaaaagggaataagggcgacacggaaatgttgaatactcatactcttcctttttcaatattattgaagcatttatcagggttattgtctcatgagcggatacatatttgaatgtatttagaaaaataaacaaataggggttccgcgcacatttccccgaaaagtgccacctgacgtcgacggatcgggagatcgatctcccgatcccctagggtcgactctcagtacaatctgctctgatgccgcatagttaagccagtatctgctccctgcttgtgtgttggaggtcgctgagtagtgcgcgagcaaaatttaagctacaacaaggcaaggcttgaccgacaattgcatgaagaatctgcttagggttaggcgttttgcgctgcttcgcgatgtacgggccagatatacgcgtt

SEQ ID NO: 597 - DNA, 8067 bp, synthetic construct
  source 1..8067: mol_type = other DNA
gacattgattattgactagttattaatagtaatcaattacggggtcattagttcatagcccatatatggagttccgcgttacataacttacggtaaatggcccgcctggctgaccgcccaacgacccccgcccattgacgtcaataatgacgtatgttcccatagtaacgccaatagggactttccattgacgtcaatgggtggagtatttacggtaaactgcccacttggcagtacatcaagtgtatcatatgccaagtacgccccctattgacgtcaatgacggtaaatggcccgcctggcattatgcccagtacatgaccttatgggactttcctacttggcagtacatctacgtattagtcatcgctattaccatggtgatgcggttttggcagtacatcaatgggcgtggatagcggtttgactcacggggatttccaagtctccaccccattgacgtcaatgggagtttgttttggcaccaaaatcaacgggactttccaaaatgtcgtaacaactccgccccattgacgcaaatgggcggtaggcgtgtacggtgggaggtctatataagcagagctggtttagtgaaccgtcagatccgctagagatccgcggccgctaatacgactcactatagggagagccgccaccatgaaacggacagccgacggaagcgagttcgagtcaccaaagaagaagcggaaagtccagaagccgtactccaaagacaagttcaagctgtacttccagaacccgcaatttatggggggctgggacaaggataaagagacagactaccgcgcgacaattctccgctatggctccaaatactatctggccatcatggacaagaagtacgcgaagtgcctgcagaagatcgacaaagacgacgtcaatggcaactatgaaaagatcaactacaagctgctgccgggcccgaacaagatgctcccgaaggtgttcttcagcaagaagtggatggcctactacaatccaagcgaggatattcagaaaatctataaaaacgggaccttcaagaagggggacatgtttaacctcaacgactgccacaagctcattgatttcttcaaggatagcatttcccgctacccgaaatggtccaatgcgtacgattttaacttctccgagacagaaaagtacaaagacatcgcgggcttttacagggaggtggaggagcaagggtataaagtttcttttgaatccgcgagcaagaaggaagtcgacaagctcgtcgaggagggcaagctctacatgttccaaatttataacaaggacttttccgacaagagccatgggaccccaaacctccacaccatgtacttcaaactgctctttgacgagaacaaccacgggcaaatcaggctgagcggcggcgccgaattattcatgcgcagggcctccctcaagaaggaagagctggtcgtccatccagccaattccccgatcgcgaacaagaacccggacaatccgaaaaagaccaccaccctgtcctacgacgtctacaaggacaaacgcttcagcgaagaccagtacgaattacacatcccaattgcgattaataagtgcccaaagaatatcttcaaaattaatacagaggtcagggtgctgctcaaacacgacgacaatccgtatgtcatcggcattgacaggggcgagcgcaatctgctctatatcgtggtcgtggatgggaagggcaatattgtggagcagtactccctgaacgagattatcaacaacttcaatgggattaggattaagaccgactatcacagcctgctcgacaagaaagaaaaagagaggtttgaggcccgccaaaactggacctccattgagaatatcaaagaattaaaggccggctatatttcccaagtcgtccacaagatctgcgagctggtggagaaatatgacgccgtgattgcgctcgaagacttaaattctgggttcaagaactcccgcgtgaaggtggaaaaacaggtgtatcagaaattcgagaaaatgctgatcgacaaactcaattatatggtggataagaagtccaacccgtgtgccacagggggcgcgctgaagggctatcagatcaccaacaagttcgagagcttcaagagcatgagcacccagaacgggtttattttctacatcccggcgtggctcacctccaagattgacccgagcaccggcttcgtgaacctcctgaagacaaagtatacctccattgccgacagcaagaagtttatctcctccttcgaccgcattatgtatgtgccggaggaggacctcttcgagttcgccctcgactacaaaaacttcagccgcacagatgcggattacatcaagaagtggaagctgtactcctacgggaacaggatccgcatcttcaggaatccaaaaaaaaataacgtctttgactgggaggaagtgtgcctgacatccgcctacaaggaactgttcaataaatacggcatcaattaccagcagggcgacattcgcgccctcctctgtgagcagtccgacaaagcgttttactccagcttcatggccctcatgtccctgatgctccaaatgaggaatagcatcacagggcgcaccgacgtcgacttcctcatcagcccggtgaagaactccgacgggatcttttacgactcccgcaactatgaggcgcaagagaatgcgatcctcccgaagaacgccgatgcgaacggggcctataatatcgccaggaaagtgctctgggccatcgggcagttcaaaaaggcggaggatgagaagctcgacaaggtgaaaattgccatttccaacaaggagtggctggagtacgcgcagacctccgtgaagcacggctcctctggcagctccggctctagcggctcctctggcagctccggctccaagctggagaagtttacaaactgttacagcctctccaaaaccctcaggtttaaagcgatcccggtgggcaagacccaggagaacatcgacaacaagaggctcctggtggaagacgagaagcgcgccgaagactacaagggcgtgaagaagctgctcgataggtactacctcagctttattaacgacgtgctgcacagcatcaaactcaagaatctcaacaactacatctccctcttccgcaaaaagacccgcaccgagaaggagaacaaggagctggagaacctggagatcaacctccgcaaggaaatcgccaaagcgttcaagggcaatgaagggtacaagagcctcttcaagaaagacatcatcgaaactatcctcccagagtttctcgatgacaaggacgagatcgcgctggtgaactcctttaacgggttcacaaccgcgtttaccggcttctttgataacagggaaaatatgttctccgaggaggccaagtccaccagcatcgccttcaggtgtatcaacgagaacctcacccgctacatttccaatatggacattttcgagaaggtggatgcgatcttcgataagcacgaggtgcaggagatcaaagagaagattctcaattccgattatgacgtcgaggatttcttcgaaggggagttctttaattttgtgctcacacaagagggcattgacgtgtacaacgcgattatcgggggcttcgtcacagagtccggggagaagattaaggggctgaatgagtacatcaatctgtacaatcagaagaccaagcagaaactgccgaaattcaagccgctctacaagcaagtcctgtccgatagggaaagcctctccttctacggcgagggctataccagcgacgaggaggtgctggaagtcttccgcaacacactgaataagaatagcgagattttctcctccatcaagaagctcgagaagctctttaagaactttgacgagtacagctccgccgggattttcgtgaagaacgggccggcgatcagcaccatctccaaggacatctttggcgagtggaacgtcatcagggacaagtggaacgccgagtacgacgacatccacctgaagaagaaggcggtggtgaccgagaagtatgaggacgatcgcaggaagtccttcaaaaaaatcggctccttcagcctcgaacagctccaggagtatgccgatgcggatctgtccgtcgtcgagaagctgaaggaaatcatcattcagaaggtcgacgagatctataaagtgtacgggtccagcgagaagctgttcgacgccgactttgtgctcgagaagtccctcaaaaagaatgacgccgtggtggccattatgaaagacctgctcgactccgtgaagtccttcgaaaattacattaaagcgttctttggggaggggaaggaaactaacagggatgagtccttctatggcgactttgtcctcgcgtacgacatcctgctgaaggtcgaccacatttacgacgcgatccgcaactacgtgacatctggcggctcaaaaagaaccgccgacggcagcgaattcgagcccaagaagaagaggaaagtcggaagcggagctactaacttcagcctgctgaagcaggctggagacgtggaggagaaccctggacctatggtgagcaagggcgaggagctgttcaccggggtggtgcccatcctggtcgagctggacggcgacgtaaacggccacaagttcagcgtgtccggcgagggcgagggcgatgccacctacggcaagctgaccctgaagttcatctgcaccaccggcaagctgcccgtgccctggcccaccctcgtgaccaccctgacctatggagtgcagtgcttcagccgctaccccgaccacatgaagcagcacgacttcttcaagtccgccatgcccgaaggctacgtccaggagcgcaccatcttcttcaaggacgacggcaactacaagacccgcgccgaggtgaagttcgagggcgacaccctggtgaaccgcatcgagctgaagggcatcgacttcaaggaggacggcaacatcctggggcacaagctggagtacaactacaacagccacaacgtctatatcatggccgacaagcagaagaacggcatcaaggtgaacttcaagatccgccacaacatcgaggacggcagcgtgcagctcgccgaccactaccagcagaacacccccatcggcgacggccccgtgctgctgcccgacaaccactacctgagcacccagtccgccctgagcaaagaccccaacgagaagcgcgatcacatggtcctgctggagttcgtgaccgccgccgggatcactctcggcatggacgagctgtacaagtctggtggttctcccaagaagaagaggaaagtctaaccggtcatcatcaccatcaccattgagtttaaacccgctgatcagcctcgactgtgccttctagttgccagccatctgttgtttgcccctcccccgtgccttccttgaccctggaaggtgccactcccactgtcctttcctaataaaatgaggaaattgcatcgcattgtctgagtaggtgtcattctattctggggggtggggtggggcaggacagcaagggggaggattgggaagacaatagcaggcatgctggggatgcggtgggctctatggcttctgaggcggaaagaaccagctggggctcgataccgtcgacctctagctagagcttggcgtaatcatggtcatagctgtttcctgtgtgaaattgttatccgctcacaattccacacaacatacgagccggaagcataaagtgtaaagcctagggtgcctaatgagtgagctaactcacattaattgcgttgcgctcactgcccgctttccagtcgggaaacctgtcgtgccagctgcattaatgaatcggccaacgcgcggggagaggcggtttgcgtattgggcgctcttccgcttcctcgctcactgactcgctgcgctcggtcgttcggctgcggcgagcggtatcagctcactcaaaggcggtaatacggttatccacagaatcaggggataacgcaggaaagaacatgtgagcaaaaggccagcaaaaggccaggaaccgtaaaaaggccgcgttgctggcgtttttccataggctccgcccccctgacgagcatcacaaaaatcgacgctcaagtcagaggtggcgaaacccgacaggactataaagataccaggcgtttccccctggaagctccctcgtgcgctctcctgttccgaccctgccgcttaccggatacctgtccgcctttctcccttcgggaagcgtggcgctttctcatagctcacgctgtaggtatctcagttcggtgtaggtcgttcgctccaagctgggctgtgtgcacgaaccccccgttcagcccgaccgctgcgccttatccggtaactatcgtcttgagtccaacccggtaagacacgacttatcgccactggcagcagccactggtaacaggattagcagagcgaggtatgtaggcggtgctacagagttcttgaagtggtggcctaactacggctacactagaagaacagtatttggtatctgcgctctgctgaagccagttaccttcggaaaaagagttggtagctcttgatccggcaaacaaaccaccgctggtagcggtggtttttttgtttgcaagcagcagattacgcgcagaaaaaaaggatctcaagaagatcctttgatcttttctacggggtctgacactcagtggaacgaaaactcacgttaagggattttggtcatgagattatcaaaaaggatcttcacctagatccttttaaattaaaaatgaagttttaaatcaatctaaagtatatatgagtaaacttggtctgacagttaccaatgcttaatcagtgaggcacctatctcagcgatctgtctatttcgttcatccatagttgcctgactccccgtcgtgtagataactacgatacgggagggcttaccatctggccccagtgctgcaatgataccgcgagacccacgctcaccggctccagatttatcagcaataaaccagccagccggaagggccgagcgcagaagtggtcctgcaactttatccgcctccatccagtctattaattgttgccgggaagctagagtaagtagttcgccagttaatagtttgcgcaacgttgttgccattgctacaggcatcgtggtgtcacgctcgtcgtttggtatggcttcattcagctccggttcccaacgatcaaggcgagttacatgatcccccatgttgtgcaaaaaagcggttagctccttcggtcctccgatcgttgtcagaagtaagttggccgcagtgttatcactcatggttatggcagcactgcataattctcttactgtcatgccatccgtaagatgcttttctgtgactggtgagtactcaaccaagtcattctgagaatagtgtatgcggcgaccgagttgctcttgcccggcgtcaatacgggataataccgcgccacatagcagaactttaaaagtgctcatcattggaaaacgttcttcggggcgaaaactctcaaggatcttaccgctgttgagatccagttcgatgtaacccactcgtgcacccaactgatcttcagcatcttttactttcaccagcgtttctgggtgagcaaaaacaggaaggcaaaatgccgcaaaaaagggaataagggcgacacggaaatgttgaatactcatactcttcctttttcaatattattgaagcatttatcagggttattgtctcatgagcggatacatatttgaatgtatttagaaaaataaacaaataggggttccgcgcacatttccccgaaaagtgccacctgacgtcgacggatcgggagatcgatctcccgatcccctagggtcgactctcagtacaatctgctctgatgccgcatagttaagccagtatctgctccctgcttgtgtgttggaggtcgctgagtagtgcgcgagcaaaatttaagctacaacaaggcaaggcttgaccgacaattgcatgaagaatctgcttagggttaggcgttttgcgctgcttcgcgatgtacgggccagatatacgcgtt

SEQ ID NO: 598 - DNA, 8067 bp, synthetic construct
  source 1..8067: mol_type = other DNA
gacattgattattgactagttattaatagtaatcaattacggggtcattagttcatagcccatatatggagttccgcgttacataacttacggtaaatggcccgcctggctgaccgcccaacgacccccgcccattgacgtcaataatgacgtatgttcccatagtaacgccaatagggactttccattgacgtcaatgggtggagtatttacggtaaactgcccacttggcagtacatcaagtgtatcatatgccaagtacgccccctattgacgtcaatgacggtaaatggcccgcctggcattatgcccagtacatgaccttatgggactttcctacttggcagtacatctacgtattagtcatcgctattaccatggtgatgcggttttggcagtacatcaatgggcgtggatagcggtttgactcacggggatttccaagtctccaccccattgacgtcaatgggagtttgttttggcaccaaaatcaacgggactttccaaaatgtcgtaacaactccgccccattgacgcaaatgggcggtaggcgtgtacggtgggaggtctatataagcagagctggtttagtgaaccgtcagatccgctagagatccgcggccgctaatacgactcactatagggagagccgccaccatgaaacggacagccgacggaagcgagttcgagtcaccaaagaagaagcggaaagtctactccaaagacaagttcaagctgtacttccagaacccgcaatttatggggggctgggacaaggataaagagacagactaccgcgcgacaattctccgctatggctccaaatactatctggccatcatggacaagaagtacgcgaagtgcctgcagaagatcgacaaagacgacgtcaatggcaactatgaaaagatcaactacaagctgctgccgggcccgaacaagatgctcccgaaggtgttcttcagcaagaagtggatggcctactacaatccaagcgaggatattcagaaaatctataaaaacgggaccttcaagaagggggacatgtttaacctcaacgactgccacaagctcattgatttcttcaaggatagcatttcccgctacccgaaatggtccaatgcgtacgattttaacttctccgagacagaaaagtacaaagacatcgcgggcttttacagggaggtggaggagcaagggtataaagtttcttttgaatccgcgagcaagaaggaagtcgacaagctcgtcgaggagggcaagctctacatgttccaaatttataacaaggacttttccgacaagagccatgggaccccaaacctccacaccatgtacttcaaactgctctttgacgagaacaaccacgggcaaatcaggctgagcggcggcgccgaattattcatgcgcagggcctccctcaagaaggaagagctggtcgtccatccagccaattccccgatcgcgaacaagaacccggacaatccgaaaaagaccaccaccctgtcctacgacgtctacaaggacaaacgcttcagcgaagaccagtacgaattacacatcccaattgcgattaataagtgcccaaagaatatcttcaaaattaatacagaggtcagggtgctgctcaaacacgacgacaatccgtatgtcatcggcattgacaggggcgagcgcaatctgctctatatcgtggtcgtggatgggaagggcaatattgtggagcagtactccctgaacgagattatcaacaacttcaatgggattaggattaagaccgactatcacagcctgctcgacaagaaagaaaaagagaggtttgaggcccgccaaaactggacctccattgagaatatcaaagaattaaaggccggctatatttcccaagtcgtccacaagatctgcgagctggtggagaaatatgacgccgtgattgcgctcgaagacttaaattctgggttcaagaactcccgcgtgaaggtggaaaaacaggtgtatcagaaattcgagaaaatgctgatcgacaaactcaattatatggtggataagaagtccaacccgtgtgccacagggggcgcgctgaagggctatcagatcaccaacaagttcgagagcttcaagagcatgagcacccagaacgggtttattttctacatcccggcgtggctcacctccaagattgacccgagcaccggcttcgtgaacctcctgaagacaaagtatacctccattgccgacagcaagaagtttatctcctccttcgaccgcattatgtatgtgccggaggaggacctcttcgagttcgccctcgactacaaaaacttcagccgcacagatgcggattacatcaagaagtggaagctgtactcctacgggaacaggatccgcatcttcaggaatccaaaaaaaaataacgtctttgactgggaggaagtgtgcctgacatccgcctacaaggaactgttcaataaatacggcatcaattaccagcagggcgacattcgcgccctcctctgtgagcagtccgacaaagcgttttactccagcttcatggccctcatgtccctgatgctccaaatgaggaatagcatcacagggcgcaccgacgtcgacttcctcatcagcccggtgaagaactccgacgggatcttttacgactcccgcaactatgaggcgcaagagaatgcgatcctcccgaagaacgccgatgcgaacggggcctataatatcgccaggaaagtgctctgggccatcgggcagttcaaaaaggcggaggatgagaagctcgacaaggtgaaaattgccatttccaacaaggagtggctggagtacgcgcagacctccgtgaagcacggctcctctggcagctccggctctagcggctcctctggcagctccggctccaagctggagaagtttacaaactgttacagcctctccaaaaccctcaggtttaaagcgatcccggtgggcaagacccaggagaacatcgacaacaagaggctcctggtggaagacgagaagcgcgccgaagactacaagggcgtgaagaagctgctcgataggtactacctcagctttattaacgacgtgctgcacagcatcaaactcaagaatctcaacaactacatctccctcttccgcaaaaagacccgcaccgagaaggagaacaaggagctggagaacctggagatcaacctccgcaaggaaatcgccaaagcgttcaagggcaatgaagggtacaagagcctcttcaagaaagacatcatcgaaactatcctcccagagtttctcgatgacaaggacgagatcgcgctggtgaactcctttaacgggttcacaaccgcgtttaccggcttctttgataacagggaaaatatgttctccgaggaggccaagtccaccagcatcgccttcaggtgtatcaacgagaacctcacccgctacatttccaatatggacattttcgagaaggtggatgcgatcttcgataagcacgaggtgcaggagatcaaagagaagattctcaattccgattatgacgtcgaggatttcttcgaaggggagttctttaattttgtgctcacacaagagggcattgacgtgtacaacgcgattatcgggggcttcgtcacagagtccggggagaagattaaggggctgaatgagtacatcaatctgtacaatcagaagaccaagcagaaactgccgaaattcaagccgctctacaagcaagtcctgtccgatagggaaagcctctccttctacggcgagggctataccagcgacgaggaggtgctggaagtcttccgcaacacactgaataagaatagcgagattttctcctccatcaagaagctcgagaagctctttaagaactttgacgagtacagctccgccgggattttcgtgaagaacgggccggcgatcagcaccatctccaaggacatctttggcgagtggaacgtcatcagggacaagtggaacgccgagtacgacgacatccacctgaagaagaaggcggtggtgaccgagaagtatgaggacgatcgcaggaagtccttcaaaaaaatcggctccttcagcctcgaacagctccaggagtatgccgatgcggatctgtccgtcgtcgagaagctgaaggaaatcatcattcagaaggtcgacgagatctataaagtgtacgggtccagcgagaagctgttcgacgccgactttgtgctcgagaagtccctcaaaaagaatgacgccgtggtggccattatgaaagacctgctcgactccgtgaagtccttcgaaaattacattaaagcgttctttggggaggggaaggaaactaacagggatgagtccttctatggcgactttgtcctcgcgtacgacatcctgctgaaggtcgaccacatttacgacgcgatccgcaactacgtgacacagaagccgtctggcggctcaaaaagaaccgccgacggcagcgaattcgagcccaagaagaagaggaaagtcggaagcggagctactaacttcagcctgctgaagcaggctggagacgtggaggagaaccctggacctatggtgagcaagggcgaggagctgttcaccggggtggtgcccatcctggtcgagctggacggcgacgtaaacggccacaagttcagcgtgtccggcgagggcgagggcgatgccacctacggcaagctgaccctgaagttcatctgcaccaccggcaagctgcccgtgccctggcccaccctcgtgaccaccctgacctatggagtgcagtgcttcagccgctaccccgaccacatgaagcagcacgacttcttcaagtccgccatgcccgaaggctacgtccaggagcgcaccatcttcttcaaggacgacggcaactacaagacccgcgccgaggtgaagttcgagggcgacaccctggtgaaccgcatcgagctgaagggcatcgacttcaaggaggacggcaacatcctggggcacaagctggagtacaactacaacagccacaacgtctatatcatggccgacaagcagaagaacggcatcaaggtgaacttcaagatccgccacaacatcgaggacggcagcgtgcagctcgccgaccactaccagcagaacacccccatcggcgacggccccgtgctgctgcccgacaaccactacctgagcacccagtccgccctgagcaaagaccccaacgagaagcgcgatcacatggtcctgctggagttcgtgaccgccgccgggatcactctcggcatggacgagctgtacaagtctggtggttctcccaagaagaagaggaaagtctaaccggtcatcatcaccatcaccattgagtttaaacccgctgatcagcctcgactgtgccttctagttgccagccatctgttgtttgcccctcccccgtgccttccttgaccctggaaggtgccactcccactgtcctttcctaataaaatgaggaaattgcatcgcattgtctgagtaggtgtcattctattctggggggtggggtggggcaggacagcaagggggaggattgggaagacaatagcaggcatgctggggatgcggtgggctctatggcttctgaggcggaaagaaccagctggggctcgataccgtcgacctctagctagagcttggcgtaatcatggtcatagctgtttcctgtgtgaaattgttatccgctcacaattccacacaacatacgagccggaagcataaagtgtaaagcctagggtgcctaatgagtgagctaactcacattaattgcgttgcgctcactgcccgctttccagtcgggaaacctgtcgtgccagctgcattaatgaatcggccaacgcgcggggagaggcggtttgcgtattgggcgctcttccgcttcctcgctcactgactcgctgcgctcggtcgttcggctgcggcgagcggtatcagctcactcaaaggcggtaatacggttatccacagaatcaggggataacgcaggaaagaacatgtgagcaaaaggccagcaaaaggccaggaaccgtaaaaaggccgcgttgctggcgtttttccataggctccgcccccctgacgagcatcacaaaaatcgacgctcaagtcagaggtggcgaaacccgacaggactataaagataccaggcgtttccccctggaagctccctcgtgcgctctcctgttccgaccctgccgcttaccggatacctgtccgcctttctcccttcgggaagcgtggcgctttctcatagctcacgctgtaggtatctcagttcggtgtaggtcgttcgctccaagctgggctgtgtgcacgaaccccccgttcagcccgaccgctgcgccttatccggtaactatcgtcttgagtccaacccggtaagacacgacttatcgccactggcagcagccactggtaacaggattagcagagcgaggtatgtaggcggtgctacagagttcttgaagtggtggcctaactacggctacactagaagaacagtatttggtatctgcgctctgctgaagccagttaccttcggaaaaagagttggtagctcttgatccggcaaacaaaccaccgctggtagcggtggtttttttgtttgcaagcagcagattacgcgcagaaaaaaaggatctcaagaagatcctttgatcttttctacggggtctgacactcagtggaacgaaaactcacgttaagggattttggtcatgagattatcaaaaaggatcttcacctagatccttttaaattaaaaatgaagttttaaatcaatctaaagtatatatgagtaaacttggtctgacagttaccaatgcttaatcagtgaggcacctatctcagcgatctgtctatttcgttcatccatagttgcctgactccccgtcgtgtagataactacgatacgggagggcttaccatctggccccagtgctgcaatgataccgcgagacccacgctcaccggctccagatttatcagcaataaaccagccagccggaagggccgagcgcagaagtggtcctgcaactttatccgcctccatccagtctattaattgttgccgggaagctagagtaagtagttcgccagttaatagtttgcgcaacgttgttgccattgctacaggcatcgtggtgtcacgctcgtcgtttggtatggcttcattcagctccggttcccaacgatcaaggcgagttacatgatcccccatgttgtgcaaaaaagcggttagctccttcggtcctccgatcgttgtcagaagtaagttggccgcagtgttatcactcatggttatggcagcactgcataattctcttactgtcatgccatccgtaagatgcttttctgtgactggtgagtactcaaccaagtcattctgagaatagtgtatgcggcgaccgagttgctcttgcccggcgtcaatacgggataataccgcgccacatagcagaactttaaaagtgctcatcattggaaaacgttcttcggggcgaaaactctcaaggatcttaccgctgttgagatccagttcgatgtaacccactcgtgcacccaactgatcttcagcatcttttactttcaccagcgtttctgggtgagcaaaaacaggaaggcaaaatgccgcaaaaaagggaataagggcgacacggaaatgttgaatactcatactcttcctttttcaatattattgaagcatttatcagggttattgtctcatgagcggatacatatttgaatgtatttagaaaaataaacaaataggggttccgcgcacatttccccgaaaagtgccacctgacgtcgacggatcgggagatcgatctcccgatcccctagggtcgactctcagtacaatctgctctgatgccgcatagttaagccagtatctgctccctgcttgtgtgttggaggtcgctgagtagtgcgcgagcaaaatttaagctacaacaaggcaaggcttgaccgacaattgcatgaagaatctgcttagggttaggcgttttgcgctgcttcgcgatgtacgggccagatatacgcgtt

SEQ ID NO: 599 - DNA, 8067 bp, synthetic construct
  source 1..8067: mol_type = other DNA
gacattgattattgactagttattaatagtaatcaattacggggtcattagttcatagcccatatatggagttccgcgttacataacttacggtaaatggcccgcctggctgaccgcccaacgacccccgcccattgacgtcaataatgacgtatgttcccatagtaacgccaatagggactttccattgacgtcaatgggtggagtatttacggtaaactgcccacttggcagtacatcaagtgtatcatatgccaagtacgccccctattgacgtcaatgacggtaaatggcccgcctggcattatgcccagtacatgaccttatgggactttcctacttggcagtacatctacgtattagtcatcgctattaccatggtgatgcggttttggcagtacatcaatgggcgtggatagcggtttgactcacggggatttccaagtctccaccccattgacgtcaatgggagtttgttttggcaccaaaatcaacgggactttccaaaatgtcgtaacaactccgccccattgacgcaaatgggcggtaggcgtgtacggtgggaggtctatataagcagagctggtttagtgaaccgtcagatccgctagagatccgcggccgctaatacgactcactatagggagagccgccaccatgaaacggacagccgacggaagcgagttcgagtcaccaaagaagaagcggaaagtcaagttcaagctgtacttccagaacccgcaatttatggggggctgggacaaggataaagagacagactaccgcgcgacaattctccgctatggctccaaatactatctggccatcatggacaagaagtacgcgaagtgcctgcagaagatcgacaaagacgacgtcaatggcaactatgaaaagatcaactacaagctgctgccgggcccgaacaagatgctcccgaaggtgttcttcagcaagaagtggatggcctactacaatccaagcgaggatattcagaaaatctataaaaacgggaccttcaagaagggggacatgtttaacctcaacgactgccacaagctcattgatttcttcaaggatagcatttcccgctacccgaaatggtccaatgcgtacgattttaacttctccgagacagaaaagtacaaagacatcgcgggcttttacagggaggtggaggagcaagggtataaagtttcttttgaatccgcgagcaagaaggaagtcgacaagctcgtcgaggagggcaagctctacatgttccaaatttataacaaggacttttccgacaagagccatgggaccccaaacctccacaccatgtacttcaaactgctctttgacgagaacaaccacgggcaaatcaggctgagcggcggcgccgaattattcatgcgcagggcctccctcaagaaggaagagctggtcgtccatccagccaattccccgatcgcgaacaagaacccggacaatccgaaaaagaccaccaccctgtcctacgacgtctacaaggacaaacgcttcagcgaagaccagtacgaattacacatcccaattgcgattaataagtgcccaaagaatatcttcaaaattaatacagaggtcagggtgctgctcaaacacgacgacaatccgtatgtcatcggcattgacaggggcgagcgcaatctgctctatatcgtggtcgtggatgggaagggcaatattgtggagcagtactccctgaacgagattatcaacaacttcaatgggattaggattaagaccgactatcacagcctgctcgacaagaaagaaaaagagaggtttgaggcccgccaaaactggacctccattgagaatatcaaagaattaaaggccggctatatttcccaagtcgtccacaagatctgcgagctggtggagaaatatgacgccgtgattgcgctcgaagacttaaattctgggttcaagaactcccgcgtgaaggtggaaaaacaggtgtatcagaaattcgagaaaatgctgatcgacaaactcaattatatggtggataagaagtccaacccgtgtgccacagggggcgcgctgaagggctatcagatcaccaacaagttcgagagcttcaagagcatgagcacccagaacgggtttattttctacatcccggcgtggctcacctccaagattgacccgagcaccggcttcgtgaacctcctgaagacaaagtatacctccattgccgacagcaagaagtttatctcctccttcgaccgcattatgtatgtgccggaggaggacctcttcgagttcgccctcgactacaaaaacttcagccgcacagatgcggattacatcaagaagtggaagctgtactcctacgggaacaggatccgcatcttcaggaatccaaaaaaaaataacgtctttgactgggaggaagtgtgcctgacatccgcctacaaggaactgttcaataaatacggcatcaattaccagcagggcgacattcgcgccctcctctgtgagcagtccgacaaagcgttttactccagcttcatggccctcatgtccctgatgctccaaatgaggaatagcatcacagggcgcaccgacgtcgacttcctcatcagcccggtgaagaactccgacgggatcttttacgactcccgcaactatgaggcgcaagagaatgcgatcctcccgaagaacgccgatgcgaacggggcctataatatcgccaggaaagtgctctgggccatcgggcagttcaaaaaggcggaggatgagaagctcgacaaggtgaaaattgccatttccaacaaggagtggctggagtacgcgcagacctccgtgaagcacggctcctctggcagctccggctctagcggctcctctggcagctccggctccaagctggagaagtttacaaactgttacagcctctccaaaaccctcaggtttaaagcgatcccggtgggcaagacccaggagaacatcgacaacaagaggctcctggtggaagacgagaagcgcgccgaagactacaagggcgtgaagaagctgctcgataggtactacctcagctttattaacgacgtgctgcacagcatcaaactcaagaatctcaacaactacatctccctcttccgcaaaaagacccgcaccgagaaggagaacaaggagctggagaacctggagatcaacctccgcaaggaaatcgccaaagcgttcaagggcaatgaagggtacaagagcctcttcaagaaagacatcatcgaaactatcctcccagagtttctcgatgacaaggacgagatcgcgctggtgaactcctttaacgggttcacaaccgcgtttaccggcttctttgataacagggaaaatatgttctccgaggaggccaagtccaccagcatcgccttcaggtgtatcaacgagaacctcacccgctacatttccaatatggacattttcgagaaggtggatgcgatcttcgataagcacgaggtgcaggagatcaaagagaagattctcaattccgattatgacgtcgaggatttcttcgaaggggagttctttaattttgtgctcacacaagagggcattgacgtgtacaacgcgattatcgggggcttcgtcacagagtccggggagaagattaaggggctgaatgagtacatcaatctgtacaatcagaagaccaagcagaaactgccgaaattcaagccgctctacaagcaagtcctgtccgatagggaaagcctctccttctacggcgagggctataccagcgacgaggaggtgctggaagtcttccgcaacacactgaataagaatagcgagattttctcctccatcaagaagctcgagaagctctttaagaactttgacgagtacagctccgccgggattttcgtgaagaacgggccggcgatcagcaccatctccaaggacatctttggcgagtggaacgtcatcagggacaagtggaacgccgagtacgacgacatccacctgaagaagaaggcggtggtgaccgagaagtatgaggacgatcgcaggaagtccttcaaaaaaatcggctccttcagcctcgaacagctccaggagtatgccgatgcggatctgtccgtcgtcgagaagctgaaggaaatcatcattcagaaggtcgacgagatctataaagtgtacgggtccagcgagaagctgttcgacgccgactttgtgctcgagaagtccctcaaaaagaatgacgccgtggtggccattatgaaagacctgctcgactccgtgaagtccttcgaaaattacattaaagcgttctttggggaggggaaggaaactaacagggatgagtccttctatggcgactttgtcctcgcgtacgacatcctgctgaaggtcgaccacatttacgacgcgatccgcaactacgtgacacagaagccgtactccaaagactctggcggctcaaaaagaaccgccgacggcagcgaattcgagcccaagaagaagaggaaagtcggaagcggagctactaacttcagcctgctgaagcaggctggagacgtggaggagaaccctggacctatggtgagcaagggcgaggagctgttcaccggggtggtgcccatcctggtcgagctggacggcgacgtaaacggccacaagttcagcgtgtccggcgagggcgagggcgatgccacctacggcaagctgaccctgaagttcatctgcaccaccggcaagctgcccgtgccctggcccaccctcgtgaccaccctgacctatggagtgcagtgcttcagccgctaccccgaccacatgaagcagcacgacttcttcaagtccgccatgcccgaaggctacgtccaggagcgcaccatcttcttcaaggacgacggcaactacaagacccgcgccgaggtgaagttcgagggcgacaccctggtgaaccgcatcgagctgaagggcatcgacttcaaggaggacggcaacatcctggggcacaagctggagtacaactacaacagccacaacgtctatatcatggccgacaagcagaagaacggcatcaaggtgaacttcaagatccgccacaacatcgaggacggcagcgtgcagctcgccgaccactaccagcagaacacccccatcggcgacggccccgtgctgctgcccgacaaccactacctgagcacccagtccgccctgagcaaagaccccaacgagaagcgcgatcacatggtcctgctggagttcgtgaccgccgccgggatcactctcggcatggacgagctgtacaagtctggtggttctcccaagaagaagaggaaagtctaaccggtcatcatcaccatcaccattgagtttaaacccgctgatcagcctcgactgtgccttctagttgccagccatctgttgtttgcccctcccccgtgccttccttgaccctggaaggtgccactcccactgtcctttcctaataaaatgaggaaattgcatcgcattgtctgagtaggtgtcattctattctggggggtggggtggggcaggacagcaagggggaggattgggaagacaatagcaggcatgctggggatgcggtgggctctatggcttctgaggcggaaagaaccagctggggctcgataccgtcgacctctagctagagcttggcgtaatcatggtcatagctgtttcctgtgtgaaattgttatccgctcacaattccacacaacatacgagccggaagcataaagtgtaaagcctagggtgcctaatgagtgagctaactcacattaattgcgttgcgctcactgcccgctttccagtcgggaaacctgtcgtgccagctgcattaatgaatcggccaacgcgcggggagaggcggtttgcgtattgggcgctcttccgcttcctcgctcactgactcgctgcgctcggtcgttcggctgcggcgagcggtatcagctcactcaaaggcggtaatacggttatccacagaatcaggggataacgcaggaaagaacatgtgagcaaaaggccagcaaaaggccaggaaccgtaaaaaggccgcgttgctggcgtttttccataggctccgcccccctgacgagcatcacaaaaatcgacgctcaagtcagaggtggcgaaacccgacaggactataaagataccaggcgtttccccctggaagctccctcgtgcgctctcctgttccgaccctgccgcttaccggatacctgtccgcctttctcccttcgggaagcgtggcgctttctcatagctcacgctgtaggtatctcagttcggtgtaggtcgttcgctccaagctgggctgtgtgcacgaaccccccgttcagcccgaccgctgcgccttatccggtaactatcgtcttgagtccaacccggtaagacacgacttatcgccactggcagcagccactggtaacaggattagcagagcgaggtatgtaggcggtgctacagagttcttgaagtggtggcctaactacggctacactagaagaacagtatttggtatctgcgctctgctgaagccagttaccttcggaaaaagagttggtagctcttgatccggcaaacaaaccaccgctggtagcggtggtttttttgtttgcaagcagcagattacgcgcagaaaaaaaggatctcaagaagatcctttgatcttttctacggggtctgacactcagtggaacgaaaactcacgttaagggattttggtcatgagattatcaaaaaggatcttcacctagatccttttaaattaaaaatgaagttttaaatcaatctaaagtatatatgagtaaacttggtctgacagttaccaatgcttaatcagtgaggcacctatctcagcgatctgtctatttcgttcatccatagttgcctgactccccgtcgtgtagataactacgatacgggagggcttaccatctggccccagtgctgcaatgataccgcgagacccacgctcaccggctccagatttatcagcaataaaccagccagccggaagggccgagcgcagaagtggtcctgcaactttatccgcctccatccagtctattaattgttgccgggaagctagagtaagtagttcgccagttaatagtttgcgcaacgttgttgccattgctacaggcatcgtggtgtcacgctcgtcgtttggtatggcttcattcagctccggttcccaacgatcaaggcgagttacatgatcccccatgttgtgcaaaaaagcggttagctccttcggtcctccgatcgttgtcagaagtaagttggccgcagtgttatcactcatggttatggcagcactgcataattctcttactgtcatgccatccgtaagatgcttttctgtgactggtgagtactcaaccaagtcattctgagaatagtgtatgcggcgaccgagttgctcttgcccggcgtcaatacgggataataccgcgccacatagcagaactttaaaagtgctcatcattggaaaacgttcttcggggcgaaaactctcaaggatcttaccgctgttgagatccagttcgatgtaacccactcgtgcacccaactgatcttcagcatcttttactttcaccagcgtttctgggtgagcaaaaacaggaaggcaaaatgccgcaaaaaagggaataagggcgacacggaaatgttgaatactcatactcttcctttttcaatattattgaagcatttatcagggttattgtctcatgagcggatacatatttgaatgtatttagaaaaataaacaaataggggttccgcgcacatttccccgaaaagtgccacctgacgtcgacggatcgggagatcgatctcccgatcccctagggtcgactctcagtacaatctgctctgatgccgcatagttaagccagtatctgctccctgcttgtgtgttggaggtcgctgagtagtgcgcgagcaaaatttaagctacaacaaggcaaggcttgaccgacaattgcatgaagaatctgcttagggttaggcgttttgcgctgcttcgcgatgtacgggccagatatacgcgtt

SEQ ID NO: 600 - DNA, 8067 bp, synthetic construct
  source 1..8067: mol_type = other DNA
gacattgattattgactagttattaatagtaatcaattacggggtcattagttcatagcccatatatggagttccgcgttacataacttacggtaaatggcccgcctggctgaccgcccaacgacccccgcccattgacgtcaataatgacgtatgttcccatagtaacgccaatagggactttccattgacgtcaatgggtggagtatttacggtaaactgcccacttggcagtacatcaagtgtatcatatgccaagtacgccccctattgacgtcaatgacggtaaatggcccgcctggcattatgcccagtacatgaccttatgggactttcctacttggcagtacatctacgtattagtcatcgctattaccatggtgatgcggttttggcagtacatcaatgggcgtggatagcggtttgactcacggggatttccaagtctccaccccattgacgtcaatgggagtttgttttggcaccaaaatcaacgggactttccaaaatgtcgtaacaactccgccccattgacgcaaatgggcggtaggcgtgtacggtgggaggtctatataagcagagctggtttagtgaaccgtcagatccgctagagatccgcggccgctaatacgactcactatagggagagccgccaccatgaaacggacagccgacggaagcgagttcgagtcaccaaagaagaagcggaaagtcaagctgtacttccagaacccgcaatttatggggggctgggacaaggataaagagacagactaccgcgcgacaattctccgctatggctccaaatactatctggccatcatggacaagaagtacgcgaagtgcctgcagaagatcgacaaagacgacgtcaatggcaactatgaaaagatcaactacaagctgctgccgggcccgaacaagatgctcccgaaggtgttcttcagcaagaagtggatggcctactacaatccaagcgaggatattcagaaaatctataaaaacgggaccttcaagaagggggacatgtttaacctcaacgactgccacaagctcattgatttcttcaaggatagcatttcccgctacccgaaatggtccaatgcgtacgattttaacttctccgagacagaaaagtacaaagacatcgcgggcttttacagggaggtggaggagcaagggtataaagtttcttttgaatccgcgagcaagaaggaagtcgacaagctcgtcgaggagggcaagctctacatgttccaaatttataacaaggacttttccgacaagagccatgggaccccaaacctccacaccatgtacttcaaactgctctttgacgagaacaaccacgggcaaatcaggctgagcggcggcgccgaattattcatgcgcagggcctccctcaagaaggaagagctggtcgtccatccagccaattccccgatcgcgaacaagaacccggacaatccgaaaaagaccaccaccctgtcctacgacgtctacaaggacaaacgcttcagcgaagaccagtacgaattacacatcccaattgcgattaataagtgcccaaagaatatcttcaaaattaatacagaggtcagggtgctgctcaaacacgacgacaatccgtatgtcatcggcattgacaggggcgagcgcaatctgctctatatcgtggtcgtggatgggaagggcaatattgtggagcagtactccctgaacgagattatcaacaacttcaatgggattaggattaagaccgactatcacagcctgctcgacaagaaagaaaaagagaggtttgaggcccgccaaaactggacctccattgagaatatcaaagaattaaaggccggctatatttcccaagtcgtccacaagatctgcgagctggtggagaaatatgacgccgtgattgcgctcgaagacttaaattctgggttcaagaactcccgcgtgaaggtggaaaaacaggtgtatcagaaattcgagaaaatgctgatcgacaaactcaattatatggtggataagaagtccaacccgtgtgccacagggggcgcgctgaagggctatcagatcaccaacaagttcgagagcttcaagagcatgagcacccagaacgggtttattttctacatcccggcgtggctcacctccaagattgacccgagcaccggcttcgtgaacctcctgaagacaaagtatacctccattgccgacagcaagaagtttatctcctccttcgaccgcattatgtatgtgccggaggaggacctcttcgagttcgccctcgactacaaaaacttcagccgcacagatgcggattacatcaagaagtggaagctgtactcctacgggaacaggatccgcatcttcaggaatccaaaaaaaaataacgtctttgactgggaggaagtgtgcctgacatccgcctacaaggaactgttcaataaatacggcatcaattaccagcagggcgacattcgcgccctcctctgtgagcagtccgacaaagcgttttactccagcttcatggccctcatgtccctgatgctccaaatgaggaatagcatcacagggcgcaccgacgtcgacttcctcatcagcccggtgaagaactccgacgggatcttttacgactcccgcaactatgaggcgcaagagaatgcgatcctcccgaagaacgccgatgcgaacggggcctataatatcgccaggaaagtgctctgggccatcgggcagttcaaaaaggcggaggatgagaagctcgacaaggtgaaaattgccatttccaacaaggagtggctggagtacgcgcagacctccgtgaagcacggctcctctggcagctccggctctagcggctcctctggcagctccggctccaagctggagaagtttacaaactgttacagcctctccaaaaccctcaggtttaaagcgatcccggtgggcaagacccaggagaacatcgacaacaagaggctcctggtggaagacgagaagcgcgccgaagactacaagggcgtgaagaagctgctcgataggtactacctcagctttattaacgacgtgctgcacagcatcaaactcaagaatctcaacaactacatctccctcttccgcaaaaagacccgcaccgagaaggagaacaaggagctggagaacctggagatcaacctccgcaaggaaatcgccaaagcgttcaagggcaatgaagggtacaagagcctcttcaagaaagacatcatcgaaactatcctcccagagtttctcgatgacaaggacgagatcgcgctggtgaactcctttaacgggttcacaaccgcgtttaccggcttctttgataacagggaaaatatgttctccgaggaggccaagtccaccagcatcgccttcaggtgtatcaacgagaacctcacccgctacatttccaatatggacattttcgagaaggtggatgcgatcttcgataagcacgaggtgcaggagatcaaagagaagattctcaattccgattatgacgtcgaggatttcttcgaaggggagttctttaattttgtgctcacacaagagggcattgacgtgtacaacgcgattatcgggggcttcgtcacagagtccggggagaagattaaggggctgaatgagtacatcaatctgtacaatcagaagaccaagcagaaactgccgaaattcaagccgctctacaagcaagtcctgtccgatagggaaagcctctccttctacggcgagggctataccagcgacgaggaggtgctggaagtcttccgcaacacactgaataagaatagcgagattttctcctccatcaagaagctcgagaagctctttaagaactttgacgagtacagctccgccgggattttcgtgaagaacgggccggcgatcagcaccatctccaaggacatctttggcgagtggaacgtcatcagggacaagtggaacgccgagtacgacgacatccacctgaagaagaaggcggtggtgaccgagaagtatgaggacgatcgcaggaagtccttcaaaaaaatcggctccttcagcctcgaacagctccaggagtatgccgatgcggatctgtccgtcgtcgagaagctgaaggaaatcatcattcagaaggtcgacgagatctataaagtgtacgggtccagcgagaagctgttcgacgccgactttgtgctcgagaagtccctcaaaaagaatgacgccgtggtggccattatgaaagacctgctcgactccgtgaagtccttcgaaaattacattaaagcgttctttggggaggggaaggaaactaacagggatgagtccttctatggcgactttgtcctcgcgtacgacatcctgctgaaggtcgaccacatttacgacgcgatccgcaactacgtgacacagaagccgtactccaaagacaagttctctggcggctcaaaaagaaccgccgacggcagcgaattcgagcccaagaagaagaggaaagtcggaagcggagctactaacttcagcctgctgaagcaggctggagacgtggaggagaaccctggacctatggtgagcaagggcgaggagctgttcaccggggtggtgcccatcctggtcgagctggacggcgacgtaaacggccacaagttcagcgtgtccggcgagggcgagggcgatgccacctacggcaagctgaccctgaagttcatctgcaccaccggcaagctgcccgtgccctggcccaccctcgtgaccaccctgacctatggagtgcagtgcttcagccgctaccccgaccacatgaagcagcacgacttcttcaagtccgccatgcccgaaggctacgtccaggagcgcaccatcttcttcaaggacgacggcaactacaagacccgcgccgaggtgaagttcgagggcgacaccctggtgaaccgcatcgagctgaagggcatcgacttcaaggaggacggcaacatcctggggcacaagctggagtacaactacaacagccacaacgtctatatcatggccgacaagcagaagaacggcatcaaggtgaacttcaagatccgccacaacatcgaggacggcagcgtgcagctcgccgaccactaccagcagaacacccccatcggcgacggccccgtgctgctgcccgacaaccactacctgagcacccagtccgccctgagcaaagaccccaacgagaagcgcgatcacatggtcctgctggagttcgtgaccgccgccgggatcactctcggcatggacgagctgtacaagtctggtggttctcccaagaagaagaggaaagtctaaccggtcatcatcaccatcaccattgagtttaaacccgctgatcagcctcgactgtgccttctagttgccagccatctgttgtttgcccctcccccgtgccttccttgaccctggaaggtgccactcccactgtcctttcctaataaaatgaggaaattgcatcgcattgtctgagtaggtgtcattctattctggggggtggggtggggcaggacagcaagggggaggattgggaagacaatagcaggcatgctggggatgcggtgggctctatggcttctgaggcggaaagaaccagctggggctcgataccgtcgacctctagctagagcttggcgtaatcatggtcatagctgtttcctgtgtgaaattgttatccgctcacaattccacacaacatacgagccggaagcataaagtgtaaagcctagggtgcctaatgagtgagctaactcacattaattgcgttgcgctcactgcccgctttccagtcgggaaacctgtcgtgccagctgcattaatgaatcggccaacgcgcggggagaggcggtttgcgtattgggcgctcttccgcttcctcgctcactgactcgctgcgctcggtcgttcggctgcggcgagcggtatcagctcactcaaaggcggtaatacggttatccacagaatcaggggataacgcaggaaagaacatgtgagcaaaaggccagcaaaaggccaggaaccgtaaaaaggccgcgttgctggcgtttttccataggctccgcccccctgacgagcatcacaaaaatcgacgctcaagtcagaggtggcgaaacccgacaggactataaagataccaggcgtttccccctggaagctccctcgtgcgctctcctgttccgaccctgccgcttaccggatacctgtccgcctttctcccttcgggaagcgtggcgctttctcatagctcacgctgtaggtatctcagttcggtgtaggtcgttcgctccaagctgggctgtgtgcacgaaccccccgttcagcccgaccgctgcgccttatccggtaactatcgtcttgagtccaacccggtaagacacgacttatcgccactggcagcagccactggtaacaggattagcagagcgaggtatgtaggcggtgctacagagttcttgaagtggtggcctaactacggctacactagaagaacagtatttggtatctgcgctctgctgaagccagttaccttcggaaaaagagttggtagctcttgatccggcaaacaaaccaccgctggtagcggtggtttttttgtttgcaagcagcagattacgcgcagaaaaaaaggatctcaagaagatcctttgatcttttctacggggtctgacactcagtggaacgaaaactcacgttaagggattttggtcatgagattatcaaaaaggatcttcacctagatccttttaaattaaaaatgaagttttaaatcaatctaaagtatatatgagtaaacttggtctgacagttaccaatgcttaatcagtgaggcacctatctcagcgatctgtctatttcgttcatccatagttgcctgactccccgtcgtgtagataactacgatacgggagggcttaccatctggccccagtgctgcaatgataccgcgagacccacgctcaccggctccagatttatcagcaataaaccagccagccggaagggccgagcgcagaagtggtcctgcaactttatccgcctccatccagtctattaattgttgccgggaagctagagtaagtagttcgccagttaatagtttgcgcaacgttgttgccattgctacaggcatcgtggtgtcacgctcgtcgtttggtatggcttcattcagctccggttcccaacgatcaaggcgagttacatgatcccccatgttgtgcaaaaaagcggttagctccttcggtcctccgatcgttgtcagaagtaagttggccgcagtgttatcactcatggttatggcagcactgcataattctcttactgtcatgccatccgtaagatgcttttctgtgactggtgagtactcaaccaagtcattctgagaatagtgtatgcggcgaccgagttgctcttgcccggcgtcaatacgggataataccgcgccacatagcagaactttaaaagtgctcatcattggaaaacgttcttcggggcgaaaactctcaaggatcttaccgctgttgagatccagttcgatgtaacccactcgtgcacccaactgatcttcagcatcttttactttcaccagcgtttctgggtgagcaaaaacaggaaggcaaaatgccgcaaaaaagggaataagggcgacacggaaatgttgaatactcatactcttcctttttcaatattattgaagcatttatcagggttattgtctcatgagcggatacatatttgaatgtatttagaaaaataaacaaataggggttccgcgcacatttccccgaaaagtgccacctgacgtcgacggatcgggagatcgatctcccgatcccctagggtcgactctcagtacaatctgctctgatgccgcatagttaagccagtatctgctccctgcttgtgtgttggaggtcgctgagtagtgcgcgagcaaaatttaagctacaacaaggcaaggcttgaccgacaattgcatgaagaatctgcttagggttaggcgttttgcgctgcttcgcgatgtacgggccagatatacgcgtt

SEQ ID NO: 601 - DNA, 8067 bp, synthetic construct
  source 1..8067: mol_type = other DNA
gacattgattattgactagttattaatagtaatcaattacggggtcattagttcatagcccatatatggagttccgcgttacataacttacggtaaatggcccgcctggctgaccgcccaacgacccccgcccattgacgtcaataatgacgtatgttcccatagtaacgccaatagggactttccattgacgtcaatgggtggagtatttacggtaaactgcccacttggcagtacatcaagtgtatcatatgccaagtacgccccctattgacgtcaatgacggtaaatggcccgcctggcattatgcccagtacatgaccttatgggactttcctacttggcagtacatctacgtattagtcatcgctattaccatggtgatgcggttttggcagtacatcaatgggcgtggatagcggtttgactcacggggatttccaagtctccaccccattgacgtcaatgggagtttgttttggcaccaaaatcaacgggactttccaaaatgtcgtaacaactccgccccattgacgcaaatgggcggtaggcgtgtacggtgggaggtctatataagcagagctggtttagtgaaccgtcagatccgctagagatccgcggccgctaatacgactcactatagggagagccgccaccatgaaacggacagccgacggaagcgagttcgagtcaccaaagaagaagcggaaagtcgccgactttgtgctcgagaagtccctcaaaaagaatgacgccgtggtggccattatgaaagacctgctcgactccgtgaagtccttcgaaaattacattaaagcgttctttggggaggggaaggaaactaacagggatgagtccttctatggcgactttgtcctcgcgtacgacatcctgctgaaggtcgaccacatttacgacgcgatccgcaactacgtgacacagaagccgtactccaaagacaagttcaagctgtacttccagaacccgcaatttatggggggctgggacaaggataaagagacagactaccgcgcgacaattctccgctatggctccaaatactatctggccatcatggacaagaagtacgcgaagtgcctgcagaagatcgacaaagacgacgtcaatggcaactatgaaaagatcaactacaagctgctgccgggcccgaacaagatgctcccgaaggtgttcttcagcaagaagtggatggcctactacaatccaagcgaggatattcagaaaatctataaaaacgggaccttcaagaagggggacatgtttaacctcaacgactgccacaagctcattgatttcttcaaggatagcatttcccgctacccgaaatggtccaatgcgtacgattttaacttctccgagacagaaaagtacaaagacatcgcgggcttttacagggaggtggaggagcaagggtataaagtttcttttgaatccgcgagcaagaaggaagtcgacaagctcgtcgaggagggcaagctctacatgttccaaatttataacaaggacttttccgacaagagccatgggaccccaaacctccacaccatgtacttcaaactgctctttgacgagaacaaccacgggcaaatcaggctgagcggcggcgccgaattattcatgcgcagggcctccctcaagaaggaagagctggtcgtccatccagccaattccccgatcgcgaacaagaacccggacaatccgaaaaagaccaccaccctgtcctacgacgtctacaaggacaaacgcttcagcgaagaccagtacgaattacacatcccaattgcgattaataagtgcccaaagaatatcttcaaaattaatacagaggtcagggtgctgctcaaacacgacgacaatccgtatgtcatcggcattgacaggggcgagcgcaatctgctctatatcgtggtcgtggatgggaagggcaatattgtggagcagtactccctgaacgagattatcaacaacttcaatgggattaggattaagaccgactatcacagcctgctcgacaagaaagaaaaagagaggtttgaggcccgccaaaactggacctccattgagaatatcaaagaattaaaggccggctatatttcccaagtcgtccacaagatctgcgagctggtggagaaatatgacgccgtgattgcgctcgaagacttaaattctgggttcaagaactcccgcgtgaaggtggaaaaacaggtgtatcagaaattcgagaaaatgctgatcgacaaactcaattatatggtggataagaagtccaacccgtgtgccacagggggcgcgctgaagggctatcagatcaccaacaagttcgagagcttcaagagcatgagcacccagaacgggtttattttctacatcccggcgtggctcacctccaagattgacccgagcaccggcttcgtgaacctcctgaagacaaagtatacctccattgccgacagcaagaagtttatctcctccttcgaccgcattatgtatgtgccggaggaggacctcttcgagttcgccctcgactacaaaaacttcagccgcacagatgcggattacatcaagaagtggaagctgtactcctacgggaacaggatccgcatcttcaggaatccaaaaaaaaataacgtctttgactgggaggaagtgtgcctgacatccgcctacaaggaactgttcaataaatacggcatcaattaccagcagggcgacattcgcgccctcctctgtgagcagtccgacaaagcgttttactccagcttcatggccctcatgtccctgatgctccaaatgaggaatagcatcacagggcgcaccgacgtcgacttcctcatcagcccggtgaagaactccgacgggatcttttacgactcccgcaactatgaggcgcaagagaatgcgatcctcccgaagaacgccgatgcgaacggggcctataatatcgccaggaaagtgctctgggccatcgggcagttcaaaaaggcggaggatgagaagctcgacaaggtgaaaattgccatttccaacaaggagtggctggagtacgcgcagacctccgtgaagcacggctcctctggcagctccggctctagcggctcctctggcagctccggctccaagctggagaagtttacaaactgttacagcctctccaaaaccctcaggtttaaagcgatcccggtgggcaagacccaggagaacatcgacaacaagaggctcctggtggaagacgagaagcgcgccgaagactacaagggcgtgaagaagctgctcgataggtactacctcagctttattaacgacgtgctgcacagcatcaaactcaagaatctcaacaactacatctccctcttccgcaaaaagacccgcaccgagaaggagaacaaggagctggagaacctggagatcaacctccgcaaggaaatcgccaaagcgttcaagggcaatgaagggtacaagagcctcttcaagaaagacatcatcgaaactatcctcccagagtttctcgatgacaaggacgagatcgcgctggtgaactcctttaacgggttcacaaccgcgtttaccggcttctttgataacagggaaaatatgttctccgaggaggccaagtccaccagcatcgccttcaggtgtatcaacgagaacctcacccgctacatttccaatatggacattttcgagaaggtggatgcgatcttcgataagcacgaggtgcaggagatcaaagagaagattctcaattccgattatgacgtcgaggatttcttcgaaggggagttctttaattttgtgctcacacaagagggcattgacgtgtacaacgcgattatcgggggcttcgtcacagagtccggggagaagattaaggggctgaatgagtacatcaatctgtacaatcagaagaccaagcagaaactgccgaaattcaagccgctctacaagcaagtcctgtccgatagggaaagcctctccttctacggcgagggctataccagcgacgaggaggtgctggaagtcttccgcaacacactgaataagaatagcgagattttctcctccatcaagaagctcgagaagctctttaagaactttgacgagtacagctccgccgggattttcgtgaagaacgggccggcgatcagcaccatctccaaggacatctttggcgagtggaacgtcatcagggacaagtggaacgccgagtacgacgacatccacctgaagaagaaggcggtggtgaccgagaagtatgaggacgatcgcaggaagtccttcaaaaaaatcggctccttcagcctcgaacagctccaggagtatgccgatgcggatctgtccgtcgtcgagaagctgaaggaaatcatcattcagaaggtcgacgagatctataaagtgtacgggtccagcgagaagctgttcgactctggcggctcaaaaagaaccgccgacggcagcgaattcgagcccaagaagaagaggaaagtcggaagcggagctactaacttcagcctgctgaagcaggctggagacgtggaggagaaccctggacctatggtgagcaagggcgaggagctgttcaccggggtggtgcccatcctggtcgagctggacggcgacgtaaacggccacaagttcagcgtgtccggcgagggcgagggcgatgccacctacggcaagctgaccctgaagttcatctgcaccaccggcaagctgcccgtgccctggcccaccctcgtgaccaccctgacctatggagtgcagtgcttcagccgctaccccgaccacatgaagcagcacgacttcttcaagtccgccatgcccgaaggctacgtccaggagcgcaccatcttcttcaaggacgacggcaactacaagacccgcgccgaggtgaagttcgagggcgacaccctggtgaaccgcatcgagctgaagggcatcgacttcaaggaggacggcaacatcctggggcacaagctggagtacaactacaacagccacaacgtctatatcatggccgacaagcagaagaacggcatcaaggtgaacttcaagatccgccacaacatcgaggacggcagcgtgcagctcgccgaccactaccagcagaacacccccatcggcgacggccccgtgctgctgcccgacaaccactacctgagcacccagtccgccctgagcaaagaccccaacgagaagcgcgatcacatggtcctgctggagttcgtgaccgccgccgggatcactctcggcatggacgagctgtacaagtctggtggttctcccaagaagaagaggaaagtctaaccggtcatcatcaccatcaccattgagtttaaacccgctgatcagcctcgactgtgccttctagttgccagccatctgttgtttgcccctcccccgtgccttccttgaccctggaaggtgccactcccactgtcctttcctaataaaatgaggaaattgcatcgcattgtctgagtaggtgtcattctattctggggggtggggtggggcaggacagcaagggggaggattgggaagacaatagcaggcatgctggggatgcggtgggctctatggcttctgaggcggaaagaaccagctggggctcgataccgtcgacctctagctagagcttggcgtaatcatggtcatagctgtttcctgtgtgaaattgttatccgctcacaattccacacaacatacgagccggaagcataaagtgtaaagcctagggtgcctaatgagtgagctaactcacattaattgcgttgcgctcactgcccgctttccagtcgggaaacctgtcgtgccagctgcattaatgaatcggccaacgcgcggggagaggcggtttgcgtattgggcgctcttccgcttcctcgctcactgactcgctgcgctcggtcgttcggctgcggcgagcggtatcagctcactcaaaggcggtaatacggttatccacagaatcaggggataacgcaggaaagaacatgtgagcaaaaggccagcaaaaggccaggaaccgtaaaaaggccgcgttgctggcgtttttccataggctccgcccccctgacgagcatcacaaaaatcgacgctcaagtcagaggtggcgaaacccgacaggactataaagataccaggcgtttccccctggaagctccctcgtgcgctctcctgttccgaccctgccgcttaccggatacctgtccgcctttctcccttcgggaagcgtggcgctttctcatagctcacgctgtaggtatctcagttcggtgtaggtcgttcgctccaagctgggctgtgtgcacgaaccccccgttcagcccgaccgctgcgccttatccggtaactatcgtcttgagtccaacccggtaagacacgacttatcgccactggcagcagccactggtaacaggattagcagagcgaggtatgtaggcggtgctacagagttcttgaagtggtggcctaactacggctacactagaagaacagtatttggtatctgcgctctgctgaagccagttaccttcggaaaaagagttggtagctcttgatccggcaaacaaaccaccgctggtagcggtggtttttttgtttgcaagcagcagattacgcgcagaaaaaaaggatctcaagaagatcctttgatcttttctacggggtctgacactcagtggaacgaaaactcacgttaagggattttggtcatgagattatcaaaaaggatcttcacctagatccttttaaattaaaaatgaagttttaaatcaatctaaagtatatatgagtaaacttggtctgacagttaccaatgcttaatcagtgaggcacctatctcagcgatctgtctatttcgttcatccatagttgcctgactccccgtcgtgtagataactacgatacgggagggcttaccatctggccccagtgctgcaatgataccgcgagacccacgctcaccggctccagatttatcagcaataaaccagccagccggaagggccgagcgcagaagtggtcctgcaactttatccgcctccatccagtctattaattgttgccgggaagctagagtaagtagttcgccagttaatagtttgcgcaacgttgttgccattgctacaggcatcgtggtgtcacgctcgtcgtttggtatggcttcattcagctccggttcccaacgatcaaggcgagttacatgatcccccatgttgtgcaaaaaagcggttagctccttcggtcctccgatcgttgtcagaagtaagttggccgcagtgttatcactcatggttatggcagcactgcataattctcttactgtcatgccatccgtaagatgcttttctgtgactggtgagtactcaaccaagtcattctgagaatagtgtatgcggcgaccgagttgctcttgcccggcgtcaatacgggataataccgcgccacatagcagaactttaaaagtgctcatcattggaaaacgttcttcggggcgaaaactctcaaggatcttaccgctgttgagatccagttcgatgtaacccactcgtgcacccaactgatcttcagcatcttttactttcaccagcgtttctgggtgagcaaaaacaggaaggcaaaatgccgcaaaaaagggaataagggcgacacggaaatgttgaatactcatactcttcctttttcaatattattgaagcatttatcagggttattgtctcatgagcggatacatatttgaatgtatttagaaaaataaacaaataggggttccgcgcacatttccccgaaaagtgccacctgacgtcgacggatcgggagatcgatctcccgatcccctagggtcgactctcagtacaatctgctctgatgccgcatagttaagccagtatctgctccctgcttgtgtgttggaggtcgctgagtagtgcgcgagcaaaatttaagctacaacaaggcaaggcttgaccgacaattgcatgaagaatctgcttagggttaggcgttttgcgctgcttcgcgatgtacgggccagatatacgcgtt

SEQ ID NO: 602 - DNA, 8067 bp, synthetic construct
  source 1..8067: mol_type = other DNA
gacattgattattgactagttattaatagtaatcaattacggggtcattagttcatagcccatatatggagttccgcgttacataacttacggtaaatggcccgcctggctgaccgcccaacgacccccgcccattgacgtcaataatgacgtatgttcccatagtaacgccaatagggactttccattgacgtcaatgggtggagtatttacggtaaactgcccacttggcagtacatcaagtgtatcatatgccaagtacgccccctattgacgtcaatgacggtaaatggcccgcctggcattatgcccagtacatgaccttatgggactttcctacttggcagtacatctacgtattagtcatcgctattaccatggtgatgcggttttggcagtacatcaatgggcgtggatagcggtttgactcacggggatttccaagtctccaccccattgacgtcaatgggagtttgttttggcaccaaaatcaacgggactttccaaaatgtcgtaacaactccgccccattgacgcaaatgggcggtaggcgtgtacggtgggaggtctatataagcagagctggtttagtgaaccgtcagatccgctagagatccgcggccgctaatacgactcactatagggagagccgccaccatgaaacggacagccgacggaagcgagttcgagtcaccaaagaagaagcggaaagtcctcgagaagtccctcaaaaagaatgacgccgtggtggccattatgaaagacctgctcgactccgtgaagtccttcgaaaattacattaaagcgttctttggggaggggaaggaaactaacagggatgagtccttctatggcgactttgtcctcgcgtacgacatcctgctgaaggtcgaccacatttacgacgcgatccgcaactacgtgacacagaagccgtactccaaagacaagttcaagctgtacttccagaacccgcaatttatggggggctgggacaaggataaagagacagactaccgcgcgacaattctccgctatggctccaaatactatctggccatcatggacaagaagtacgcgaagtgcctgcagaagatcgacaaagacgacgtcaatggcaactatgaaaagatcaactacaagctgctgccgggcccgaacaagatgctcccgaaggtgttcttcagcaagaagtggatggcctactacaatccaagcgaggatattcagaaaatctataaaaacgggaccttcaagaagggggacatgtttaacctcaacgactgccacaagctcattgatttcttcaaggatagcatttcccgctacccgaaatggtccaatgcgtacgattttaacttctccgagacagaaaagtacaaagacatcgcgggcttttacagggaggtggaggagcaagggtataaagtttcttttgaatccgcgagcaagaaggaagtcgacaagctcgtcgaggagggcaagctctacatgttccaaatttataacaaggacttttccgacaagagccatgggaccccaaacctccacaccatgtacttcaaactgctctttgacgagaacaaccacgggcaaatcaggctgagcggcggcgccgaattattcatgcgcagggcctccctcaagaaggaagagctggtcgtccatccagccaattccccgatcgcgaacaagaacccggacaatccgaaaaagaccaccaccctgtcctacgacgtctacaaggacaaacgcttcagcgaagaccagtacgaattacacatcccaattgcgattaataagtgcccaaagaatatcttcaaaattaatacagaggtcagggtgctgctcaaacacgacgacaatccgtatgtcatcggcattgacaggggcgagcgcaatctgctctatatcgtggtcgtggatgggaagggcaatattgtggagcagtactccctgaacgagattatcaacaacttcaatgggattaggattaagaccgactatcacagcctgctcgacaagaaagaaaaagagaggtttgaggcccgccaaaactggacctccattgagaatatcaaagaattaaaggccggctatatttcccaagtcgtccacaagatctgcgagctggtggagaaatatgacgccgtgattgcgctcgaagacttaaattctgggttcaagaactcccgcgtgaaggtggaaaaacaggtgtatcagaaattcgagaaaatgctgatcgacaaactcaattatatggtggataagaagtccaacccgtgtgccacagggggcgcgctgaagggctatcagatcaccaacaagttcgagagcttcaagagcatgagcacccagaacgggtttattttctacatcccggcgtggctcacctccaagattgacccgagcaccggcttcgtgaacctcctgaagacaaagtatacctccattgccgacagcaagaagtttatctcctccttcgaccgcattatgtatgtgccggaggaggacctcttcgagttcgccctcgactacaaaaacttcagccgcacagatgcggattacatcaagaagtggaagctgtactcctacgggaacaggatccgcatcttcaggaatccaaaaaaaaataacgtctttgactgggaggaagtgtgcctgacatccgcctacaaggaactgttcaataaatacggcatcaattaccagcagggcgacattcgcgccctcctctgtgagcagtccgacaaagcgttttactccagcttcatggccctcatgtccctgatgctccaaatgaggaatagcatcacagggcgcaccgacgtcgacttcctcatcagcccggtgaagaactccgacgggatcttttacgactcccgcaactatgaggcgcaagagaatgcgatcctcccgaagaacgccgatgcgaacggggcctataatatcgccaggaaagtgctctgggccatcgggcagttcaaaaaggcggaggatgagaagctcgacaaggtgaaaattgccatttccaacaaggagtggctggagtacgcgcagacctccgtgaagcacggctcctctggcagctccggctctagcggctcctctggcagctccggctccaagctggagaagtttacaaactgttacagcctctccaaaaccctcaggtttaaagcgatcccggtgggcaagacccaggagaacatcgacaacaagaggctcctggtggaagacgagaagcgcgccgaagactacaagggcgtgaagaagctgctcgataggtactacctcagctttattaacgacgtgctgcacagcatcaaactcaagaatctcaacaactacatctccctcttccgcaaaaagacccgcaccgagaaggagaacaaggagctggagaacctggagatcaacctccgcaaggaaatcgccaaagcgttcaagggcaatgaagggtacaagagcctcttcaagaaagacatcatcgaaactatcctcccagagtttctcgatgacaaggacgagatcgcgctggtgaactcctttaacgggttcacaaccgcgtttaccggcttctttgataacagggaaaatatgttctccgaggaggccaagtccaccagcatcgccttcaggtgtatcaacgagaacctcacccgctacatttccaatatggacattttcgagaaggtggatgcgatcttcgataagcacgaggtgcaggagatcaaagagaagattctcaattccgattatgacgtcgaggatttcttcgaaggggagttctttaattttgtgctcacacaagagggcattgacgtgtacaacgcgattatcgggggcttcgtcacagagtccggggagaagattaaggggctgaatgagtacatcaatctgtacaatcagaagaccaagcagaaactgccgaaattcaagccgctctacaagcaagtcctgtccgatagggaaagcctctccttctacggcgagggctataccagcgacgaggaggtgctggaagtcttccgcaacacactgaataagaatagcgagattttctcctccatcaagaagctcgagaagctctttaagaactttgacgagtacagctccgccgggattttcgtgaagaacgggccggcgatcagcaccatctccaaggacatctttggcgagtggaacgtcatcagggacaagtggaacgccgagtacgacgacatccacctgaagaagaaggcggtggtgaccgagaagtatgaggacgatcgcaggaagtccttcaaaaaaatcggctccttcagcctcgaacagctccaggagtatgccgatgcggatctgtccgtcgtcgagaagctgaaggaaatcatcattcagaaggtcgacgagatctataaagtgtacgggtccagcgagaagctgttcgacgccgactttgtgtctggcggctcaaaaagaaccgccgacggcagcgaattcgagcccaagaagaagaggaaagtcggaagcggagctactaacttcagcctgctgaagcaggctggagacgtggaggagaaccctggacctatggtgagcaagggcgaggagctgttcaccggggtggtgcccatcctggtcgagctggacggcgacgtaaacggccacaagttcagcgtgtccggcgagggcgagggcgatgccacctacggcaagctgaccctgaagttcatctgcaccaccggcaagctgcccgtgccctggcccaccctcgtgaccaccctgacctatggagtgcagtgcttcagccgctaccccgaccacatgaagcagcacgacttcttcaagtccgccatgcccgaaggctacgtccaggagcgcaccatcttcttcaaggacgacggcaactacaagacccgcgccgaggtgaagttcgagggcgacaccctggtgaaccgcatcgagctgaagggcatcgacttcaaggaggacggcaacatcctggggcacaagctggagtacaactacaacagccacaacgtctatatcatggccgacaagcagaagaacggcatcaaggtgaacttcaagatccgccacaacatcgaggacggcagcgtgcagctcgccgaccactaccagcagaacacccccatcggcgacggccccgtgctgctgcccgacaaccactacctgagcacccagtccgccctgagcaaagaccccaacgagaagcgcgatcacatggtcctgctggagttcgtgaccgccgccgggatcactctcggcatggacgagctgtacaagtctggtggttctcccaagaagaagaggaaagtctaaccggtcatcatcaccatcaccattgagtttaaacccgctgatcagcctcgactgtgccttctagttgccagccatctgttgtttgcccctcccccgtgccttccttgaccctggaaggtgccactcccactgtcctttcctaataaaatgaggaaattgcatcgcattgtctgagtaggtgtcattctattctggggggtggggtggggcaggacagcaagggggaggattgggaagacaatagcaggcatgctggggatgcggtgggctctatggcttctgaggcggaaagaaccagctggggctcgataccgtcgacctctagctagagcttggcgtaatcatggtcatagctgtttcctgtgtgaaattgttatccgctcacaattccacacaacatacgagccggaagcataaagtgtaaagcctagggtgcctaatgagtgagctaactcacattaattgcgttgcgctcactgcccgctttccagtcgggaaacctgtcgtgccagctgcattaatgaatcggccaacgcgcggggagaggcggtttgcgtattgggcgctcttccgcttcctcgctcactgactcgctgcgctcggtcgttcggctgcggcgagcggtatcagctcactcaaaggcggtaatacggttatccacagaatcaggggataacgcaggaaagaacatgtgagcaaaaggccagcaaaaggccaggaaccgtaaaaaggccgcgttgctggcgtttttccataggctccgcccccctgacgagcatcacaaaaatcgacgctcaagtcagaggtggcgaaacccgacaggactataaagataccaggcgtttccccctggaagctccctcgtgcgctctcctgttccgaccctgccgcttaccggatacctgtccgcctttctcccttcgggaagcgtggcgctttctcatagctcacgctgtaggtatctcagttcggtgtaggtcgttcgctccaagctgggctgtgtgcacgaaccccccgttcagcccgaccgctgcgccttatccggtaactatcgtcttgagtccaacccggtaagacacgacttatcgccactggcagcagccactggtaacaggattagcagagcgaggtatgtaggcggtgctacagagttcttgaagtggtggcctaactacggctacactagaagaacagtatttggtatctgcgctctgctgaagccagttaccttcggaaaaagagttggtagctcttgatccggcaaacaaaccaccgctggtagcggtggtttttttgtttgcaagcagcagattacgcgcagaaaaaaaggatctcaagaagatcctttgatcttttctacggggtctgacactcagtggaacgaaaactcacgttaagggattttggtcatgagattatcaaaaaggatcttcacctagatccttttaaattaaaaatgaagttttaaatcaatctaaagtatatatgagtaaacttggtctgacagttaccaatgcttaatcagtgaggcacctatctcagcgatctgtctatttcgttcatccatagttgcctgactccccgtcgtgtagataactacgatacgggagggcttaccatctggccccagtgctgcaatgataccgcgagacccacgctcaccggctccagatttatcagcaataaaccagccagccggaagggccgagcgcagaagtggtcctgcaactttatccgcctccatccagtctattaattgttgccgggaagctagagtaagtagttcgccagttaatagtttgcgcaacgttgttgccattgctacaggcatcgtggtgtcacgctcgtcgtttggtatggcttcattcagctccggttcccaacgatcaaggcgagttacatgatcccccatgttgtgcaaaaaagcggttagctccttcggtcctccgatcgttgtcagaagtaagttggccgcagtgttatcactcatggttatggcagcactgcataattctcttactgtcatgccatccgtaagatgcttttctgtgactggtgagtactcaaccaagtcattctgagaatagtgtatgcggcgaccgagttgctcttgcccggcgtcaatacgggataataccgcgccacatagcagaactttaaaagtgctcatcattggaaaacgttcttcggggcgaaaactctcaaggatcttaccgctgttgagatccagttcgatgtaacccactcgtgcacccaactgatcttcagcatcttttactttcaccagcgtttctgggtgagcaaaaacaggaaggcaaaatgccgcaaaaaagggaataagggcgacacggaaatgttgaatactcatactcttcctttttcaatattattgaagcatttatcagggttattgtctcatgagcggatacatatttgaatgtatttagaaaaataaacaaataggggttccgcgcacatttccccgaaaagtgccacctgacgtcgacggatcgggagatcgatctcccgatcccctagggtcgactctcagtacaatctgctctgatgccgcatagttaagccagtatctgctccctgcttgtgtgttggaggtcgctgagtagtgcgcgagcaaaatttaagctacaacaaggcaaggcttgaccgacaattgcatgaagaatctgcttagggttaggcgttttgcgctgcttcgcgatgtacgggccagatatacgcgtt

SEQ ID NO: 603 - DNA, 8067 bp, synthetic construct
  source 1..8067: mol_type = other DNA
gacattgattattgactagttattaatagtaatcaattacggggtcattagttcatagcccatatatggagttccgcgttacataacttacggtaaatggcccgcctggctgaccgcccaacgacccccgcccattgacgtcaataatgacgtatgttcccatagtaacgccaatagggactttccattgacgtcaatgggtggagtatttacggtaaactgcccacttggcagtacatcaagtgtatcatatgccaagtacgccccctattgacgtcaatgacggtaaatggcccgcctggcattatgcccagtacatgaccttatgggactttcctacttggcagtacatctacgtattagtcatcgctattaccatggtgatgcggttttggcagtacatcaatgggcgtggatagcggtttgactcacggggatttccaagtctccaccccattgacgtcaatgggagtttgttttggcaccaaaatcaacgggactttccaaaatgtcgtaacaactccgccccattgacgcaaatgggcggtaggcgtgtacggtgggaggtctatataagcagagctggtttagtgaaccgtcagatccgctagagatccgcggccgctaatacgactcactatagggagagccgccaccatgaaacggacagccgacggaagcgagttcgagtcaccaaagaagaagcggaaagtcaaaaagaatgacgccgtggtggccattatgaaagacctgctcgactccgtgaagtccttcgaaaattacattaaagcgttctttggggaggggaaggaaactaacagggatgagtccttctatggcgactttgtcctcgcgtacgacatcctgctgaaggtcgaccacatttacgacgcgatccgcaactacgtgacacagaagccgtactccaaagacaagttcaagctgtacttccagaacccgcaatttatggggggctgggacaaggataaagagacagactaccgcgcgacaattctccgctatggctccaaatactatctggccatcatggacaagaagtacgcgaagtgcctgcagaagatcgacaaagacgacgtcaatggcaactatgaaaagatcaactacaagctgctgccgggcccgaacaagatgctcccgaaggtgttcttcagcaagaagtggatggcctactacaatccaagcgaggatattcagaaaatctataaaaacgggaccttcaagaagggggacatgtttaacctcaacgactgccacaagctcattgatttcttcaaggatagcatttcccgctacccgaaatggtccaatgcgtacgattttaacttctccgagacagaaaagtacaaagacatcgcgggcttttacagggaggtggaggagcaagggtataaagtttcttttgaatccgcgagcaagaaggaagtcgacaagctcgtcgaggagggcaagctctacatgttccaaatttataacaaggacttttccgacaagagccatgggaccccaaacctccacaccatgtacttcaaactgctctttgacgagaacaaccacgggcaaatcaggctgagcggcggcgccgaattattcatgcgcagggcctccctcaagaaggaagagctggtcgtccatccagccaattccccgatcgcgaacaagaacccggacaatccgaaaaagaccaccaccctgtcctacgacgtctacaaggacaaacgcttcagcgaagaccagtacgaattacacatcccaattgcgattaataagtgcccaaagaatatcttcaaaattaatacagaggtcagggtgctgctcaaacacgacgacaatccgtatgtcatcggcattgacaggggcgagcgcaatctgctctatatcgtggtcgtggatgggaagggcaatattgtggagcagtactccctgaacgagattatcaacaacttcaatgggattaggattaagaccgactatcacagcctgctcgacaagaaagaaaaagagaggtttgaggcccgccaaaactggacctccattgagaatatcaaagaattaaaggccggctatatttcccaagtcgtccacaagatctgcgagctggtggagaaatatgacgccgtgattgcgctcgaagacttaaattctgggttcaagaactcccgcgtgaaggtggaaaaacaggtgtatcagaaattcgagaaaatgctgatcgacaaactcaattatatggtggataagaagtccaacccgtgtgccacagggggcgcgctgaagggctatcagatcaccaacaagttcgagagcttcaagagcatgagcacccagaacgggtttattttctacatcccggcgtggctcacctccaagattgacccgagcaccggcttcgtgaacctcctgaagacaaagtatacctccattgccgacagcaagaagtttatctcctccttcgaccgcattatgtatgtgccggaggaggacctcttcgagttcgccctcgactacaaaaacttcagccgcacagatgcggattacatcaagaagtggaagctgtactcctacgggaacaggatccgcatcttcaggaatccaaaaaaaaataacgtctttgactgggaggaagtgtgcctgacatccgcctacaaggaactgttcaataaatacggcatcaattaccagcagggcgacattcgcgccctcctctgtgagcagtccgacaaagcgttttactccagcttcatggccctcatgtccctgatgctccaaatgaggaatagcatcacagggcgcaccgacgtcgacttcctcatcagcccggtgaagaactccgacgggatcttttacgactcccgcaactatgaggcgcaagagaatgcgatcctcccgaagaacgccgatgcgaacggggcctataatatcgccaggaaagtgctctgggccatcgggcagttcaaaaaggcggaggatgagaagctcgacaaggtgaaaattgccatttccaacaaggagtggctggagtacgcgcagacctccgtgaagcacggctcctctggcagctccggctctagcggctcctctggcagctccggctccaagctggagaagtttacaaactgttacagcctctccaaaaccctcaggtttaaagcgatcccggtgggcaagacccaggagaacatcgacaacaagaggctcctggtggaagacgagaagcgcgccgaagactacaagggcgtgaagaagctgctcgataggtactacctcagctttattaacgacgtgctgcacagcatcaaactcaagaatctcaacaactacatctccctcttccgcaaaaagacccgcaccgagaaggagaacaaggagctggagaacctggagatcaacctccgcaaggaaatcgccaaagcgttcaagggcaatgaagggtacaagagcctcttcaagaaagacatcatcgaaactatcctcccagagtttctcgatgacaaggacgagatcgcgctggtgaactcctttaacgggttcacaaccgcgtttaccggcttctttgataacagggaaaatatgttctccgaggaggccaagtccaccagcatcgccttcaggtgtatcaacgagaacctcacccgctacatttccaatatggacattttcgagaaggtggatgcgatcttcgataagcacgaggtgcaggagatcaaagagaagattctcaattccgattatgacgtcgaggatttcttcgaaggggagttctttaattttgtgctcacacaagagggcattgacgtgtacaacgcgattatcgggggcttcgtcacagagtccggggagaagattaaggggctgaatgagtacatcaatctgtacaatcagaagaccaagcagaaactgccgaaattcaagccgctctacaagcaagtcctgtccgatagggaaagcctctccttctacggcgagggctataccagcgacgaggaggtgctggaagtcttccgcaacacactgaataagaatagcgagattttctcctccatcaagaagctcgagaagctctttaagaactttgacgagtacagctccgccgggattttcgtgaagaacgggccggcgatcagcaccatctccaaggacatctttggcgagtggaacgtcatcagggacaagtggaacgccgagtacgacgacatccacctgaagaagaaggcggtggtgaccgagaagtatgaggacgatcgcaggaagtccttcaaaaaaatcggctccttcagcctcgaacagctccaggagtatgccgatgcggatctgtccgtcgtcgagaagctgaaggaaatcatcattcagaaggtcgacgagatctataaagtgtacgggtccagcgagaagctgttcgacgccgactttgtgctcgagaagtccctctctggcggctcaaaaagaaccgccgacggcagcgaattcgagcccaagaagaagaggaaagtcggaagcggagctactaacttcagcctgctgaagcaggctggagacgtggaggagaaccctggacctatggtgagcaagggcgaggagctgttcaccggggtggtgcccatcctggtcgagctggacggcgacgtaaacggccacaagttcagcgtgtccggcgagggcgagggcgatgccacctacggcaagctgaccctgaagttcatctgcaccaccggcaagctgcccgtgccctggcccaccctcgtgaccaccctgacctatggagtgcagtgcttcagccgctaccccgaccacatgaagcagcacgacttcttcaagtccgccatgcccgaaggctacgtccaggagcgcaccatcttcttcaaggacgacggcaactacaagacccgcgccgaggtgaagttcgagggcgacaccctggtgaaccgcatcgagctgaagggcatcgacttcaaggaggacggcaacatcctggggcacaagctggagtacaactacaacagccacaacgtctatatcatggccgacaagcagaagaacggcatcaaggtgaacttcaagatccgccacaacatcgaggacggcagcgtgcagctcgccgaccactaccagcagaacacccccatcggcgacggccccgtgctgctgcccgacaaccactacctgagcacccagtccgccctgagcaaagaccccaacgagaagcgcgatcacatggtcctgctggagttcgtgaccgccgccgggatcactctcggcatggacgagctgtacaagtctggtggttctcccaagaagaagaggaaagtctaaccggtcatcatcaccatcaccattgagtttaaacccgctgatcagcctcgactgtgccttctagttgccagccatctgttgtttgcccctcccccgtgccttccttgaccctggaaggtgccactcccactgtcctttcctaataaaatgaggaaattgcatcgcattgtctgagtaggtgtcattctattctggggggtggggtggggcaggacagcaagggggaggattgggaagacaatagcaggcatgctggggatgcggtgggctctatggcttctgaggcggaaagaaccagctggggctcgataccgtcgacctctagctagagcttggcgtaatcatggtcatagctgtttcctgtgtgaaattgttatccgctcacaattccacacaacatacgagccggaagcataaagtgtaaagcctagggtgcctaatgagtgagctaactcacattaattgcgttgcgctcactgcccgctttccagtcgggaaacctgtcgtgccagctgcattaatgaatcggccaacgcgcggggagaggcggtttgcgtattgggcgctcttccgcttcctcgctcactgactcgctgcgctcggtcgttcggctgcggcgagcggtatcagctcactcaaaggcggtaatacggttatccacagaatcaggggataacgcaggaaagaacatgtgagcaaaaggccagcaaaaggccaggaaccgtaaaaaggccgcgttgctggcgtttttccataggctccgcccccctgacgagcatcacaaaaatcgacgctcaagtcagaggtggcgaaacccgacaggactataaagataccaggcgtttccccctggaagctccctcgtgcgctctcctgttccgaccctgccgcttaccggatacctgtccgcctttctcccttcgggaagcgtggcgctttctcatagctcacgctgtaggtatctcagttcggtgtaggtcgttcgctccaagctgggctgtgtgcacgaaccccccgttcagcccgaccgctgcgccttatccggtaactatcgtcttgagtccaacccggtaagacacgacttatcgccactggcagcagccactggtaacaggattagcagagcgaggtatgtaggcggtgctacagagttcttgaagtggtggcctaactacggctacactagaagaacagtatttggtatctgcgctctgctgaagccagttaccttcggaaaaagagttggtagctcttgatccggcaaacaaaccaccgctggtagcggtggtttttttgtttgcaagcagcagattacgcgcagaaaaaaaggatctcaagaagatcctttgatcttttctacggggtctgacactcagtggaacgaaaactcacgttaagggattttggtcatgagattatcaaaaaggatcttcacctagatccttttaaattaaaaatgaagttttaaatcaatctaaagtatatatgagtaaacttggtctgacagttaccaatgcttaatcagtgaggcacctatctcagcgatctgtctatttcgttcatccatagttgcctgactccccgtcgtgtagataactacgatacgggagggcttaccatctggccccagtgctgcaatgataccgcgagacccacgctcaccggctccagatttatcagcaataaaccagccagccggaagggccgagcgcagaagtggtcctgcaactttatccgcctccatccagtctattaattgttgccgggaagctagagtaagtagttcgccagttaatagtttgcgcaacgttgttgccattgctacaggcatcgtggtgtcacgctcgtcgtttggtatggcttcattcagctccggttcccaacgatcaaggcgagttacatgatcccccatgttgtgcaaaaaagcggttagctccttcggtcctccgatcgttgtcagaagtaagttggccgcagtgttatcactcatggttatggcagcactgcataattctcttactgtcatgccatccgtaagatgcttttctgtgactggtgagtactcaaccaagtcattctgagaatagtgtatgcggcgaccgagttgctcttgcccggcgtcaatacgggataataccgcgccacatagcagaactttaaaagtgctcatcattggaaaacgttcttcggggcgaaaactctcaaggatcttaccgctgttgagatccagttcgatgtaacccactcgtgcacccaactgatcttcagcatcttttactttcaccagcgtttctgggtgagcaaaaacaggaaggcaaaatgccgcaaaaaagggaataagggcgacacggaaatgttgaatactcatactcttcctttttcaatattattgaagcatttatcagggttattgtctcatgagcggatacatatttgaatgtatttagaaaaataaacaaataggggttccgcgcacatttccccgaaaagtgccacctgacgtcgacggatcgggagatcgatctcccgatcccctagggtcgactctcagtacaatctgctctgatgccgcatagttaagccagtatctgctccctgcttgtgtgttggaggtcgctgagtagtgcgcgagcaaaatttaagctacaacaaggcaaggcttgaccgacaattgcatgaagaatctgcttagggttaggcgttttgcgctgcttcgcgatgtacgggccagatatacgcgtt

SEQ ID NO: 604 - DNA, 8067 bp, synthetic construct
  source 1..8067: mol_type = other DNA
gacattgattattgactagttattaatagtaatcaattacggggtcattagttcatagcccatatatggagttccgcgttacataacttacggtaaatggcccgcctggctgaccgcccaacgacccccgcccattgacgtcaataatgacgtatgttcccatagtaacgccaatagggactttccattgacgtcaatgggtggagtatttacggtaaactgcccacttggcagtacatcaagtgtatcatatgccaagtacgccccctattgacgtcaatgacggtaaatggcccgcctggcattatgcccagtacatgaccttatgggactttcctacttggcagtacatctacgtattagtcatcgctattaccatggtgatgcggttttggcagtacatcaatgggcgtggatagcggtttgactcacggggatttccaagtctccaccccattgacgtcaatgggagtttgttttggcaccaaaatcaacgggactttccaaaatgtcgtaacaactccgccccattgacgcaaatgggcggtaggcgtgtacggtgggaggtctatataagcagagctggtttagtgaaccgtcagatccgctagagatccgcggccgctaatacgactcactatagggagagccgccaccatgaaacggacagccgacggaagcgagttcgagtcaccaaagaagaagcggaaagtcgacgccgtggtggccattatgaaagacctgctcgactccgtgaagtccttcgaaaattacattaaagcgttctttggggaggggaaggaaactaacagggatgagtccttctatggcgactttgtcctcgcgtacgacatcctgctgaaggtcgaccacatttacgacgcgatccgcaactacgtgacacagaagccgtactccaaagacaagttcaagctgtacttccagaacccgcaatttatggggggctgggacaaggataaagagacagactaccgcgcgacaattctccgctatggctccaaatactatctggccatcatggacaagaagtacgcgaagtgcctgcagaagatcgacaaagacgacgtcaatggcaactatgaaaagatcaactacaagctgctgccgggcccgaacaagatgctcccgaaggtgttcttcagcaagaagtggatggcctactacaatccaagcgaggatattcagaaaatctataaaaacgggaccttcaagaagggggacatgtttaacctcaacgactgccacaagctcattgatttcttcaaggatagcatttcccgctacccgaaatggtccaatgcgtacgattttaacttctccgagacagaaaagtacaaagacatcgcgggcttttacagggaggtggaggagcaagggtataaagtttcttttgaatccgcgagcaagaaggaagtcgacaagctcgtcgaggagggcaagctctacatgttccaaatttataacaaggacttttccgacaagagccatgggaccccaaacctccacaccatgtacttcaaactgctctttgacgagaacaaccacgggcaaatcaggctgagcggcggcgccgaattattcatgcgcagggcctccctcaagaaggaagagctggtcgtccatccagccaattccccgatcgcgaacaagaacccggacaatccgaaaaagaccaccaccctgtcctacgacgtctacaaggacaaacgcttcagcgaagaccagtacgaattacacatcccaattgcgattaataagtgcccaaagaatatcttcaaaattaatacagaggtcagggtgctgctcaaacacgacgacaatccgtatgtcatcggcattgacaggggcgagcgcaatctgctctatatcgtggtcgtggatgggaagggcaatattgtggagcagtactccctgaacgagattatcaacaacttcaatgggattaggattaagaccgactatcacagcctgctcgacaagaaagaaaaagagaggtttgaggcccgccaaaactggacctccattgagaatatcaaagaattaaaggccggctatatttcccaagtcgtccacaagatctgcgagctggtggagaaatatgacgccgtgattgcgctcgaagacttaaattctgggttcaagaactcccgcgtgaaggtggaaaaacaggtgtatcagaaattcgagaaaatgctgatcgacaaactcaattatatggtggataagaagtccaacccgtgtgccacagggggcgcgctgaagggctatcagatcaccaacaagttcgagagcttcaagagcatgagcacccagaacgggtttattttctacatcccggcgtggctcacctccaagattgacccgagcaccggcttcgtgaacctcctgaagacaaagtatacctccattgccgacagcaagaagtttatctcctccttcgaccgcattatgtatgtgccggaggaggacctcttcgagttcgccctcgactacaaaaacttcagccgcacagatgcggattacatcaagaagtggaagctgtactcctacgggaacaggatccgcatcttcaggaatccaaaaaaaaataacgtctttgactgggaggaagtgtgcctgacatccgcctacaaggaactgttcaataaatacggcatcaattaccagcagggcgacattcgcgccctcctctgtgagcagtccgacaaagcgttttactccagcttcatggccctcatgtccctgatgctccaaatgaggaatagcatcacagggcgcaccgacgtcgacttcctcatcagcccggtgaagaactccgacgggatcttttacgactcccgcaactatgaggcgcaagagaatgcgatcctcccgaagaacgccgatgcgaacggggcctataatatcgccaggaaagtgctctgggccatcgggcagttcaaaaaggcggaggatgagaagctcgacaaggtgaaaattgccatttccaacaaggagtggctggagtacgcgcagacctccgtgaagcacggctcctctggcagctccggctctagcggctcctctggcagctccggctccaagctggagaagtttacaaactgttacagcctctccaaaaccctcaggtttaaagcgatcccggtgggcaagacccaggagaacatcgacaacaagaggctcctggtggaagacgagaagcgcgccgaagactacaagggcgtgaagaagctgctcgataggtactacctcagctttattaacgacgtgctgcacagcatcaaactcaagaatctcaacaactacatctccctcttccgcaaaaagacccgcaccgagaaggagaacaaggagctggagaacctggagatcaacctccgcaaggaaatcgccaaagcgttcaagggcaatgaagggtacaagagcctcttcaagaaagacatcatcgaaactatcctcccagagtttctcgatgacaaggacgagatcgcgctggtgaactcctttaacgggttcacaaccgcgtttaccggcttctttgataacagggaaaatatgttctccgaggaggccaagtccaccagcatcgccttcaggtgtatcaacgagaacctcacccgctacatttccaatatggacattttcgagaaggtggatgcgatcttcgataagcacgaggtgcaggagatcaaagagaagattctcaattccgattatgacgtcgaggatttcttcgaaggggagttctttaattttgtgctcacacaagagggcattgacgtgtacaacgcgattatcgggggcttcgtcacagagtccggggagaagattaaggggctgaatgagtacatcaatctgtacaatcagaagaccaagcagaaactgccgaaattcaagccgctctacaagcaagtcctgtccgatagggaaagcctctccttctacggcgagggctataccagcgacgaggaggtgctggaagtcttccgcaacacactgaataagaatagcgagattttctcctccatcaagaagctcgagaagctctttaagaactttgacgagtacagctccgccgggattttcgtgaagaacgggccggcgatcagcaccatctccaaggacatctttggcgagtggaacgtcatcagggacaagtggaacgccgagtacgacgacatccacctgaagaagaaggcggtggtgaccgagaagtatgaggacgatcgcaggaagtccttcaaaaaaatcggctccttcagcctcgaacagctccaggagtatgccgatgcggatctgtccgtcgtcgagaagctgaaggaaatcatcattcagaaggtcgacgagatctataaagtgtacgggtccagcgagaagctgttcgacgccgactttgtgctcgagaagtccctcaaaaagaattctggcggctcaaaaagaaccgccgacggcagcgaattcgagcccaagaagaagaggaaagtcggaagcggagctactaacttcagcctgctgaagcaggctggagacgtggaggagaaccctggacctatggtgagcaagggcgaggagctgttcaccggggtggtgcccatcctggtcgagctggacggcgacgtaaacggccacaagttcagcgtgtccggcgagggcgagggcgatgccacctacggcaagctgaccctgaagttcatctgcaccaccggcaagctgcccgtgccctggcccaccctcgtgaccaccctgacctatggagtgcagtgcttcagccgctaccccgaccacatgaagcagcacgacttcttcaagtccgccatgcccgaaggctacgtccaggagcgcaccatcttcttcaaggacgacggcaactacaagacccgcgccgaggtgaagttcgagggcgacaccctggtgaaccgcatcgagctgaagggcatcgacttcaaggaggacggcaacatcctggggcacaagctggagtacaactacaacagccacaacgtctatatcatggccgacaagcagaagaacggcatcaaggtgaacttcaagatccgccacaacatcgaggacggcagcgtgcagctcgccgaccactaccagcagaacacccccatcggcgacggccccgtgctgctgcccgacaaccactacctgagcacccagtccgccctgagcaaagaccccaacgagaagcgcgatcacatggtcctgctggagttcgtgaccgccgccgggatcactctcggcatggacgagctgtacaagtctggtggttctcccaagaagaagaggaaagtctaaccggtcatcatcaccatcaccattgagtttaaacccgctgatcagcctcgactgtgccttctagttgccagccatctgttgtttgcccctcccccgtgccttccttgaccctggaaggtgccactcccactgtcctttcctaataaaatgaggaaattgcatcgcattgtctgagtaggtgtcattctattctggggggtggggtggggcaggacagcaagggggaggattgggaagacaatagcaggcatgctggggatgcggtgggctctatggcttctgaggcggaaagaaccagctggggctcgataccgtcgacctctagctagagcttggcgtaatcatggtcatagctgtttcctgtgtgaaattgttatccgctcacaattccacacaacatacgagccggaagcataaagtgtaaagcctagggtgcctaatgagtgagctaactcacattaattgcgttgcgctcactgcccgctttccagtcgggaaacctgtcgtgccagctgcattaatgaatcggccaacgcgcggggagaggcggtttgcgtattgggcgctcttccgcttcctcgctcactgactcgctgcgctcggtcgttcggctgcggcgagcggtatcagctcactcaaaggcggtaatacggttatccacagaatcaggggataacgcaggaaagaacatgtgagcaaaaggccagcaaaaggccaggaaccgtaaaaaggccgcgttgctggcgtttttccataggctccgcccccctgacgagcatcacaaaaatcgacgctcaagtcagaggtggcgaaacccgacaggactataaagataccaggcgtttccccctggaagctccctcgtgcgctctcctgttccgaccctgccgcttaccggatacctgtccgcctttctcccttcgggaagcgtggcgctttctcatagctcacgctgtaggtatctcagttcggtgtaggtcgttcgctccaagctgggctgtgtgcacgaaccccccgttcagcccgaccgctgcgccttatccggtaactatcgtcttgagtccaacccggtaagacacgacttatcgccactggcagcagccactggtaacaggattagcagagcgaggtatgtaggcggtgctacagagttcttgaagtggtggcctaactacggctacactagaagaacagtatttggtatctgcgctctgctgaagccagttaccttcggaaaaagagttggtagctcttgatccggcaaacaaaccaccgctggtagcggtggtttttttgtttgcaagcagcagattacgcgcagaaaaaaaggatctcaagaagatcctttgatcttttctacggggtctgacactcagtggaacgaaaactcacgttaagggattttggtcatgagattatcaaaaaggatcttcacctagatccttttaaattaaaaatgaagttttaaatcaatctaaagtatatatgagtaaacttggtctgacagttaccaatgcttaatcagtgaggcacctatctcagcgatctgtctatttcgttcatccatagttgcctgactccccgtcgtgtagataactacgatacgggagggcttaccatctggccccagtgctgcaatgataccgcgagacccacgctcaccggctccagatttatcagcaataaaccagccagccggaagggccgagcgcagaagtggtcctgcaactttatccgcctccatccagtctattaattgttgccgggaagctagagtaagtagttcgccagttaatagtttgcgcaacgttgttgccattgctacaggcatcgtggtgtcacgctcgtcgtttggtatggcttcattcagctccggttcccaacgatcaaggcgagttacatgatcccccatgttgtgcaaaaaagcggttagctccttcggtcctccgatcgttgtcagaagtaagttggccgcagtgttatcactcatggttatggcagcactgcataattctcttactgtcatgccatccgtaagatgcttttctgtgactggtgagtactcaaccaagtcattctgagaatagtgtatgcggcgaccgagttgctcttgcccggcgtcaatacgggataataccgcgccacatagcagaactttaaaagtgctcatcattggaaaacgttcttcggggcgaaaactctcaaggatcttaccgctgttgagatccagttcgatgtaacccactcgtgcacccaactgatcttcagcatcttttactttcaccagcgtttctgggtgagcaaaaacaggaaggcaaaatgccgcaaaaaagggaataagggcgacacggaaatgttgaatactcatactcttcctttttcaatattattgaagcatttatcagggttattgtctcatgagcggatacatatttgaatgtatttagaaaaataaacaaataggggttccgcgcacatttccccgaaaagtgccacctgacgtcgacggatcgggagatcgatctcccgatcccctagggtcgactctcagtacaatctgctctgatgccgcatagttaagccagtatctgctccctgcttgtgtgttggaggtcgctgagtagtgcgcgagcaaaatttaagctacaacaaggcaaggcttgaccgacaattgcatgaagaatctgcttagggttaggcgttttgcgctgcttcgcgatgtacgggccagatatacgcgtt

SEQ ID NO: 605 - DNA, 8067 bp, synthetic construct
  source 1..8067: mol_type = other DNA
gacattgattattgactagttattaatagtaatcaattacggggtcattagttcatagcccatatatggagttccgcgttacataacttacggtaaatggcccgcctggctgaccgcccaacgacccccgcccattgacgtcaataatgacgtatgttcccatagtaacgccaatagggactttccattgacgtcaatgggtggagtatttacggtaaactgcccacttggcagtacatcaagtgtatcatatgccaagtacgccccctattgacgtcaatgacggtaaatggcccgcctggcattatgcccagtacatgaccttatgggactttcctacttggcagtacatctacgtattagtcatcgctattaccatggtgatgcggttttggcagtacatcaatgggcgtggatagcggtttgactcacggggatttccaagtctccaccccattgacgtcaatgggagtttgttttggcaccaaaatcaacgggactttccaaaatgtcgtaacaactccgccccattgacgcaaatgggcggtaggcgtgtacggtgggaggtctatataagcagagctggtttagtgaaccgtcagatccgctagagatccgcggccgctaatacgactcactatagggagagccgccaccatgaaacggacagccgacggaagcgagttcgagtcaccaaagaagaagcggaaagtcgagcagtccgacaaagcgttttactccagcttcatggccctcatgtccctgatgctccaaatgaggaatagcatcacagggcgcaccgacgtcgacttcctcatcagcccggtgaagaactccgacgggatcttttacgactcccgcaactatgaggcgcaagagaatgcgatcctcccgaagaacgccgatgcgaacggggcctataatatcgccaggaaagtgctctgggccatcgggcagttcaaaaaggcggaggatgagaagctcgacaaggtgaaaattgccatttccaacaaggagtggctggagtacgcgcagacctccgtgaagcacggctcctctggcagctccggctctagcggctcctctggcagctccggctccaagctggagaagtttacaaactgttacagcctctccaaaaccctcaggtttaaagcgatcccggtgggcaagacccaggagaacatcgacaacaagaggctcctggtggaagacgagaagcgcgccgaagactacaagggcgtgaagaagctgctcgataggtactacctcagctttattaacgacgtgctgcacagcatcaaactcaagaatctcaacaactacatctccctcttccgcaaaaagacccgcaccgagaaggagaacaaggagctggagaacctggagatcaacctccgcaaggaaatcgccaaagcgttcaagggcaatgaagggtacaagagcctcttcaagaaagacatcatcgaaactatcctcccagagtttctcgatgacaaggacgagatcgcgctggtgaactcctttaacgggttcacaaccgcgtttaccggcttctttgataacagggaaaatatgttctccgaggaggccaagtccaccagcatcgccttcaggtgtatcaacgagaacctcacccgctacatttccaatatggacattttcgagaaggtggatgcgatcttcgataagcacgaggtgcaggagatcaaagagaagattctcaattccgattatgacgtcgaggatttcttcgaaggggagttctttaattttgtgctcacacaagagggcattgacgtgtacaacgcgattatcgggggcttcgtcacagagtccggggagaagattaaggggctgaatgagtacatcaatctgtacaatcagaagaccaagcagaaactgccgaaattcaagccgctctacaagcaagtcctgtccgatagggaaagcctctccttctacggcgagggctataccagcgacgaggaggtgctggaagtcttccgcaacacactgaataagaatagcgagattttctcctccatcaagaagctcgagaagctctttaagaactttgacgagtacagctccgccgggattttcgtgaagaacgggccggcgatcagcaccatctccaaggacatctttggcgagtggaacgtcatcagggacaagtggaacgccgagtacgacgacatccacctgaagaagaaggcggtggtgaccgagaagtatgaggacgatcgcaggaagtccttcaaaaaaatcggctccttcagcctcgaacagctccaggagtatgccgatgcggatctgtccgtcgtcgagaagctgaaggaaatcatcattcagaaggtcgacgagatctataaagtgtacgggtccagcgagaagctgttcgacgccgactttgtgctcgagaagtccctcaaaaagaatgacgccgtggtggccattatgaaagacctgctcgactccgtgaagtccttcgaaaattacattaaagcgttctttggggaggggaaggaaactaacagggatgagtccttctatggcgactttgtcctcgcgtacgacatcctgctgaaggtcgaccacatttacgacgcgatccgcaactacgtgacacagaagccgtactccaaagacaagttcaagctgtacttccagaacccgcaatttatggggggctgggacaaggataaagagacagactaccgcgcgacaattctccgctatggctccaaatactatctggccatcatggacaagaagtacgcgaagtgcctgcagaagatcgacaaagacgacgtcaatggcaactatgaaaagatcaactacaagctgctgccgggcccgaacaagatgctcccgaaggtgttcttcagcaagaagtggatggcctactacaatccaagcgaggatattcagaaaatctataaaaacgggaccttcaagaagggggacatgtttaacctcaacgactgccacaagctcattgatttcttcaaggatagcatttcccgctacccgaaatggtccaatgcgtacgattttaacttctccgagacagaaaagtacaaagacatcgcgggcttttacagggaggtggaggagcaagggtataaagtttcttttgaatccgcgagcaagaaggaagtcgacaagctcgtcgaggagggcaagctctacatgttccaaatttataacaaggacttttccgacaagagccatgggaccccaaacctccacaccatgtacttcaaactgctctttgacgagaacaaccacgggcaaatcaggctgagcggcggcgccgaattattcatgcgcagggcctccctcaagaaggaagagctggtcgtccatccagccaattccccgatcgcgaacaagaacccggacaatccgaaaaagaccaccaccctgtcctacgacgtctacaaggacaaacgcttcagcgaagaccagtacgaattacacatcccaattgcgattaataagtgcccaaagaatatcttcaaaattaatacagaggtcagggtgctgctcaaacacgacgacaatccgtatgtcatcggcattgacaggggcgagcgcaatctgctctatatcgtggtcgtggatgggaagggcaatattgtggagcagtactccctgaacgagattatcaacaacttcaatgggattaggattaagaccgactatcacagcctgctcgacaagaaagaaaaagagaggtttgaggcccgccaaaactggacctccattgagaatatcaaagaattaaaggccggctatatttcccaagtcgtccacaagatctgcgagctggtggagaaatatgacgccgtgattgcgctcgaagacttaaattctgggttcaagaactcccgcgtgaaggtggaaaaacaggtgtatcagaaattcgagaaaatgctgatcgacaaactcaattatatggtggataagaagtccaacccgtgtgccacagggggcgcgctgaagggctatcagatcaccaacaagttcgagagcttcaagagcatgagcacccagaacgggtttattttctacatcccggcgtggctcacctccaagattgacccgagcaccggcttcgtgaacctcctgaagacaaagtatacctccattgccgacagcaagaagtttatctcctccttcgaccgcattatgtatgtgccggaggaggacctcttcgagttcgccctcgactacaaaaacttcagccgcacagatgcggattacatcaagaagtggaagctgtactcctacgggaacaggatccgcatcttcaggaatccaaaaaaaaataacgtctttgactgggaggaagtgtgcctgacatccgcctacaaggaactgttcaataaatacggcatcaattaccagcagggcgacattcgcgccctcctctgttctggcggctcaaaaagaaccgccgacggcagcgaattcgagcccaagaagaagaggaaagtcggaagcggagctactaacttcagcctgctgaagcaggctggagacgtggaggagaaccctggacctatggtgagcaagggcgaggagctgttcaccggggtggtgcccatcctggtcgagctggacggcgacgtaaacggccacaagttcagcgtgtccggcgagggcgagggcgatgccacctacggcaagctgaccctgaagttcatctgcaccaccggcaagctgcccgtgccctggcccaccctcgtgaccaccctgacctatggagtgcagtgcttcagccgctaccccgaccacatgaagcagcacgacttcttcaagtccgccatgcccgaaggctacgtccaggagcgcaccatcttcttcaaggacgacggcaactacaagacccgcgccgaggtgaagttcgagggcgacaccctggtgaaccgcatcgagctgaagggcatcgacttcaaggaggacggcaacatcctggggcacaagctggagtacaactacaacagccacaacgtctatatcatggccgacaagcagaagaacggcatcaaggtgaacttcaagatccgccacaacatcgaggacggcagcgtgcagctcgccgaccactaccagcagaacacccccatcggcgacggccccgtgctgctgcccgacaaccactacctgagcacccagtccgccctgagcaaagaccccaacgagaagcgcgatcacatggtcctgctggagttcgtgaccgccgccgggatcactctcggcatggacgagctgtacaagtctggtggttctcccaagaagaagaggaaagtctaaccggtcatcatcaccatcaccattgagtttaaacccgctgatcagcctcgactgtgccttctagttgccagccatctgttgtttgcccctcccccgtgccttccttgaccctggaaggtgccactcccactgtcctttcctaataaaatgaggaaattgcatcgcattgtctgagtaggtgtcattctattctggggggtggggtggggcaggacagcaagggggaggattgggaagacaatagcaggcatgctggggatgcggtgggctctatggcttctgaggcggaaagaaccagctggggctcgataccgtcgacctctagctagagcttggcgtaatcatggtcatagctgtttcctgtgtgaaattgttatccgctcacaattccacacaacatacgagccggaagcataaagtgtaaagcctagggtgcctaatgagtgagctaactcacattaattgcgttgcgctcactgcccgctttccagtcgggaaacctgtcgtgccagctgcattaatgaatcggccaacgcgcggggagaggcggtttgcgtattgggcgctcttccgcttcctcgctcactgactcgctgcgctcggtcgttcggctgcggcgagcggtatcagctcactcaaaggcggtaatacggttatccacagaatcaggggataacgcaggaaagaacatgtgagcaaaaggccagcaaaaggccaggaaccgtaaaaaggccgcgttgctggcgtttttccataggctccgcccccctgacgagcatcacaaaaatcgacgctcaagtcagaggtggcgaaacccgacaggactataaagataccaggcgtttccccctggaagctccctcgtgcgctctcctgttccgaccctgccgcttaccggatacctgtccgcctttctcccttcgggaagcgtggcgctttctcatagctcacgctgtaggtatctcagttcggtgtaggtcgttcgctccaagctgggctgtgtgcacgaaccccccgttcagcccgaccgctgcgccttatccggtaactatcgtcttgagtccaacccggtaagacacgacttatcgccactggcagcagccactggtaacaggattagcagagcgaggtatgtaggcggtgctacagagttcttgaagtggtggcctaactacggctacactagaagaacagtatttggtatctgcgctctgctgaagccagttaccttcggaaaaagagttggtagctcttgatccggcaaacaaaccaccgctggtagcggtggtttttttgtttgcaagcagcagattacgcgcagaaaaaaaggatctcaagaagatcctttgatcttttctacggggtctgacactcagtggaacgaaaactcacgttaagggattttggtcatgagattatcaaaaaggatcttcacctagatccttttaaattaaaaatgaagttttaaatcaatctaaagtatatatgagtaaacttggtctgacagttaccaatgcttaatcagtgaggcacctatctcagcgatctgtctatttcgttcatccatagttgcctgactccccgtcgtgtagataactacgatacgggagggcttaccatctggccccagtgctgcaatgataccgcgagacccacgctcaccggctccagatttatcagcaataaaccagccagccggaagggccgagcgcagaagtggtcctgcaactttatccgcctccatccagtctattaattgttgccgggaagctagagtaagtagttcgccagttaatagtttgcgcaacgttgttgccattgctacaggcatcgtggtgtcacgctcgtcgtttggtatggcttcattcagctccggttcccaacgatcaaggcgagttacatgatcccccatgttgtgcaaaaaagcggttagctccttcggtcctccgatcgttgtcagaagtaagttggccgcagtgttatcactcatggttatggcagcactgcataattctcttactgtcatgccatccgtaagatgcttttctgtgactggtgagtactcaaccaagtcattctgagaatagtgtatgcggcgaccgagttgctcttgcccggcgtcaatacgggataataccgcgccacatagcagaactttaaaagtgctcatcattggaaaacgttcttcggggcgaaaactctcaaggatcttaccgctgttgagatccagttcgatgtaacccactcgtgcacccaactgatcttcagcatcttttactttcaccagcgtttctgggtgagcaaaaacaggaaggcaaaatgccgcaaaaaagggaataagggcgacacggaaatgttgaatactcatactcttcctttttcaatattattgaagcatttatcagggttattgtctcatgagcggatacatatttgaatgtatttagaaaaataaacaaataggggttccgcgcacatttccccgaaaagtgccacctgacgtcgacggatcgggagatcgatctcccgatcccctagggtcgactctcagtacaatctgctctgatgccgcatagttaagccagtatctgctccctgcttgtgtgttggaggtcgctgagtagtgcgcgagcaaaatttaagctacaacaaggcaaggcttgaccgacaattgcatgaagaatctgcttagggttaggcgttttgcgctgcttcgcgatgtacgggccagatatacgcgtt

SEQ ID NO: 606 - DNA, 8067 bp, synthetic construct
  source 1..8067: mol_type = other DNA
gacattgattattgactagttattaatagtaatcaattacggggtcattagttcatagcccatatatggagttccgcgttacataacttacggtaaatggcccgcctggctgaccgcccaacgacccccgcccattgacgtcaataatgacgtatgttcccatagtaacgccaatagggactttccattgacgtcaatgggtggagtatttacggtaaactgcccacttggcagtacatcaagtgtatcatatgccaagtacgccccctattgacgtcaatgacggtaaatggcccgcctggcattatgcccagtacatgaccttatgggactttcctacttggcagtacatctacgtattagtcatcgctattaccatggtgatgcggttttggcagtacatcaatgggcgtggatagcggtttgactcacggggatttccaagtctccaccccattgacgtcaatgggagtttgttttggcaccaaaatcaacgggactttccaaaatgtcgtaacaactccgccccattgacgcaaatgggcggtaggcgtgtacggtgggaggtctatataagcagagctggtttagtgaaccgtcagatccgctagagatccgcggccgctaatacgactcactatagggagagccgccaccatgaaacggacagccgacggaagcgagttcgagtcaccaaagaagaagcggaaagtccagtccgacaaagcgttttactccagcttcatggccctcatgtccctgatgctccaaatgaggaatagcatcacagggcgcaccgacgtcgacttcctcatcagcccggtgaagaactccgacgggatcttttacgactcccgcaactatgaggcgcaagagaatgcgatcctcccgaagaacgccgatgcgaacggggcctataatatcgccaggaaagtgctctgggccatcgggcagttcaaaaaggcggaggatgagaagctcgacaaggtgaaaattgccatttccaacaaggagtggctggagtacgcgcagacctccgtgaagcacggctcctctggcagctccggctctagcggctcctctggcagctccggctccaagctggagaagtttacaaactgttacagcctctccaaaaccctcaggtttaaagcgatcccggtgggcaagacccaggagaacatcgacaacaagaggctcctggtggaagacgagaagcgcgccgaagactacaagggcgtgaagaagctgctcgataggtactacctcagctttattaacgacgtgctgcacagcatcaaactcaagaatctcaacaactacatctccctcttccgcaaaaagacccgcaccgagaaggagaacaaggagctggagaacctggagatcaacctccgcaaggaaatcgccaaagcgttcaagggcaatgaagggtacaagagcctcttcaagaaagacatcatcgaaactatcctcccagagtttctcgatgacaaggacgagatcgcgctggtgaactcctttaacgggttcacaaccgcgtttaccggcttctttgataacagggaaaatatgttctccgaggaggccaagtccaccagcatcgccttcaggtgtatcaacgagaacctcacccgctacatttccaatatggacattttcgagaaggtggatgcgatcttcgataagcacgaggtgcaggagatcaaagagaagattctcaattccgattatgacgtcgaggatttcttcgaaggggagttctttaattttgtgctcacacaagagggcattgacgtgtacaacgcgattatcgggggcttcgtcacagagtccggggagaagattaaggggctgaatgagtacatcaatctgtacaatcagaagaccaagcagaaactgccgaaattcaagccgctctacaagcaagtcctgtccgatagggaaagcctctccttctacggcgagggctataccagcgacgaggaggtgctggaagtcttccgcaacacactgaataagaatagcgagattttctcctccatcaagaagctcgagaagctctttaagaactttgacgagtacagctccgccgggattttcgtgaagaacgggccggcgatcagcaccatctccaaggacatctttggcgagtggaacgtcatcagggacaagtggaacgccgagtacgacgacatccacctgaagaagaaggcggtggtgaccgagaagtatgaggacgatcgcaggaagtccttcaaaaaaatcggctccttcagcctcgaacagctccaggagtatgccgatgcggatctgtccgtcgtcgagaagctgaaggaaatcatcattcagaaggtcgacgagatctataaagtgtacgggtccagcgagaagctgttcgacgccgactttgtgctcgagaagtccctcaaaaagaatgacgccgtggtggccattatgaaagacctgctcgactccgtgaagtccttcgaaaattacattaaagcgttctttggggaggggaaggaaactaacagggatgagtccttctatggcgactttgtcctcgcgtacgacatcctgctgaaggtcgaccacatttacgacgcgatccgcaactacgtgacacagaagccgtactccaaagacaagttcaagctgtacttccagaacccgcaatttatggggggctgggacaaggataaagagacagactaccgcgcgacaattctccgctatggctccaaatactatctggccatcatggacaagaagtacgcgaagtgcctgcagaagatcgacaaagacgacgtcaatggcaactatgaaaagatcaactacaagctgctgccgggcccgaacaagatgctcccgaaggtgttcttcagcaagaagtggatggcctactacaatccaagcgaggatattcagaaaatctataaaaacgggaccttcaagaagggggacatgtttaacctcaacgactgccacaagctcattgatttcttcaaggatagcatttcccgctacccgaaatggtccaatgcgtacgattttaacttctccgagacagaaaagtacaaagacatcgcgggcttttacagggaggtggaggagcaagggtataaagtttcttttgaatccgcgagcaagaaggaagtcgacaagctcgtcgaggagggcaagctctacatgttccaaatttataacaaggacttttccgacaagagccatgggaccccaaacctccacaccatgtacttcaaactgctctttgacgagaacaaccacgggcaaatcaggctgagcggcggcgccgaattattcatgcgcagggcctccctcaagaaggaagagctggtcgtccatccagccaattccccgatcgcgaacaagaacccggacaatccgaaaaagaccaccaccctgtcctacgacgtctacaaggacaaacgcttcagcgaagaccagtacgaattacacatcccaattgcgattaataagtgcccaaagaatatcttcaaaattaatacagaggtcagggtgctgctcaaacacgacgacaatccgtatgtcatcggcattgacaggggcgagcgcaatctgctctatatcgtggtcgtggatgggaagggcaatattgtggagcagtactccctgaacgagattatcaacaacttcaatgggattaggattaagaccgactatcacagcctgctcgacaagaaagaaaaagagaggtttgaggcccgccaaaactggacctccattgagaatatcaaagaattaaaggccggctatatttcccaagtcgtccacaagatctgcgagctggtggagaaatatgacgccgtgattgcgctcgaagacttaaattctgggttcaagaactcccgcgtgaaggtggaaaaacaggtgtatcagaaattcgagaaaatgctgatcgacaaactcaattatatggtggataagaagtccaacccgtgtgccacagggggcgcgctgaagggctatcagatcaccaacaagttcgagagcttcaagagcatgagcacccagaacgggtttattttctacatcccggcgtggctcacctccaagattgacccgagcaccggcttcgtgaacctcctgaagacaaagtatacctccattgccgacagcaagaagtttatctcctccttcgaccgcattatgtatgtgccggaggaggacctcttcgagttcgccctcgactacaaaaacttcagccgcacagatgcggattacatcaagaagtggaagctgtactcctacgggaacaggatccgcatcttcaggaatccaaaaaaaaataacgtctttgactgggaggaagtgtgcctgacatccgcctacaaggaactgttcaataaatacggcatcaattaccagcagggcgacattcgcgccctcctctgtgagtctggcggctcaaaaagaaccgccgacggcagcgaattcgagcccaagaagaagaggaaagtcggaagcggagctactaacttcagcctgctgaagcaggctggagacgtggaggagaaccctggacctatggtgagcaagggcgaggagctgttcaccggggtggtgcccatcctggtcgagctggacggcgacgtaaacggccacaagttcagcgtgtccggcgagggcgagggcgatgccacctacggcaagctgaccctgaagttcatctgcaccaccggcaagctgcccgtgccctggcccaccctcgtgaccaccctgacctatggagtgcagtgcttcagccgctaccccgaccacatgaagcagcacgacttcttcaagtccgccatgcccgaaggctacgtccaggagcgcaccatcttcttcaaggacgacggcaactacaagacccgcgccgaggtgaagttcgagggcgacaccctggtgaaccgcatcgagctgaagggcatcgacttcaaggaggacggcaacatcctggggcacaagctggagtacaactacaacagccacaacgtctatatcatggccgacaagcagaagaacggcatcaaggtgaacttcaagatccgccacaacatcgaggacggcagcgtgcagctcgccgaccactaccagcagaacacccccatcggcgacggccccgtgctgctgcccgacaaccactacctgagcacccagtccgccctgagcaaagaccccaacgagaagcgcgatcacatggtcctgctggagttcgtgaccgccgccgggatcactctcggcatggacgagctgtacaagtctggtggttctcccaagaagaagaggaaagtctaaccggtcatcatcaccatcaccattgagtttaaacccgctgatcagcctcgactgtgccttctagttgccagccatctgttgtttgcccctcccccgtgccttccttgaccctggaaggtgccactcccactgtcctttcctaataaaatgaggaaattgcatcgcattgtctgagtaggtgtcattctattctggggggtggggtggggcaggacagcaagggggaggattgggaagacaatagcaggcatgctggggatgcggtgggctctatggcttctgaggcggaaagaaccagctggggctcgataccgtcgacctctagctagagcttggcgtaatcatggtcatagctgtttcctgtgtgaaattgttatccgctcacaattccacacaacatacgagccggaagcataaagtgtaaagcctagggtgcctaatgagtgagctaactcacattaattgcgttgcgctcactgcccgctttccagtcgggaaacctgtcgtgccagctgcattaatgaatcggccaacgcgcggggagaggcggtttgcgtattgggcgctcttccgcttcctcgctcactgactcgctgcgctcggtcgttcggctgcggcgagcggtatcagctcactcaaaggcggtaatacggttatccacagaatcaggggataacgcaggaaagaacatgtgagcaaaaggccagcaaaaggccaggaaccgtaaaaaggccgcgttgctggcgtttttccataggctccgcccccctgacgagcatcacaaaaatcgacgctcaagtcagaggtggcgaaacccgacaggactataaagataccaggcgtttccccctggaagctccctcgtgcgctctcctgttccgaccctgccgcttaccggatacctgtccgcctttctcccttcgggaagcgtggcgctttctcatagctcacgctgtaggtatctcagttcggtgtaggtcgttcgctccaagctgggctgtgtgcacgaaccccccgttcagcccgaccgctgcgccttatccggtaactatcgtcttgagtccaacccggtaagacacgacttatcgccactggcagcagccactggtaacaggattagcagagcgaggtatgtaggcggtgctacagagttcttgaagtggtggcctaactacggctacactagaagaacagtatttggtatctgcgctctgctgaagccagttaccttcggaaaaagagttggtagctcttgatccggcaaacaaaccaccgctggtagcggtggtttttttgtttgcaagcagcagattacgcgcagaaaaaaaggatctcaagaagatcctttgatcttttctacggggtctgacactcagtggaacgaaaactcacgttaagggattttggtcatgagattatcaaaaaggatcttcacctagatccttttaaattaaaaatgaagttttaaatcaatctaaagtatatatgagtaaacttggtctgacagttaccaatgcttaatcagtgaggcacctatctcagcgatctgtctatttcgttcatccatagttgcctgactccccgtcgtgtagataactacgatacgggagggcttaccatctggccccagtgctgcaatgataccgcgagacccacgctcaccggctccagatttatcagcaataaaccagccagccggaagggccgagcgcagaagtggtcctgcaactttatccgcctccatccagtctattaattgttgccgggaagctagagtaagtagttcgccagttaatagtttgcgcaacgttgttgccattgctacaggcatcgtggtgtcacgctcgtcgtttggtatggcttcattcagctccggttcccaacgatcaaggcgagttacatgatcccccatgttgtgcaaaaaagcggttagctccttcggtcctccgatcgttgtcagaagtaagttggccgcagtgttatcactcatggttatggcagcactgcataattctcttactgtcatgccatccgtaagatgcttttctgtgactggtgagtactcaaccaagtcattctgagaatagtgtatgcggcgaccgagttgctcttgcccggcgtcaatacgggataataccgcgccacatagcagaactttaaaagtgctcatcattggaaaacgttcttcggggcgaaaactctcaaggatcttaccgctgttgagatccagttcgatgtaacccactcgtgcacccaactgatcttcagcatcttttactttcaccagcgtttctgggtgagcaaaaacaggaaggcaaaatgccgcaaaaaagggaataagggcgacacggaaatgttgaatactcatactcttcctttttcaatattattgaagcatttatcagggttattgtctcatgagcggatacatatttgaatgtatttagaaaaataaacaaataggggttccgcgcacatttccccgaaaagtgccacctgacgtcgacggatcgggagatcgatctcccgatcccctagggtcgactctcagtacaatctgctctgatgccgcatagttaagccagtatctgctccctgcttgtgtgttggaggtcgctgagtagtgcgcgagcaaaatttaagctacaacaaggcaaggcttgaccgacaattgcatgaagaatctgcttagggttaggcgttttgcgctgcttcgcgatgtacgggccagatatacgcgtt

SEQ ID NO: 607 - DNA, 8067 bp, synthetic construct
  source 1..8067: mol_type = other DNA
gacattgattattgactagttattaatagtaatcaattacggggtcattagttcatagcccatatatggagttccgcgttacataacttacggtaaatggcccgcctggctgaccgcccaacgacccccgcccattgacgtcaataatgacgtatgttcccatagtaacgccaatagggactttccattgacgtcaatgggtggagtatttacggtaaactgcccacttggcagtacatcaagtgtatcatatgccaagtacgccccctattgacgtcaatgacggtaaatggcccgcctggcattatgcccagtacatgaccttatgggactttcctacttggcagtacatctacgtattagtcatcgctattaccatggtgatgcggttttggcagtacatcaatgggcgtggatagcggtttgactcacggggatttccaagtctccaccccattgacgtcaatgggagtttgttttggcaccaaaatcaacgggactttccaaaatgtcgtaacaactccgccccattgacgcaaatgggcggtaggcgtgtacggtgggaggtctatataagcagagctggtttagtgaaccgtcagatccgctagagatccgcggccgctaatacgactcactatagggagagccgccaccatgaaacggacagccgacggaagcgagttcgagtcaccaaagaagaagcggaaagtcaaagcgttttactccagcttcatggccctcatgtccctgatgctccaaatgaggaatagcatcacagggcgcaccgacgtcgacttcctcatcagcccggtgaagaactccgacgggatcttttacgactcccgcaactatgaggcgcaagagaatgcgatcctcccgaagaacgccgatgcgaacggggcctataatatcgccaggaaagtgctctgggccatcgggcagttcaaaaaggcggaggatgagaagctcgacaaggtgaaaattgccatttccaacaaggagtggctggagtacgcgcagacctccgtgaagcacggctcctctggcagctccggctctagcggctcctctggcagctccggctccaagctggagaagtttacaaactgttacagcctctccaaaaccctcaggtttaaagcgatcccggtgggcaagacccaggagaacatcgacaacaagaggctcctggtggaagacgagaagcgcgccgaagactacaagggcgtgaagaagctgctcgataggtactacctcagctttattaacgacgtgctgcacagcatcaaactcaagaatctcaacaactacatctccctcttccgcaaaaagacccgcaccgagaaggagaacaaggagctggagaacctggagatcaacctccgcaaggaaatcgccaaagcgttcaagggcaatgaagggtacaagagcctcttcaagaaagacatcatcgaaactatcctcccagagtttctcgatgacaaggacgagatcgcgctggtgaactcctttaacgggttcacaaccgcgtttaccggcttctttgataacagggaaaatatgttctccgaggaggccaagtccaccagcatcgccttcaggtgtatcaacgagaacctcacccgctacatttccaatatggacattttcgagaaggtggatgcgatcttcgataagcacgaggtgcaggagatcaaagagaagattctcaattccgattatgacgtcgaggatttcttcgaaggggagttctttaattttgtgctcacacaagagggcattgacgtgtacaacgcgattatcgggggcttcgtcacagagtccggggagaagattaaggggctgaatgagtacatcaatctgtacaatcagaagaccaagcagaaactgccgaaattcaagccgctctacaagcaagtcctgtccgatagggaaagcctctccttctacggcgagggctataccagcgacgaggaggtgctggaagtcttccgcaacacactgaataagaatagcgagattttctcctccatcaagaagctcgagaagctctttaagaactttgacgagtacagctccgccgggattttcgtgaagaacgggccggcgatcagcaccatctccaaggacatctttggcgagtggaacgtcatcagggacaagtggaacgccgagtacgacgacatccacctgaagaagaaggcggtggtgaccgagaagtatgaggacgatcgcaggaagtccttcaaaaaaatcggctccttcagcctcgaacagctccaggagtatgccgatgcggatctgtccgtcgtcgagaagctgaaggaaatcatcattcagaaggtcgacgagatctataaagtgtacgggtccagcgagaagctgttcgacgccgactttgtgctcgagaagtccctcaaaaagaatgacgccgtggtggccattatgaaagacctgctcgactccgtgaagtccttcgaaaattacattaaagcgttctttggggaggggaaggaaactaacagggatgagtccttctatggcgactttgtcctcgcgtacgacatcctgctgaaggtcgaccacatttacgacgcgatccgcaactacgtgacacagaagccgtactccaaagacaagttcaagctgtacttccagaacccgcaatttatggggggctgggacaaggataaagagacagactaccgcgcgacaattctccgctatggctccaaatactatctggccatcatggacaagaagtacgcgaagtgcctgcagaagatcgacaaagacgacgtcaatggcaactatgaaaagatcaactacaagctgctgccgggcccgaacaagatgctcccgaaggtgttcttcagcaagaagtggatggcctactacaatccaagcgaggatattcagaaaatctataaaaacgggaccttcaagaagggggacatgtttaacctcaacgactgccacaagctcattgatttcttcaaggatagcatttcccgctacccgaaatggtccaatgcgtacgattttaacttctccgagacagaaaagtacaaagacatcgcgggcttttacagggaggtggaggagcaagggtataaagtttcttttgaatccgcgagcaagaaggaagtcgacaagctcgtcgaggagggcaagctctacatgttccaaatttataacaaggacttttccgacaagagccatgggaccccaaacctccacaccatgtacttcaaactgctctttgacgagaacaaccacgggcaaatcaggctgagcggcggcgccgaattattcatgcgcagggcctccctcaagaaggaagagctggtcgtccatccagccaattccccgatcgcgaacaagaacccggacaatccgaaaaagaccaccaccctgtcctacgacgtctacaaggacaaacgcttcagcgaagaccagtacgaattacacatcccaattgcgattaataagtgcccaaagaatatcttcaaaattaatacagaggtcagggtgctgctcaaacacgacgacaatccgtatgtcatcggcattgacaggggcgagcgcaatctgctctatatcgtggtcgtggatgggaagggcaatattgtggagcagtactccctgaacgagattatcaacaacttcaatgggattaggattaagaccgactatcacagcctgctcgacaagaaagaaaaagagaggtttgaggcccgccaaaactggacctccattgagaatatcaaagaattaaaggccggctatatttcccaagtcgtccacaagatctgcgagctggtggagaaatatgacgccgtgattgcgctcgaagacttaaattctgggttcaagaactcccgcgtgaaggtggaaaaacaggtgtatcagaaattcgagaaaatgctgatcgacaaactcaattatatggtggataagaagtccaacccgtgtgccacagggggcgcgctgaagggctatcagatcaccaacaagttcgagagcttcaagagcatgagcacccagaacgggtttattttctacatcccggcgtggctcacctccaagattgacccgagcaccggcttcgtgaacctcctgaagacaaagtatacctccattgccgacagcaagaagtttatctcctccttcgaccgcattatgtatgtgccggaggaggacctcttcgagttcgccctcgactacaaaaacttcagccgcacagatgcggattacatcaagaagtggaagctgtactcctacgggaacaggatccgcatcttcaggaatccaaaaaaaaataacgtctttgactgggaggaagtgtgcctgacatccgcctacaaggaactgttcaataaatacggcatcaattaccagcagggcgacattcgcgccctcctctgtgagcagtccgactctggcggctcaaaaagaaccgccgacggcagcgaattcgagcccaagaagaagaggaaagtcggaagcggagctactaacttcagcctgctgaagcaggctggagacgtggaggagaaccctggacctatggtgagcaagggcgaggagctgttcaccggggtggtgcccatcctggtcgagctggacggcgacgtaaacggccacaagttcagcgtgtccggcgagggcgagggcgatgccacctacggcaagctgaccctgaagttcatctgcaccaccggcaagctgcccgtgccctggcccaccctcgtgaccaccctgacctatggagtgcagtgcttcagccgctaccccgaccacatgaagcagcacgacttcttcaagtccgccatgcccgaaggctacgtccaggagcgcaccatcttcttcaaggacgacggcaactacaagacccgcgccgaggtgaagttcgagggcgacaccctggtgaaccgcatcgagctgaagggcatcgacttcaaggaggacggcaacatcctggggcacaagctggagtacaactacaacagccacaacgtctatatcatggccgacaagcagaagaacggcatcaaggtgaacttcaagatccgccacaacatcgaggacggcagcgtgcagctcgccgaccactaccagcagaacacccccatcggcgacggccccgtgctgctgcccgacaaccactacctgagcacccagtccgccctgagcaaagaccccaacgagaagcgcgatcacatggtcctgctggagttcgtgaccgccgccgggatcactctcggcatggacgagctgtacaagtctggtggttctcccaagaagaagaggaaagtctaaccggtcatcatcaccatcaccattgagtttaaacccgctgatcagcctcgactgtgccttctagttgccagccatctgttgtttgcccctcccccgtgccttccttgaccctggaaggtgccactcccactgtcctttcctaataaaatgaggaaattgcatcgcattgtctgagtaggtgtcattctattctggggggtggggtggggcaggacagcaagggggaggattgggaagacaatagcaggcatgctggggatgcggtgggctctatggcttctgaggcggaaagaaccagctggggctcgataccgtcgacctctagctagagcttggcgtaatcatggtcatagctgtttcctgtgtgaaattgttatccgctcacaattccacacaacatacgagccggaagcataaagtgtaaagcctagggtgcctaatgagtgagctaactcacattaattgcgttgcgctcactgcccgctttccagtcgggaaacctgtcgtgccagctgcattaatgaatcggccaacgcgcggggagaggcggtttgcgtattgggcgctcttccgcttcctcgctcactgactcgctgcgctcggtcgttcggctgcggcgagcggtatcagctcactcaaaggcggtaatacggttatccacagaatcaggggataacgcaggaaagaacatgtgagcaaaaggccagcaaaaggccaggaaccgtaaaaaggccgcgttgctggcgtttttccataggctccgcccccctgacgagcatcacaaaaatcgacgctcaagtcagaggtggcgaaacccgacaggactataaagataccaggcgtttccccctggaagctccctcgtgcgctctcctgttccgaccctgccgcttaccggatacctgtccgcctttctcccttcgggaagcgtggcgctttctcatagctcacgctgtaggtatctcagttcggtgtaggtcgttcgctccaagctgggctgtgtgcacgaaccccccgttcagcccgaccgctgcgccttatccggtaactatcgtcttgagtccaacccggtaagacacgacttatcgccactggcagcagccactggtaacaggattagcagagcgaggtatgtaggcggtgctacagagttcttgaagtggtggcctaactacggctacactagaagaacagtatttggtatctgcgctctgctgaagccagttaccttcggaaaaagagttggtagctcttgatccggcaaacaaaccaccgctggtagcggtggtttttttgtttgcaagcagcagattacgcgcagaaaaaaaggatctcaagaagatcctttgatcttttctacggggtctgacactcagtggaacgaaaactcacgttaagggattttggtcatgagattatcaaaaaggatcttcacctagatccttttaaattaaaaatgaagttttaaatcaatctaaagtatatatgagtaaacttggtctgacagttaccaatgcttaatcagtgaggcacctatctcagcgatctgtctatttcgttcatccatagttgcctgactccccgtcgtgtagataactacgatacgggagggcttaccatctggccccagtgctgcaatgataccgcgagacccacgctcaccggctccagatttatcagcaataaaccagccagccggaagggccgagcgcagaagtggtcctgcaactttatccgcctccatccagtctattaattgttgccgggaagctagagtaagtagttcgccagttaatagtttgcgcaacgttgttgccattgctacaggcatcgtggtgtcacgctcgtcgtttggtatggcttcattcagctccggttcccaacgatcaaggcgagttacatgatcccccatgttgtgcaaaaaagcggttagctccttcggtcctccgatcgttgtcagaagtaagttggccgcagtgttatcactcatggttatggcagcactgcataattctcttactgtcatgccatccgtaagatgcttttctgtgactggtgagtactcaaccaagtcattctgagaatagtgtatgcggcgaccgagttgctcttgcccggcgtcaatacgggataataccgcgccacatagcagaactttaaaagtgctcatcattggaaaacgttcttcggggcgaaaactctcaaggatcttaccgctgttgagatccagttcgatgtaacccactcgtgcacccaactgatcttcagcatcttttactttcaccagcgtttctgggtgagcaaaaacaggaaggcaaaatgccgcaaaaaagggaataagggcgacacggaaatgttgaatactcatactcttcctttttcaatattattgaagcatttatcagggttattgtctcatgagcggatacatatttgaatgtatttagaaaaataaacaaataggggttccgcgcacatttccccgaaaagtgccacctgacgtcgacggatcgggagatcgatctcccgatcccctagggtcgactctcagtacaatctgctctgatgccgcatagttaagccagtatctgctccctgcttgtgtgttggaggtcgctgagtagtgcgcgagcaaaatttaagctacaacaaggcaaggcttgaccgacaattgcatgaagaatctgcttagggttaggcgttttgcgctgcttcgcgatgtacgggccagatatacgcgtt

SEQ ID NO: 608 - DNA, 8067 bp, synthetic construct
  source 1..8067: mol_type = other DNA
gacattgattattgactagttattaatagtaatcaattacggggtcattagttcatagcccatatatggagttccgcgttacataacttacggtaaatggcccgcctggctgaccgcccaacgacccccgcccattgacgtcaataatgacgtatgttcccatagtaacgccaatagggactttccattgacgtcaatgggtggagtatttacggtaaactgcccacttggcagtacatcaagtgtatcatatgccaagtacgccccctattgacgtcaatgacggtaaatggcccgcctggcattatgcccagtacatgaccttatgggactttcctacttggcagtacatctacgtattagtcatcgctattaccatggtgatgcggttttggcagtacatcaatgggcgtggatagcggtttgactcacggggatttccaagtctccaccccattgacgtcaatgggagtttgttttggcaccaaaatcaacgggactttccaaaatgtcgtaacaactccgccccattgacgcaaatgggcggtaggcgtgtacggtgggaggtctatataagcagagctggtttagtgaaccgtcagatccgctagagatccgcggccgctaatacgactcactatagggagagccgccaccatgaaacggacagccgacggaagcgagttcgagtcaccaaagaagaagcggaaagtcgcgttttactccagcttcatggccctcatgtccctgatgctccaaatgaggaatagcatcacagggcgcaccgacgtcgacttcctcatcagcccggtgaagaactccgacgggatcttttacgactcccgcaactatgaggcgcaagagaatgcgatcctcccgaagaacgccgatgcgaacggggcctataatatcgccaggaaagtgctctgggccatcgggcagttcaaaaaggcggaggatgagaagctcgacaaggtgaaaattgccatttccaacaaggagtggctggagtacgcgcagacctccgtgaagcacggctcctctggcagctccggctctagcggctcctctggcagctccggctccaagctggagaagtttacaaactgttacagcctctccaaaaccctcaggtttaaagcgatcccggtgggcaagacccaggagaacatcgacaacaagaggctcctggtggaagacgagaagcgcgccgaagactacaagggcgtgaagaagctgctcgataggtactacctcagctttattaacgacgtgctgcacagcatcaaactcaagaatctcaacaactacatctccctcttccgcaaaaagacccgcaccgagaaggagaacaaggagctggagaacctggagatcaacctccgcaaggaaatcgccaaagcgttcaagggcaatgaagggtacaagagcctcttcaagaaagacatcatcgaaactatcctcccagagtttctcgatgacaaggacgagatcgcgctggtgaactcctttaacgggttcacaaccgcgtttaccggcttctttgataacagggaaaatatgttctccgaggaggccaagtccaccagcatcgccttcaggtgtatcaacgagaacctcacccgctacatttccaatatggacattttcgagaaggtggatgcgatcttcgataagcacgaggtgcaggagatcaaagagaagattctcaattccgattatgacgtcgaggatttcttcgaaggggagttctttaattttgtgctcacacaagagggcattgacgtgtacaacgcgattatcgggggcttcgtcacagagtccggggagaagattaaggggctgaatgagtacatcaatctgtacaatcagaagaccaagcagaaactgccgaaattcaagccgctctacaagcaagtcctgtccgatagggaaagcctctccttctacggcgagggctataccagcgacgaggaggtgctggaagtcttccgcaacacactgaataagaatagcgagattttctcctccatcaagaagctcgagaagctctttaagaactttgacgagtacagctccgccgggattttcgtgaagaacgggccggcgatcagcaccatctccaaggacatctttggcgagtggaacgtcatcagggacaagtggaacgccgagtacgacgacatccacctgaagaagaaggcggtggtgaccgagaagtatgaggacgatcgcaggaagtccttcaaaaaaatcggctccttcagcctcgaacagctccaggagtatgccgatgcggatctgtccgtcgtcgagaagctgaaggaaatcatcattcagaaggtcgacgagatctataaagtgtacgggtccagcgagaagctgttcgacgccgactttgtgctcgagaagtccctcaaaaagaatgacgccgtggtggccattatgaaagacctgctcgactccgtgaagtccttcgaaaattacattaaagcgttctttggggaggggaaggaaactaacagggatgagtccttctatggcgactttgtcctcgcgtacgacatcctgctgaaggtcgaccacatttacgacgcgatccgcaactacgtgacacagaagccgtactccaaagacaagttcaagctgtacttccagaacccgcaatttatggggggctgggacaaggataaagagacagactaccgcgcgacaattctccgctatggctccaaatactatctggccatcatggacaagaagtacgcgaagtgcctgcagaagatcgacaaagacgacgtcaatggcaactatgaaaagatcaactacaagctgctgccgggcccgaacaagatgctcccgaaggtgttcttcagcaagaagtggatggcctactacaatccaagcgaggatattcagaaaatctataaaaacgggaccttcaagaagggggacatgtttaacctcaacgactgccacaagctcattgatttcttcaaggatagcatttcccgctacccgaaatggtccaatgcgtacgattttaacttctccgagacagaaaagtacaaagacatcgcgggcttttacagggaggtggaggagcaagggtataaagtttcttttgaatccgcgagcaagaaggaagtcgacaagctcgtcgaggagggcaagctctacatgttccaaatttataacaaggacttttccgacaagagccatgggaccccaaacctccacaccatgtacttcaaactgctctttgacgagaacaaccacgggcaaatcaggctgagcggcggcgccgaattattcatgcgcagggcctccctcaagaaggaagagctggtcgtccatccagccaattccccgatcgcgaacaagaacccggacaatccgaaaaagaccaccaccctgtcctacgacgtctacaaggacaaacgcttcagcgaagaccagtacgaattacacatcccaattgcgattaataagtgcccaaagaatatcttcaaaattaatacagaggtcagggtgctgctcaaacacgacgacaatccgtatgtcatcggcattgacaggggcgagcgcaatctgctctatatcgtggtcgtggatgggaagggcaatattgtggagcagtactccctgaacgagattatcaacaacttcaatgggattaggattaagaccgactatcacagcctgctcgacaagaaagaaaaagagaggtttgaggcccgccaaaactggacctccattgagaatatcaaagaattaaaggccggctatatttcccaagtcgtccacaagatctgcgagctggtggagaaatatgacgccgtgattgcgctcgaagacttaaattctgggttcaagaactcccgcgtgaaggtggaaaaacaggtgtatcagaaattcgagaaaatgctgatcgacaaactcaattatatggtggataagaagtccaacccgtgtgccacagggggcgcgctgaagggctatcagatcaccaacaagttcgagagcttcaagagcatgagcacccagaacgggtttattttctacatcccggcgtggctcacctccaagattgacccgagcaccggcttcgtgaacctcctgaagacaaagtatacctccattgccgacagcaagaagtttatctcctccttcgaccgcattatgtatgtgccggaggaggacctcttcgagttcgccctcgactacaaaaacttcagccgcacagatgcggattacatcaagaagtggaagctgtactcctacgggaacaggatccgcatcttcaggaatccaaaaaaaaataacgtctttgactgggaggaagtgtgcctgacatccgcctacaaggaactgttcaataaatacggcatcaattaccagcagggcgacattcgcgccctcctctgtgagcagtccgacaaatctggcggctcaaaaagaaccgccgacggcagcgaattcgagcccaagaagaagaggaaagtcggaagcggagctactaacttcagcctgctgaagcaggctggagacgtggaggagaaccctggacctatggtgagcaagggcgaggagctgttcaccggggtggtgcccatcctggtcgagctggacggcgacgtaaacggccacaagttcagcgtgtccggcgagggcgagggcgatgccacctacggcaagctgaccctgaagttcatctgcaccaccggcaagctgcccgtgccctggcccaccctcgtgaccaccctgacctatggagtgcagtgcttcagccgctaccccgaccacatgaagcagcacgacttcttcaagtccgccatgcccgaaggctacgtccaggagcgcaccatcttcttcaaggacgacggcaactacaagacccgcgccgaggtgaagttcgagggcgacaccctggtgaaccgcatcgagctgaagggcatcgacttcaaggaggacggcaacatcctggggcacaagctggagtacaactacaacagccacaacgtctatatcatggccgacaagcagaagaacggcatcaaggtgaacttcaagatccgccacaacatcgaggacggcagcgtgcagctcgccgaccactaccagcagaacacccccatcggcgacggccccgtgctgctgcccgacaaccactacctgagcacccagtccgccctgagcaaagaccccaacgagaagcgcgatcacatggtcctgctggagttcgtgaccgccgccgggatcactctcggcatggacgagctgtacaagtctggtggttctcccaagaagaagaggaaagtctaaccggtcatcatcaccatcaccattgagtttaaacccgctgatcagcctcgactgtgccttctagttgccagccatctgttgtttgcccctcccccgtgccttccttgaccctggaaggtgccactcccactgtcctttcctaataaaatgaggaaattgcatcgcattgtctgagtaggtgtcattctattctggggggtggggtggggcaggacagcaagggggaggattgggaagacaatagcaggcatgctggggatgcggtgggctctatggcttctgaggcggaaagaaccagctggggctcgataccgtcgacctctagctagagcttggcgtaatcatggtcatagctgtttcctgtgtgaaattgttatccgctcacaattccacacaacatacgagccggaagcataaagtgtaaagcctagggtgcctaatgagtgagctaactcacattaattgcgttgcgctcactgcccgctttccagtcgggaaacctgtcgtgccagctgcattaatgaatcggccaacgcgcggggagaggcggtttgcgtattgggcgctcttccgcttcctcgctcactgactcgctgcgctcggtcgttcggctgcggcgagcggtatcagctcactcaaaggcggtaatacggttatccacagaatcaggggataacgcaggaaagaacatgtgagcaaaaggccagcaaaaggccaggaaccgtaaaaaggccgcgttgctggcgtttttccataggctccgcccccctgacgagcatcacaaaaatcgacgctcaagtcagaggtggcgaaacccgacaggactataaagataccaggcgtttccccctggaagctccctcgtgcgctctcctgttccgaccctgccgcttaccggatacctgtccgcctttctcccttcgggaagcgtggcgctttctcatagctcacgctgtaggtatctcagttcggtgtaggtcgttcgctccaagctgggctgtgtgcacgaaccccccgttcagcccgaccgctgcgccttatccggtaactatcgtcttgagtccaacccggtaagacacgacttatcgccactggcagcagccactggtaacaggattagcagagcgaggtatgtaggcggtgctacagagttcttgaagtggtggcctaactacggctacactagaagaacagtatttggtatctgcgctctgctgaagccagttaccttcggaaaaagagttggtagctcttgatccggcaaacaaaccaccgctggtagcggtggtttttttgtttgcaagcagcagattacgcgcagaaaaaaaggatctcaagaagatcctttgatcttttctacggggtctgacactcagtggaacgaaaactcacgttaagggattttggtcatgagattatcaaaaaggatcttcacctagatccttttaaattaaaaatgaagttttaaatcaatctaaagtatatatgagtaaacttggtctgacagttaccaatgcttaatcagtgaggcacctatctcagcgatctgtctatttcgttcatccatagttgcctgactccccgtcgtgtagataactacgatacgggagggcttaccatctggccccagtgctgcaatgataccgcgagacccacgctcaccggctccagatttatcagcaataaaccagccagccggaagggccgagcgcagaagtggtcctgcaactttatccgcctccatccagtctattaattgttgccgggaagctagagtaagtagttcgccagttaatagtttgcgcaacgttgttgccattgctacaggcatcgtggtgtcacgctcgtcgtttggtatggcttcattcagctccggttcccaacgatcaaggcgagttacatgatcccccatgttgtgcaaaaaagcggttagctccttcggtcctccgatcgttgtcagaagtaagttggccgcagtgttatcactcatggttatggcagcactgcataattctcttactgtcatgccatccgtaagatgcttttctgtgactggtgagtactcaaccaagtcattctgagaatagtgtatgcggcgaccgagttgctcttgcccggcgtcaatacgggataataccgcgccacatagcagaactttaaaagtgctcatcattggaaaacgttcttcggggcgaaaactctcaaggatcttaccgctgttgagatccagttcgatgtaacccactcgtgcacccaactgatcttcagcatcttttactttcaccagcgtttctgggtgagcaaaaacaggaaggcaaaatgccgcaaaaaagggaataagggcgacacggaaatgttgaatactcatactcttcctttttcaatattattgaagcatttatcagggttattgtctcatgagcggatacatatttgaatgtatttagaaaaataaacaaataggggttccgcgcacatttccccgaaaagtgccacctgacgtcgacggatcgggagatcgatctcccgatcccctagggtcgactctcagtacaatctgctctgatgccgcatagttaagccagtatctgctccctgcttgtgtgttggaggtcgctgagtagtgcgcgagcaaaatttaagctacaacaaggcaaggcttgaccgacaattgcatgaagaatctgcttagggttaggcgttttgcgctgcttcgcgatgtacgggccagatatacgcgtt

SEQ ID NO: 609 - protein, 1433 aa, synthetic construct
SEVEFSHEYWMRHALTLAKRARDEREVPVGAVLVLNNRVIGEGWNRAIGLHDPTAHAEIMALRQGGLVMQNYRLIDATLYVTFEPCVMCAGAMIHSRIGRVVFGVRNSKRGAAGSLMNVLNYPGMNHRVEITEGILADECAALLCDFYRMPRQVFNAQKKAQSSINSGGSSGSETPGTSESATPESSGGSRTEKENKELENLEINLRKEIAKAFKGNEGYKSLFKKDIIETILPEFLDDKDEIALVNSFNGFTTAFTGFFDNRENMFSEEAKSTSIAFRCINENLTRYISNMDIFEKVDAIFDKHEVQEIKEKILNSDYDVEDFFEGEFFNFVLTQEGIDVYNAIIGGFVTESGEKIKGLNEYINLYNQKTKQKLPKFKPLYKQVLSDRESLSFYGEGYTSDEEVLEVFRNTLNKNSEIFSSIKKLEKLFKNFDEYSSAGIFVKNGPAISTISKDIFGEWNVIRDKWNAEYDDIHLKKKAVVTEKYEDDRRKSFKKIGSFSLEQLQEYADADLSVVEKLKEIIIQKVDEIYKVYGSSEKLFDADFVLEKSLKKNDAVVAIMKDLLDSVKSFENYIKAFFGEGKETNRDESFYGDFVLAYDILLKVDHIYDAIRNYVTQKPYSKDKFKLYFQNPQFMGGWDKDKETDYRATILRYGSKYYLAIMDKKYAKCLQKIDKDDVNGNYEKINYKLLPGPNKMLPKVFFSKKWMAYYNPSEDIQKIYKNGTFKKGDMFNLNDCHKLIDFFKDSISRYPKWSNAYDFNFSETEKYKDIAGFYREVEEQGYKVSFESASKKEVDKLVEEGKLYMFQIYNKDFSDKSHGTPNLHTMYFKLLFDENNHGQIRLSGGAELFMRRASLKKEELVVHPANSPIANKNPDNPKKTTTLSYDVYKDKRFSEDQYELHIPIAINKCPKNIFKINTEVRVLLKHDDNPYVIGIARGERNLLYIVVVDGKGNIVEQYSLNEIINNFNGIRIKTDYHSLLDKKEKERFEARQNWTSIENIKELKAGYISQVVHKICELVEKYDAVIALEDLNSGFKNSRVKVEKQVYQKFEKMLIDKLNYMVDKKSNPCATGGALKGYQITNKFESFKSMSTQNGFIFYIPAWLTSKIDPSTGFVNLLKTKYTSIADSKKFISSFDRIMYVPEEDLFEFALDYKNFSRTDADYIKKWKLYSYGNRIRIFRNPKKNNVFDWEEVCLTSAYKELFNKYGINYQQGDIRALLCEQSDKAFYSSFMALMSLMLQMRNSITGRTDVDFLISPVKNSDGIFYDSRNYEAQENAILPKNADANGAYNIARKVLWAIGQFKKAEDEKLDKVKIAISNKEWLEYAQTSVKHGSSGSSGSSGSSGSSGSKLEKFTNCYSLSKTLRFKAIPVGKTQENIDNKRLLVEDEKRAEDYKGVKKLLDRYYLSFINDVLHSIKLKNLNNYISLFRKKT

SEQ ID NO: 610 - protein, 1425 aa, synthetic construct
SEVEFSHEYWMRHALTLAKRARDEREVPVGAVLVLNNRVIGEGWNRAIGLHDPTAHAEIMALRQGGLVMQNYRLIDATLYVTFEPCVMCAGAMIHSRIGRVVFGVRNSKRGAAGSLMNVLNYPGMNHRVEITEGILADECAALLCDFYRMPRQVFNAQKKAQSSINSGSETPGTSESATPESRTEKENKELENLEINLRKEIAKAFKGNEGYKSLFKKDIIETILPEFLDDKDEIALVNSFNGFTTAFTGFFDNRENMFSEEAKSTSIAFRCINENLTRYISNMDIFEKVDAIFDKHEVQEIKEKILNSDYDVEDFFEGEFFNFVLTQEGIDVYNAIIGGFVTESGEKIKGLNEYINLYNQKTKQKLPKFKPLYKQVLSDRESLSFYGEGYTSDEEVLEVFRNTLNKNSEIFSSIKKLEKLFKNFDEYSSAGIFVKNGPAISTISKDIFGEWNVIRDKWNAEYDDIHLKKKAVVTEKYEDDRRKSFKKIGSFSLEQLQEYADADLSVVEKLKEIIIQKVDEIYKVYGSSEKLFDADFVLEKSLKKNDAVVAIMKDLLDSVKSFENYIKAFFGEGKETNRDESFYGDFVLAYDILLKVDHIYDAIRNYVTQKPYSKDKFKLYFQNPQFMGGWDKDKETDYRATILRYGSKYYLAIMDKKYAKCLQKIDKDDVNGNYEKINYKLLPGPNKMLPKVFFSKKWMAYYNPSEDIQKIYKNGTFKKGDMFNLNDCHKLIDFFKDSISRYPKWSNAYDFNFSETEKYKDIAGFYREVEEQGYKVSFESASKKEVDKLVEEGKLYMFQIYNKDFSDKSHGTPNLHTMYFKLLFDENNHGQIRLSGGAELFMRRASLKKEELVVHPANSPIANKNPDNPKKTTTLSYDVYKDKRFSEDQYELHIPIAINKCPKNIFKINTEVRVLLKHDDNPYVIGIARGERNLLYIVVVDGKGNIVEQYSLNEIINNFNGIRIKTDYHSLLDKKEKERFEARQNWTSIENIKELKAGYISQVVHKICELVEKYDAVIALEDLNSGFKNSRVKVEKQVYQKFEKMLIDKLNYMVDKKSNPCATGGALKGYQITNKFESFKSMSTQNGFIFYIPAWLTSKIDPSTGFVNLLKTKYTSIADSKKFISSFDRIMYVPEEDLFEFALDYKNFSRTDADYIKKWKLYSYGNRIRIFRNPKKNNVFDWEEVCLTSAYKELFNKYGINYQQGDIRALLCEQSDKAFYSSFMALMSLMLQMRNSITGRTDVDFLISPVKNSDGIFYDSRNYEAQENAILPKNADANGAYNIARKVLWAIGQFKKAEDEKLDKVKIAISNKEWLEYAQTSVKHGSSGSSGSSGSSGSSGSKLEKFTNCYSLSKTLRFKAIPVGKTQENIDNKRLLVEDEKRAEDYKGVKKLLDRYYLSFINDVLHSIKLKNLNNYISLFRKKT

SEQ ID NO: 611 - protein, 1421 aa, synthetic construct
SEVEFSHEYWMRHALTLAKRARDEREVPVGAVLVLNNRVIGEGWNRAIGLHDPTAHAEIMALRQGGLVMQNYRLIDATLYVTFEPCVMCAGAMIHSRIGRVVFGVRNSKRGAAGSLMNVLNYPGMNHRVEITEGILADECAALLCDFYRMPRQVFNAQKKAQSSINSGGSSGGSSGGSRTEKENKELENLEINLRKEIAKAFKGNEGYKSLFKKDIIETILPEFLDDKDEIALVNSFNGFTTAFTGFFDNRENMFSEEAKSTSIAFRCINENLTRYISNMDIFEKVDAIFDKHEVQEIKEKILNSDYDVEDFFEGEFFNFVLTQEGIDVYNAIIGGFVTESGEKIKGLNEYINLYNQKTKQKLPKFKPLYKQVLSDRESLSFYGEGYTSDEEVLEVFRNTLNKNSEIFSSIKKLEKLFKNFDEYSSAGIFVKNGPAISTISKDIFGEWNVIRDKWNAEYDDIHLKKKAVVTEKYEDDRRKSFKKIGSFSLEQLQEYADADLSVVEKLKEIIIQKVDEIYKVYGSSEKLFDADFVLEKSLKKNDAVVAIMKDLLDSVKSFENYIKAFFGEGKETNRDESFYGDFVLAYDILLKVDHIYDAIRNYVTQKPYSKDKFKLYFQNPQFMGGWDKDKETDYRATILRYGSKYYLAIMDKKYAKCLQKIDKDDVNGNYEKINYKLLPGPNKMLPKVFFSKKWMAYYNPSEDIQKIYKNGTFKKGDMFNLNDCHKLIDFFKDSISRYPKWSNAYDFNFSETEKYKDIAGFYREVEEQGYKVSFESASKKEVDKLVEEGKLYMFQIYNKDFSDKSHGTPNLHTMYFKLLFDENNHGQIRLSGGAELFMRRASLKKEELVVHPANSPIANKNPDNPKKTTTLSYDVYKDKRFSEDQYELHIPIAINKCPKNIFKINTEVRVLLKHDDNPYVIGIARGERNLLYIVVVDGKGNIVEQYSLNEIINNFNGIRIKTDYHSLLDKKEKERFEARQNWTSIENIKELKAGYISQVVHKICELVEKYDAVIALEDLNSGFKNSRVKVEKQVYQKFEKMLIDKLNYMVDKKSNPCATGGALKGYQITNKFESFKSMSTQNGFIFYIPAWLTSKIDPSTGFVNLLKTKYTSIADSKKFISSFDRIMYVPEEDLFEFALDYKNFSRTDADYIKKWKLYSYGNRIRIFRNPKKNNVFDWEEVCLTSAYKELFNKYGINYQQGDIRALLCEQSDKAFYSSFMALMSLMLQMRNSITGRTDVDFLISPVKNSDGIFYDSRNYEAQENAILPKNADANGAYNIARKVLWAIGQFKKAEDEKLDKVKIAISNKEWLEYAQTSVKHGSSGSSGSSGSSGSSGSKLEKFTNCYSLSKTLRFKAIPVGKTQENIDNKRLLVEDEKRAEDYKGVKKLLDRYYLSFINDVLHSIKLKNLNNYISLFRKKT

SEQ ID NO: 612 - protein, 1417 aa, synthetic construct
SEVEFSHEYWMRHALTLAKRARDEREVPVGAVLVLNNRVIGEGWNRAIGLHDPTAHAEIMALRQGGLVMQNYRLIDATLYVTFEPCVMCAGAMIHSRIGRVVFGVRNSKRGAAGSLMNVLNYPGMNHRVEITEGILADECAALLCDFYRMPRQVFNAQKKAQSSINSGGSSGGSRTEKENKELENLEINLRKEIAKAFKGNEGYKSLFKKDIIETILPEFLDDKDEIALVNSFNGFTTAFTGFFDNRENMFSEEAKSTSIAFRCINENLTRYISNMDIFEKVDAIFDKHEVQEIKEKILNSDYDVEDFFEGEFFNFVLTQEGIDVYNAIIGGFVTESGEKIKGLNEYINLYNQKTKQKLPKFKPLYKQVLSDRESLSFYGEGYTSDEEVLEVFRNTLNKNSEIFSSIKKLEKLFKNFDEYSSAGIFVKNGPAISTISKDIFGEWNVIRDKWNAEYDDIHLKKKAVVTEKYEDDRRKSFKKIGSFSLEQLQEYADADLSVVEKLKEIIIQKVDEIYKVYGSSEKLFDADFVLEKSLKKNDAVVAIMKDLLDSVKSFENYIKAFFGEGKETNRDESFYGDFVLAYDILLKVDHIYDAIRNYVTQKPYSKDKFKLYFQNPQFMGGWDKDKETDYRATILRYGSKYYLAIMDKKYAKCLQKIDKDDVNGNYEKINYKLLPGPNKMLPKVFFSKKWMAYYNPSEDIQKIYKNGTFKKGDMFNLNDCHKLIDFFKDSISRYPKWSNAYDFNFSETEKYKDIAGFYREVEEQGYKVSFESASKKEVDKLVEEGKLYMFQIYNKDFSDKSHGTPNLHTMYFKLLFDENNHGQIRLSGGAELFMRRASLKKEELVVHPANSPIANKNPDNPKKTTTLSYDVYKDKRFSEDQYELHIPIAINKCPKNIFKINTEVRVLLKHDDNPYVIGIARGERNLLYIVVVDGKGNIVEQYSLNEIINNFNGIRIKTDYHSLLDKKEKERFEARQNWTSIENIKELKAGYISQVVHKICELVEKYDAVIALEDLNSGFKNSRVKVEKQVYQKFEKMLIDKLNYMVDKKSNPCATGGALKGYQITNKFESFKSMSTQNGFIFYIPAWLTSKIDPSTGFVNLLKTKYTSIADSKKFISSFDRIMYVPEEDLFEFALDYKNFSRTDADYIKKWKLYSYGNRIRIFRNPKKNNVFDWEEVCLTSAYKELFNKYGINYQQGDIRALLCEQSDKAFYSSFMALMSLMLQMRNSITGRTDVDFLISPVKNSDGIFYDSRNYEAQENAILPKNADANGAYNIARKVLWAIGQFKKAEDEKLDKVKIAISNKEWLEYAQTSVKHGSSGSSGSSGSSGSSGSKLEKFTNCYSLSKTLRFKAIPVGKTQENIDNKRLLVEDEKRAEDYKGVKKLLDRYYLSFINDVLHSIKLKNLNNYISLFRKKT

SEQ ID NO: 613 - protein, 1415 aa, synthetic construct
SEVEFSHEYWMRHALTLAKRARDEREVPVGAVLVLNNRVIGEGWNRAIGLHDPTAHAEIMALRQGGLVMQNYRLIDATLYVTFEPCVMCAGAMIHSRIGRVVFGVRNSKRGAAGSLMNVLNYPGMNHRVEITEGILADECAALLCDFYRMPRQVFNAQKKAQSSINSGSSGSRTEKENKELENLEINLRKEIAKAFKGNEGYKSLFKKDIIETILPEFLDDKDEIALVNSFNGFTTAFTGFFDNRENMFSEEAKSTSIAFRCINENLTRYISNMDIFEKVDAIFDKHEVQEIKEKILNSDYDVEDFFEGEFFNFVLTQEGIDVYNAIIGGFVTESGEKIKGLNEYINLYNQKTKQKLPKFKPLYKQVLSDRESLSFYGEGYTSDEEVLEVFRNTLNKNSEIFSSIKKLEKLFKNFDEYSSAGIFVKNGPAISTISKDIFGEWNVIRDKWNAEYDDIHLKKKAVVTEKYEDDRRKSFKKIGSFSLEQLQEYADADLSVVEKLKEIIIQKVDEIYKVYGSSEKLFDADFVLEKSLKKNDAVVAIMKDLLDSVKSFENYIKAFFGEGKETNRDESFYGDFVLAYDILLKVDHIYDAIRNYVTQKPYSKDKFKLYFQNPQFMGGWDKDKETDYRATILRYGSKYYLAIMDKKYAKCLQKIDKDDVNGNYEKINYKLLPGPNKMLPKVFFSKKWMAYYNPSEDIQKIYKNGTFKKGDMFNLNDCHKLIDFFKDSISRYPKWSNAYDFNFSETEKYKDIAGFYREVEEQGYKVSFESASKKEVDKLVEEGKLYMFQIYNKDFSDKSHGTPNLHTMYFKLLFDENNHGQIRLSGGAELFMRRASLKKEELVVHPANSPIANKNPDNPKKTTTLSYDVYKDKRFSEDQYELHIPIAINKCPKNIFKINTEVRVLLKHDDNPYVIGIARGERNLLYIVVVDGKGNIVEQYSLNEIINNFNGIRIKTDYHSLLDKKEKERFEARQNWTSIENIKELKAGYISQVVHKICELVEKYDAVIALEDLNSGFKNSRVKVEKQVYQKFEKMLIDKLNYMVDKKSNPCATGGALKGYQITNKFESFKSMSTQNGFIFYIPAWLTSKIDPSTGFVNLLKTKYTSIADSKKFISSFDRIMYVPEEDLFEFALDYKNFSRTDADYIKKWKLYSYGNRIRIFRNPKKNNVFDWEEVCLTSAYKELFNKYGINYQQGDIRALLCEQSDKAFYSSFMALMSLMLQMRNSITGRTDVDFLISPVKNSDGIFYDSRNYEAQENAILPKNADANGAYNIARKVLWAIGQFKKAEDEKLDKVKIAISNKEWLEYAQTSVKHGSSGSSGSSGSSGSSGSKLEKFTNCYSLSKTLRFKAIPVGKTQENIDNKRLLVEDEKRAEDYKGVKKLLDRYYLSFINDVLHSIKLKNLNNYISLFRKKT

SEQ ID NO: 614 - protein, 1433 aa, synthetic construct
RTEKENKELENLEINLRKEIAKAFKGNEGYKSLFKKDIIETILPEFLDDKDEIALVNSFNGFTTAFTGFFDNRENMFSEEAKSTSIAFRCINENLTRYISNMDIFEKVDAIFDKHEVQEIKEKILNSDYDVEDFFEGEFFNFVLTQEGIDVYNAIIGGFVTESGEKIKGLNEYINLYNQKTKQKLPKFKPLYKQVLSDRESLSFYGEGYTSDEEVLEVFRNTLNKNSEIFSSIKKLEKLFKNFDEYSSAGIFVKNGPAISTISKDIFGEWNVIRDKWNAEYDDIHLKKKAVVTEKYEDDRRKSFKKIGSFSLEQLQEYADADLSVVEKLKEIIIQKVDEIYKVYGSSEKLFDADFVLEKSLKKNDAVVAIMKDLLDSVKSFENYIKAFFGEGKETNRDESFYGDFVLAYDILLKVDHIYDAIRNYVTQKPYSKDKFKLYFQNPQFMGGWDKDKETDYRATILRYGSKYYLAIMDKKYAKCLQKIDKDDVNGNYEKINYKLLPGPNKMLPKVFFSKKWMAYYNPSEDIQKIYKNGTFKKGDMFNLNDCHKLIDFFKDSISRYPKWSNAYDFNFSETEKYKDIAGFYREVEEQGYKVSFESASKKEVDKLVEEGKLYMFQIYNKDFSDKSHGTPNLHTMYFKLLFDENNHGQIRLSGGAELFMRRASLKKEELVVHPANSPIANKNPDNPKKTTTLSYDVYKDKRFSEDQYELHIPIAINKCPKNIFKINTEVRVLLKHDDNPYVIGIARGERNLLYIVVVDGKGNIVEQYSLNEIINNFNGIRIKTDYHSLLDKKEKERFEARQNWTSIENIKELKAGYISQVVHKICELVEKYDAVIALEDLNSGFKNSRVKVEKQVYQKFEKMLIDKLNYMVDKKSNPCATGGALKGYQITNKFESFKSMSTQNGFIFYIPAWLTSKIDPSTGFVNLLKTKYTSIADSKKFISSFDRIMYVPEEDLFEFALDYKNFSRTDADYIKKWKLYSYGNRIRIFRNPKKNNVFDWEEVCLTSAYKELFNKYGINYQQGDIRALLCEQSDKAFYSSFMALMSLMLQMRNSITGRTDVDFLISPVKNSDGIFYDSRNYEAQENAILPKNADANGAYNIARKVLWAIGQFKKAEDEKLDKVKIAISNKEWLEYAQTSVKHGSSGSSGSSGSSGSSGSKLEKFTNCYSLSKTLRFKAIPVGKTQENIDNKRLLVEDEKRAEDYKGVKKLLDRYYLSFINDVLHSIKLKNLNNYISLFRKKTSGGSSGSETPGTSESATPESSGGSSEVEFSHEYWMRHALTLAKRARDEREVPVGAVLVLNNRVIGEGWNRAIGLHDPTAHAEIMALRQGGLVMQNYRLIDATLYVTFEPCVMCAGAMIHSRIGRVVFGVRNSKRGAAGSLMNVLNYPGMNHRVEITEGILADECAALLCDFYRMPRQVFNAQKKAQSSIN

SEQ ID NO: 615 - protein, 1425 aa, synthetic construct
RTEKENKELENLEINLRKEIAKAFKGNEGYKSLFKKDIIETILPEFLDDKDEIALVNSFNGFTTAFTGFFDNRENMFSEEAKSTSIAFRCINENLTRYISNMDIFEKVDAIFDKHEVQEIKEKILNSDYDVEDFFEGEFFNFVLTQEGIDVYNAIIGGFVTESGEKIKGLNEYINLYNQKTKQKLPKFKPLYKQVLSDRESLSFYGEGYTSDEEVLEVFRNTLNKNSEIFSSIKKLEKLFKNFDEYSSAGIFVKNGPAISTISKDIFGEWNVIRDKWNAEYDDIHLKKKAVVTEKYEDDRRKSFKKIGSFSLEQLQEYADADLSVVEKLKEIIIQKVDEIYKVYGSSEKLFDADFVLEKSLKKNDAVVAIMKDLLDSVKSFENYIKAFFGEGKETNRDESFYGDFVLAYDILLKVDHIYDAIRNYVTQKPYSKDKFKLYFQNPQFMGGWDKDKETDYRATILRYGSKYYLAIMDKKYAKCLQKIDKDDVNGNYEKINYKLLPGPNKMLPKVFFSKKWMAYYNPSEDIQKIYKNGTFKKGDMFNLNDCHKLIDFFKDSISRYPKWSNAYDFNFSETEKYKDIAGFYREVEEQGYKVSFESASKKEVDKLVEEGKLYMFQIYNKDFSDKSHGTPNLHTMYFKLLFDENNHGQIRLSGGAELFMRRASLKKEELVVHPANSPIANKNPDNPKKTTTLSYDVYKDKRFSEDQYELHIPIAINKCPKNIFKINTEVRVLLKHDDNPYVIGIARGERNLLYIVVVDGKGNIVEQYSLNEIINNFNGIRIKTDYHSLLDKKEKERFEARQNWTSIENIKELKAGYISQVVHKICELVEKYDAVIALEDLNSGFKNSRVKVEKQVYQKFEKMLIDKLNYMVDKKSNPCATGGALKGYQITNKFESFKSMSTQNGFIFYIPAWLTSKIDPSTGFVNLLKTKYTSIADSKKFISSFDRIMYVPEEDLFEFALDYKNFSRTDADYIKKWKLYSYGNRIRIFRNPKKNNVFDWEEVCLTSAYKELFNKYGINYQQGDIRALLCEQSDKAFYSSFMALMSLMLQMRNSITGRTDVDFLISPVKNSDGIFYDSRNYEAQENAILPKNADANGAYNIARKVLWAIGQFKKAEDEKLDKVKIAISNKEWLEYAQTSVKHGSSGSSGSSGSSGSSGSKLEKFTNCYSLSKTLRFKAIPVGKTQENIDNKRLLVEDEKRAEDYKGVKKLLDRYYLSFINDVLHSIKLKNLNNYISLFRKKTSGSETPGTSESATPESSEVEFSHEYWMRHALTLAKRARDEREVPVGAVLVLNNRVIGEGWNRAIGLHDPTAHAEIMALRQGGLVMQNYRLIDATLYVTFEPCVMCAGAMIHSRIGRVVFGVRNSKRGAAGSLMNVLNYPGMNHRVEITEGILADECAALLCDFYRMPRQVFNAQKKAQSSIN

SEQ ID NO: 616 - protein, 1421 aa, synthetic construct
RTEKENKELENLEINLRKEIAKAFKGNEGYKSLFKKDIIETILPEFLDDKDEIALVNSFNGFTTAFTGFFDNRENMFSEEAKSTSIAFRCINENLTRYISNMDIFEKVDAIFDKHEVQEIKEKILNSDYDVEDFFEGEFFNFVLTQEGIDVYNAIIGGFVTESGEKIKGLNEYINLYNQKTKQKLPKFKPLYKQVLSDRESLSFYGEGYTSDEEVLEVFRNTLNKNSEIFSSIKKLEKLFKNFDEYSSAGIFVKNGPAISTISKDIFGEWNVIRDKWNAEYDDIHLKKKAVVTEKYEDDRRKSFKKIGSFSLEQLQEYADADLSVVEKLKEIIIQKVDEIYKVYGSSEKLFDADFVLEKSLKKNDAVVAIMKDLLDSVKSFENYIKAFFGEGKETNRDESFYGDFVLAYDILLKVDHIYDAIRNYVTQKPYSKDKFKLYFQNPQFMGGWDKDKETDYRATILRYGSKYYLAIMDKKYAKCLQKIDKDDVNGNYEKINYKLLPGPNKMLPKVFFSKKWMAYYNPSEDIQKIYKNGTFKKGDMFNLNDCHKLIDFFKDSISRYPKWSNAYDFNFSETEKYKDIAGFYREVEEQGYKVSFESASKKEVDKLVEEGKLYMFQIYNKDFSDKSHGTPNLHTMYFKLLFDENNHGQIRLSGGAELFMRRASLKKEELVVHPANSPIANKNPDNPKKTTTLSYDVYKDKRFSEDQYELHIPIAINKCPKNIFKINTEVRVLLKHDDNPYVIGIARGERNLLYIVVVDGKGNIVEQYSLNEIINNFNGIRIKTDYHSLLDKKEKERFEARQNWTSIENIKELKAGYISQVVHKICELVEKYDAVIALEDLNSGFKNSRVKVEKQVYQKFEKMLIDKLNYMVDKKSNPCATGGALKGYQITNKFESFKSMSTQNGFIFYIPAWLTSKIDPSTGFVNLLKTKYTSIADSKKFISSFDRIMYVPEEDLFEFALDYKNFSRTDADYIKKWKLYSYGNRIRIFRNPKKNNVFDWEEVCLTSAYKELFNKYGINYQQGDIRALLCEQSDKAFYSSFMALMSLMLQMRNSITGRTDVDFLISPVKNSDGIFYDSRNYEAQENAILPKNADANGAYNIARKVLWAIGQFKKAEDEKLDKVKIAISNKEWLEYAQTSVKHGSSGSSGSSGSSGSSGSKLEKFTNCYSLSKTLRFKAIPVGKTQENIDNKRLLVEDEKRAEDYKGVKKLLDRYYLSFINDVLHSIKLKNLNNYISLFRKKTSGGSSGGSSGGSSEVEFSHEYWMRHALTLAKRARDEREVPVGAVLVLNNRVIGEGWNRAIGLHDPTAHAEIMALRQGGLVMQNYRLIDATLYVTFEPCVMCAGAMIHSRIGRVVFGVRNSKRGAAGSLMNVLNYPGMNHRVEITEGILADECAALLCDFYRMPRQVFNAQKKAQSSIN

SEQ ID NO: 617 - protein, 1417 aa, synthetic construct
RTEKENKELENLEINLRKEIAKAFKGNEGYKSLFKKDIIETILPEFLDDKDEIALVNSFNGFTTAFTGFFDNRENMFSEEAKSTSIAFRCINENLTRYISNMDIFEKVDAIFDKHEVQEIKEKILNSDYDVEDFFEGEFFNFVLTQEGIDVYNAIIGGFVTESGEKIKGLNEYINLYNQKTKQKLPKFKPLYKQVLSDRESLSFYGEGYTSDEEVLEVFRNTLNKNSEIFSSIKKLEKLFKNFDEYSSAGIFVKNGPAISTISKDIFGEWNVIRDKWNAEYDDIHLKKKAVVTEKYEDDRRKSFKKIGSFSLEQLQEYADADLSVVEKLKEIIIQKVDEIYKVYGSSEKLFDADFVLEKSLKKNDAVVAIMKDLLDSVKSFENYIKAFFGEGKETNRDESFYGDFVLAYDILLKVDHIYDAIRNYVTQKPYSKDKFKLYFQNPQFMGGWDKDKETDYRATILRYGSKYYLAIMDKKYAKCLQKIDKDDVNGNYEKINYKLLPGPNKMLPKVFFSKKWMAYYNPSEDIQKIYKNGTFKKGDMFNLNDCHKLIDFFKDSISRYPKWSNAYDFNFSETEKYKDIAGFYREVEEQGYKVSFESASKKEVDKLVEEGKLYMFQIYNKDFSDKSHGTPNLHTMYFKLLFDENNHGQIRLSGGAELFMRRASLKKEELVVHPANSPIANKNPDNPKKTTTLSYDVYKDKRFSEDQYELHIPIAINKCPKNIFKINTEVRVLLKHDDNPYVIGIARGERNLLYIVVVDGKGNIVEQYSLNEIINNFNGIRIKTDYHSLLDKKEKERFEARQNWTSIENIKELKAGYISQVVHKICELVEKYDAVIALEDLNSGFKNSRVKVEKQVYQKFEKMLIDKLNYMVDKKSNPCATGGALKGYQITNKFESFKSMSTQNGFIFYIPAWLTSKIDPSTGFVNLLKTKYTSIADSKKFISSFDRIMYVPEEDLFEFALDYKNFSRTDADYIKKWKLYSYGNRIRIFRNPKKNNVFDWEEVCLTSAYKELFNKYGINYQQGDIRALLCEQSDKAFYSSFMALMSLMLQMRNSITGRTDVDFLISPVKNSDGIFYDSRNYEAQENAILPKNADANGAYNIARKVLWAIGQFKKAEDEKLDKVKIAISNKEWLEYAQTSVKHGSSGSSGSSGSSGSSGSKLEKFTNCYSLSKTLRFKAIPVGKTQENIDNKRLLVEDEKRAEDYKGVKKLLDRYYLSFINDVLHSIKLKNLNNYISLFRKKTSGGSSGGSSEVEFSHEYWMRHALTLAKRARDEREVPVGAVLVLNNRVIGEGWNRAIGLHDPTAHAEIMALRQGGLVMQNYRLIDATLYVTFEPCVMCAGAMIHSRIGRVVFGVRNSKRGAAGSLMNVLNYPGMNHRVEITEGILADECAALLCDFYRMPRQVFNAQKKAQSSIN

SEQ ID NO: 618 - protein, 1415 aa, synthetic construct
RTEKENKELENLEINLRKEIAKAFKGNEGYKSLFKKDIIETILPEFLDDKDEIALVNSFNGFTTAFTGFFDNRENMFSEEAKSTSIAFRCINENLTRYISNMDIFEKVDAIFDKHEVQEIKEKILNSDYDVEDFFEGEFFNFVLTQEGIDVYNAIIGGFVTESGEKIKGLNEYINLYNQKTKQKLPKFKPLYKQVLSDRESLSFYGEGYTSDEEVLEVFRNTLNKNSEIFSSIKKLEKLFKNFDEYSSAGIFVKNGPAISTISKDIFGEWNVIRDKWNAEYDDIHLKKKAVVTEKYEDDRRKSFKKIGSFSLEQLQEYADADLSVVEKLKEIIIQKVDEIYKVYGSSEKLFDADFVLEKSLKKNDAVVAIMKDLLDSVKSFENYIKAFFGEGKETNRDESFYGDFVLAYDILLKVDHIYDAIRNYVTQKPYSKDKFKLYFQNPQFMGGWDKDKETDYRATILRYGSKYYLAIMDKKYAKCLQKIDKDDVNGNYEKINYKLLPGPNKMLPKVFFSKKWMAYYNPSEDIQKIYKNGTFKKGDMFNLNDCHKLIDFFKDSISRYPKWSNAYDFNFSETEKYKDIAGFYREVEEQGYKVSFESASKKEVDKLVEEGKLYMFQIYNKDFSDKSHGTPNLHTMYFKLLFDENNHGQIRLSGGAELFMRRASLKKEELVVHPANSPIANKNPDNPKKTTTLSYDVYKDKRFSEDQYELHIPIAINKCPKNIFKINTEVRVLLKHDDNPYVIGIARGERNLLYIVVVDGKGNIVEQYSLNEIINNFNGIRIKTDYHSLLDKKEKERFEARQNWTSIENIKELKAGYISQVVHKICELVEKYDAVIALEDLNSGFKNSRVKVEKQVYQKFEKMLIDKLNYMVDKKSNPCATGGALKGYQITNKFESFKSMSTQNGFIFYIPAWLTSKIDPSTGFVNLLKTKYTSIADSKKFISSFDRIMYVPEEDLFEFALDYKNFSRTDADYIKKWKLYSYGNRIRIFRNPKKNNVFDWEEVCLTSAYKELFNKYGINYQQGDIRALLCEQSDKAFYSSFMALMSLMLQMRNSITGRTDVDFLISPVKNSDGIFYDSRNYEAQENAILPKNADANGAYNIARKVLWAIGQFKKAEDEKLDKVKIAISNKEWLEYAQTSVKHGSSGSSGSSGSSGSSGSKLEKFTNCYSLSKTLRFKAIPVGKTQENIDNKRLLVEDEKRAEDYKGVKKLLDRYYLSFINDVLHSIKLKNLNNYISLFRKKTSGSSGSSEVEFSHEYWMRHALTLAKRARDEREVPVGAVLVLNNRVIGEGWNRAIGLHDPTAHAEIMALRQGGLVMQNYRLIDATLYVTFEPCVMCAGAMIHSRIGRVVFGVRNSKRGAAGSLMNVLNYPGMNHRVEITEGILADECAALLCDFYRMPRQVFNAQKKAQSSIN

SEQ ID NO: 619 - protein, 1425 aa, synthetic construct
SDGIFYDSRNYEAQENAILPKNADANGAYNIARKVLWAIGQFKKAEDEKLDKVKIAISNKEWLEYAQTSVKHGSSGSSGSSGSSGSSGSKLEKFTNCYSLSKTLRFKAIPVGKTQENIDNKRLLVEDEKRAEDYKGVKKLLDRYYLSFINDVLHSIKLKNLNNYISLFRKKTRTEKENKELENLEINLRKEIAKAFKGNEGYKSLFKKDIIETILPEFLDDKDEIALVNSFNGFTTAFTGFFDNRENMFSEEAKSTSIAFRCINENLTRYISNMDIFEKVDAIFDKHEVQEIKEKILNSDYDVEDFFEGEFFNFVLTQEGIDVYNAIIGGFVTESGEKIKGLNEYINLYNQKTKQKLPKFKPLYKQVLSDRESLSFYGEGYTSDEEVLEVFRNTLNKNSEIFSSIKKLEKLFKNFDEYSSAGIFVKNGPAISTISKDIFGEWNVIRDKWNAEYDDIHLKKKAVVTEKYEDDRRKSFKKIGSFSLEQLQEYADADLSVVEKLKEIIIQKVDEIYKVYGSSEKLFDADFVLEKSLKKNDAVVAIMKDLLDSVKSFENYIKAFFGEGKETNRDESFYGDFVLAYDILLKVDHIYDAIRNYVTQKPYSKDKFKLYFQNPQFMGGWDKDKETDYRATILRYGSKYYLAIMDKKYAKCLQKIDKDDVNGNYEKINYKLLPGPNKMLPKVFFSKKWMAYYNPSEDIQKIYKNGTFKKGDMFNLNDCHKLIDFFKDSISRYPKWSNAYDFNFSETEKYKDIAGFYREVEEQGYKVSFESASKKEVDKLVEEGKLYMFQIYNKDFSDKSHGTPNLHTMYFKLLFDENNHGQIRLSGGAELFMRRASLKKEELVVHPANSPIANKNPDNPKKTTTLSYDVYKDKRFSEDQYELHIPIAINKCPKNIFKINTEVRVLLKHDDNPYVIGIARGERNLLYIVVVDGKGNIVEQYSLNEIINNFNGIRIKTDYHSLLDKKEKERFEARQNWTSIENIKELKAGYISQVVHKICELVEKYDAVIALEDLNSGFKNSRVKVEKQVYQKFEKMLIDKLNYMVDKKSNPCATGGALKGYQITNKFESFKSMSTQNGFIFYIPAWLTSKIDPSTGFVNLLKTKYTSIADSKKFISSFDRIMYVPEEDLFEFALDYKNFSRTDADYIKKWKLYSYGNRIRIFRNPKKNNVFDWEEVCLTSAYKELFNKYGINYQQGDIRALLCEQSDKAFYSSFMALMSLMLQMRNSITGRTDVDFLISPVKNSGSETPGTSESATPESSEVEFSHEYWMRHALTLAKRARDEREVPVGAVLVLNNRVIGEGWNRAIGLHDPTAHAEIMALRQGGLVMQNYRLIDATLYVTFEPCVMCAGAMIHSRIGRVVFGVRNSKRGAAGSLMNVLNYPGMNHRVEITEGILADECAALLCDFYRMPRQVFNAQKKAQSSIN

SEQ ID NO: 620 - protein, 1421 aa, synthetic construct
SDGIFYDSRNYEAQENAILPKNADANGAYNIARKVLWAIGQFKKAEDEKLDKVKIAISNKEWLEYAQTSVKHGSSGSSGSSGSSGSSGSKLEKFTNCYSLSKTLRFKAIPVGKTQENIDNKRLLVEDEKRAEDYKGVKKLLDRYYLSFINDVLHSIKLKNLNNYISLFRKKTRTEKENKELENLEINLRKEIAKAFKGNEGYKSLFKKDIIETILPEFLDDKDEIALVNSFNGFTTAFTGFFDNRENMFSEEAKSTSIAFRCINENLTRYISNMDIFEKVDAIFDKHEVQEIKEKILNSDYDVEDFFEGEFFNFVLTQEGIDVYNAIIGGFVTESGEKIKGLNEYINLYNQKTKQKLPKFKPLYKQVLSDRESLSFYGEGYTSDEEVLEVFRNTLNKNSEIFSSIKKLEKLFKNFDEYSSAGIFVKNGPAISTISKDIFGEWNVIRDKWNAEYDDIHLKKKAVVTEKYEDDRRKSFKKIGSFSLEQLQEYADADLSVVEKLKEIIIQKVDEIYKVYGSSEKLFDADFVLEKSLKKNDAVVAIMKDLLDSVKSFENYIKAFFGEGKETNRDESFYGDFVLAYDILLKVDHIYDAIRNYVTQKPYSKDKFKLYFQNPQFMGGWDKDKETDYRATILRYGSKYYLAIMDKKYAKCLQKIDKDDVNGNYEKINYKLLPGPNKMLPKVFFSKKWMAYYNPSEDIQKIYKNGTFKKGDMFNLNDCHKLIDFFKDSISRYPKWSNAYDFNFSETEKYKDIAGFYREVEEQGYKVSFESASKKEVDKLVEEGKLYMFQIYNKDFSDKSHGTPNLHTMYFKLLFDENNHGQIRLSGGAELFMRRASLKKEELVVHPANSPIANKNPDNPKKTTTLSYDVYKDKRFSEDQYELHIPIAINKCPKNIFKINTEVRVLLKHDDNPYVIGIARGERNLLYIVVVDGKGNIVEQYSLNEIINNFNGIRIKTDYHSLLDKKEKERFEARQNWTSIENIKELKAGYISQVVHKICELVEKYDAVIALEDLNSGFKNSRVKVEKQVYQKFEKMLIDKLNYMVDKKSNPCATGGALKGYQITNKFESFKSMSTQNGFIFYIPAWLTSKIDPSTGFVNLLKTKYTSIADSKKFISSFDRIMYVPEEDLFEFALDYKNFSRTDADYIKKWKLYSYGNRIRIFRNPKKNNVFDWEEVCLTSAYKELFNKYGINYQQGDIRALLCEQSDKAFYSSFMALMSLMLQMRNSITGRTDVDFLISPVKNSGGSSGGSSGGSSEVEFSHEYWMRHALTLAKRARDEREVPVGAVLVLNNRVIGEGWNRAIGLHDPTAHAEIMALRQGGLVMQNYRLIDATLYVTFEPCVMCAGAMIHSRIGRVVFGVRNSKRGAAGSLMNVLNYPGMNHRVEITEGILADECAALLCDFYRMPRQVFNAQKKAQSSIN

SEQ ID NO: 621 - protein, 1417 aa, synthetic construct
SDGIFYDSRNYEAQENAILPKNADANGAYNIARKVLWAIGQFKKAEDEKLDKVKIAISNKEWLEYAQTSVKHGSSGSSGSSGSSGSSGSKLEKFTNCYSLSKTLRFKAIPVGKTQENIDNKRLLVEDEKRAEDYKGVKKLLDRYYLSFINDVLHSIKLKNLNNYISLFRKKTRTEKENKELENLEINLRKEIAKAFKGNEGYKSLFKKDIIETILPEFLDDKDEIALVNSFNGFTTAFTGFFDNRENMFSEEAKSTSIAFRCINENLTRYISNMDIFEKVDAIFDKHEVQEIKEKILNSDYDVEDFFEGEFFNFVLTQEGIDVYNAIIGGFVTESGEKIKGLNEYINLYNQKTKQKLPKFKPLYKQVLSDRESLSFYGEGYTSDEEVLEVFRNTLNKNSEIFSSIKKLEKLFKNFDEYSSAGIFVKNGPAISTISKDIFGEWNVIRDKWNAEYDDIHLKKKAVVTEKYEDDRRKSFKKIGSFSLEQLQEYADADLSVVEKLKEIIIQKVDEIYKVYGSSEKLFDADFVLEKSLKKNDAVVAIMKDLLDSVKSFENYIKAFFGEGKETNRDESFYGDFVLAYDILLKVDHIYDAIRNYVTQKPYSKDKFKLYFQNPQFMGGWDKDKETDYRATILRYGSKYYLAIMDKKYAKCLQKIDKDDVNGNYEKINYKLLPGPNKMLPKVFFSKKWMAYYNPSEDIQKIYKNGTFKKGDMFNLNDCHKLIDFFKDSISRYPKWSNAYDFNFSETEKYKDIAGFYREVEEQGYKVSFESASKKEVDKLVEEGKLYMFQIYNKDFSDKSHGTPNLHTMYFKLLFDENNHGQIRLSGGAELFMRRASLKKEELVVHPANSPIANKNPDNPKKTTTLSYDVYKDKRFSEDQYELHIPIAINKCPKNIFKINTEVRVLLKHDDNPYVIGIARGERNLLYIVVVDGKGNIVEQYSLNEIINNFNGIRIKTDYHSLLDKKEKERFEARQNWTSIENIKELKAGYISQVVHKICELVEKYDAVIALEDLNSGFKNSRVKVEKQVYQKFEKMLIDKLNYMVDKKSNPCATGGALKGYQITNKFESFKSMSTQNGFIFYIPAWLTSKIDPSTGFVNLLKTKYTSIADSKKFISSFDRIMYVPEEDLFEFALDYKNFSRTDADYIKKWKLYSYGNRIRIFRNPKKNNVFDWEEVCLTSAYKELFNKYGINYQQGDIRALLCEQSDKAFYSSFMALMSLMLQMRNSITGRTDVDFLISPVKNSGGSSGGSSEVEFSHEYWMRHALTLAKRARDEREVPVGAVLVLNNRVIGEGWNRAIGLHDPTAHAEIMALRQGGLVMQNYRLIDATLYVTFEPCVMCAGAMIHSRIGRVVFGVRNSKRGAAGSLMNVLNYPGMNHRVEITEGILADECAALLCDFYRMPRQVFNAQKKAQSSIN

SEQ ID NO: 622 - protein, 1415 aa, synthetic construct
SDGIFYDSRNYEAQENAILPKNADANGAYNIARKVLWAIGQFKKAEDEKLDKVKIAISNKEWLEYAQTSVKHGSSGSSGSSGSSGSSGSKLEKFTNCYSLSKTLRFKAIPVGKTQENIDNKRLLVEDEKRAEDYKGVKKLLDRYYLSFINDVLHSIKLKNLNNYISLFRKKTRTEKENKELENLEINLRKEIAKAFKGNEGYKSLFKKDIIETILPEFLDDKDEIALVNSFNGFTTAFTGFFDNRENMFSEEAKSTSIAFRCINENLTRYISNMDIFEKVDAIFDKHEVQEIKEKILNSDYDVEDFFEGEFFNFVLTQEGIDVYNAIIGGFVTESGEKIKGLNEYINLYNQKTKQKLPKFKPLYKQVLSDRESLSFYGEGYTSDEEVLEVFRNTLNKNSEIFSSIKKLEKLFKNFDEYSSAGIFVKNGPAISTISKDIFGEWNVIRDKWNAEYDDIHLKKKAVVTEKYEDDRRKSFKKIGSFSLEQLQEYADADLSVVEKLKEIIIQKVDEIYKVYGSSEKLFDADFVLEKSLKKNDAVVAIMKDLLDSVKSFENYIKAFFGEGKETNRDESFYGDFVLAYDILLKVDHIYDAIRNYVTQKPYSKDKFKLYFQNPQFMGGWDKDKETDYRATILRYGSKYYLAIMDKKYAKCLQKIDKDDVNGNYEKINYKLLPGPNKMLPKVFFSKKWMAYYNPSEDIQKIYKNGTFKKGDMFNLNDCHKLIDFFKDSISRYPKWSNAYDFNFSETEKYKDIAGFYREVEEQGYKVSFESASKKEVDKLVEEGKLYMFQIYNKDFSDKSHGTPNLHTMYFKLLFDENNHGQIRLSGGAELFMRRASLKKEELVVHPANSPIANKNPDNPKKTTTLSYDVYKDKRFSEDQYELHIPIAINKCPKNIFKINTEVRVLLKHDDNPYVIGIARGERNLLYIVVVDGKGNIVEQYSLNEIINNFNGIRIKTDYHSLLDKKEKERFEARQNWTSIENIKELKAGYISQVVHKICELVEKYDAVIALEDLNSGFKNSRVKVEKQVYQKFEKMLIDKLNYMVDKKSNPCATGGALKGYQITNKFESFKSMSTQNGFIFYIPAWLTSKIDPSTGFVNLLKTKYTSIADSKKFISSFDRIMYVPEEDLFEFALDYKNFSRTDADYIKKWKLYSYGNRIRIFRNPKKNNVFDWEEVCLTSAYKELFNKYGINYQQGDIRALLCEQSDKAFYSSFMALMSLMLQMRNSITGRTDVDFLISPVKNSGSSGSSEVEFSHEYWMRHALTLAKRARDEREVPVGAVLVLNNRVIGEGWNRAIGLHDPTAHAEIMALRQGGLVMQNYRLIDATLYVTFEPCVMCAGAMIHSRIGRVVFGVRNSKRGAAGSLMNVLNYPGMNHRVEITEGILADECAALLCDFYRMPRQVFNAQKKAQSSIN

SEQ ID NO: 623 - protein, 1413 aa, synthetic construct
SDGIFYDSRNYEAQENAILPKNADANGAYNIARKVLWAIGQFKKAEDEKLDKVKIAISNKEWLEYAQTSVKHGSSGSSGSSGSSGSSGSKLEKFTNCYSLSKTLRFKAIPVGKTQENIDNKRLLVEDEKRAEDYKGVKKLLDRYYLSFINDVLHSIKLKNLNNYISLFRKKTRTEKENKELENLEINLRKEIAKAFKGNEGYKSLFKKDIIETILPEFLDDKDEIALVNSFNGFTTAFTGFFDNRENMFSEEAKSTSIAFRCINENLTRYISNMDIFEKVDAIFDKHEVQEIKEKILNSDYDVEDFFEGEFFNFVLTQEGIDVYNAIIGGFVTESGEKIKGLNEYINLYNQKTKQKLPKFKPLYKQVLSDRESLSFYGEGYTSDEEVLEVFRNTLNKNSEIFSSIKKLEKLFKNFDEYSSAGIFVKNGPAISTISKDIFGEWNVIRDKWNAEYDDIHLKKKAVVTEKYEDDRRKSFKKIGSFSLEQLQEYADADLSVVEKLKEIIIQKVDEIYKVYGSSEKLFDADFVLEKSLKKNDAVVAIMKDLLDSVKSFENYIKAFFGEGKETNRDESFYGDFVLAYDILLKVDHIYDAIRNYVTQKPYSKDKFKLYFQNPQFMGGWDKDKETDYRATILRYGSKYYLAIMDKKYAKCLQKIDKDDVNGNYEKINYKLLPGPNKMLPKVFFSKKWMAYYNPSEDIQKIYKNGTFKKGDMFNLNDCHKLIDFFKDSISRYPKWSNAYDFNFSETEKYKDIAGFYREVEEQGYKVSFESASKKEVDKLVEEGKLYMFQIYNKDFSDKSHGTPNLHTMYFKLLFDENNHGQIRLSGGAELFMRRASLKKEELVVHPANSPIANKNPDNPKKTTTLSYDVYKDKRFSEDQYELHIPIAINKCPKNIFKINTEVRVLLKHDDNPYVIGIARGERNLLYIVVVDGKGNIVEQYSLNEIINNFNGIRIKTDYHSLLDKKEKERFEARQNWTSIENIKELKAGYISQVVHKICELVEKYDAVIALEDLNSGFKNSRVKVEKQVYQKFEKMLIDKLNYMVDKKSNPCATGGALKGYQITNKFESFKSMSTQNGFIFYIPAWLTSKIDPSTGFVNLLKTKYTSIADSKKFISSFDRIMYVPEEDLFEFALDYKNFSRTDADYIKKWKLYSYGNRIRIFRNPKKNNVFDWEEVCLTSAYKELFNKYGINYQQGDIRALLCEQSDKAFYSSFMALMSLMLQMRNSITGRTDVDFLISPVKNSGGSSEVEFSHEYWMRHALTLAKRARDEREVPVGAVLVLNNRVIGEGWNRAIGLHDPTAHAEIMALRQGGLVMQNYRLIDATLYVTFEPCVMCAGAMIHSRIGRVVFGVRNSKRGAAGSLMNVLNYPGMNHRVEITEGILADECAALLCDFYRMPRQVFNAQKKAQSSIN

SEQ ID NO: 624 - protein, 1558 aa, synthetic construct
TNLSDIIEKETGKQLVIQESILMLPEEVEEVIGNKPESDILVHTAYDESTDENVMLLTSDAPEYKPWALVIQDSNGENKIKMLSGGSGGSGGSRTEKENKELENLEINLRKEIAKAFKGNEGYKSLFKKDIIETILPEFLDDKDEIALVNSFNGFTTAFTGFFDNRENMFSEEAKSTSIAFRCINENLTRYISNMDIFEKVDAIFDKHEVQEIKEKILNSDYDVEDFFEGEFFNFVLTQEGIDVYNAIIGGFVTESGEKIKGLNEYINLYNQKTKQKLPKFKPLYKQVLSDRESLSFYGEGYTSDEEVLEVFRNTLNKNSEIFSSIKKLEKLFKNFDEYSSAGIFVKNGPAISTISKDIFGEWNVIRDKWNAEYDDIHLKKKAVVTEKYEDDRRKSFKKIGSFSLEQLQEYADADLSVVEKLKEIIIQKVDEIYKVYGSSEKLFDADFVLEKSLKKNDAVVAIMKDLLDSVKSFENYIKAFFGEGKETNRDESFYGDFVLAYDILLKVDHIYDAIRNYVTQKPYSKDKFKLYFQNPQFMGGWDKDKETDYRATILRYGSKYYLAIMDKKYAKCLQKIDKDDVNGNYEKINYKLLPGPNKMLPKVFFSKKWMAYYNPSEDIQKIYKNGTFKKGDMFNLNDCHKLIDFFKDSISRYPKWSNAYDFNFSETEKYKDIAGFYREVEEQGYKVSFESASKKEVDKLVEEGKLYMFQIYNKDFSDKSHGTPNLHTMYFKLLFDENNHGQIRLSGGAELFMRRASLKKEELVVHPANSPIANKNPDNPKKTTTLSYDVYKDKRFSEDQYELHIPIAINKCPKNIFKINTEVRVLLKHDDNPYVIGIARGERNLLYIVVVDGKGNIVEQYSLNEIINNFNGIRIKTDYHSLLDKKEKERFEARQNWTSIENIKELKAGYISQVVHKICELVEKYDAVIALEDLNSGFKNSRVKVEKQVYQKFEKMLIDKLNYMVDKKSNPCATGGALKGYQITNKFESFKSMSTQNGFIFYIPAWLTSKIDPSTGFVNLLKTKYTSIADSKKFISSFDRIMYVPEEDLFEFALDYKNFSRTDADYIKKWKLYSYGNRIRIFRNPKKNNVFDWEEVCLTSAYKELFNKYGINYQQGDIRALLCEQSDKAFYSSFMALMSLMLQMRNSITGRTDVDFLISPVKNSDGIFYDSRNYEAQENAILPKNADANGAYNIARKVLWAIGQFKKAEDEKLDKVKIAISNKEWLEYAQTSVKHGSSGSSGSSGSSGSSGSKLEKFTNCYSLSKTLRFKAIPVGKTQENIDNKRLLVEDEKRAEDYKGVKKLLDRYYLSFINDVLHSIKLKNLNNYISLFRKKTSGGSSGSETPGTSESATPESSGGSEASPASGPRHLMDPHIFTSNFNNGIGRHKTYLCYEVERLDNGTSVKMDQHRGFLHNQAKNLLCGFYGRHAELRFLDLVPSLQLDPAQIYRVTWFISWSPCFSWGCAGEVRAFLQENTHVRLRIFAARIYDYDPLYKEALQMLRDAGAQVSIMTYDEFKHCWDTFVDHQGCPFQPWDGLDEHSQALSGRLRAILQNQGN

SEQ ID NO: 625 - protein, 1550 aa, synthetic construct
TNLSDIIEKETGKQLVIQESILMLPEEVEEVIGNKPESDILVHTAYDESTDENVMLLTSDAPEYKPWALVIQDSNGENKIKMLSGGSGGSGGSRTEKENKELENLEINLRKEIAKAFKGNEGYKSLFKKDIIETILPEFLDDKDEIALVNSFNGFTTAFTGFFDNRENMFSEEAKSTSIAFRCINENLTRYISNMDIFEKVDAIFDKHEVQEIKEKILNSDYDVEDFFEGEFFNFVLTQEGIDVYNAIIGGFVTESGEKIKGLNEYINLYNQKTKQKLPKFKPLYKQVLSDRESLSFYGEGYTSDEEVLEVFRNTLNKNSEIFSSIKKLEKLFKNFDEYSSAGIFVKNGPAISTISKDIFGEWNVIRDKWNAEYDDIHLKKKAVVTEKYEDDRRKSFKKIGSFSLEQLQEYADADLSVVEKLKEIIIQKVDEIYKVYGSSEKLFDADFVLEKSLKKNDAVVAIMKDLLDSVKSFENYIKAFFGEGKETNRDESFYGDFVLAYDILLKVDHIYDAIRNYVTQKPYSKDKFKLYFQNPQFMGGWDKDKETDYRATILRYGSKYYLAIMDKKYAKCLQKIDKDDVNGNYEKINYKLLPGPNKMLPKVFFSKKWMAYYNPSEDIQKIYKNGTFKKGDMFNLNDCHKLIDFFKDSISRYPKWSNAYDFNFSETEKYKDIAGFYREVEEQGYKVSFESASKKEVDKLVEEGKLYMFQIYNKDFSDKSHGTPNLHTMYFKLLFDENNHGQIRLSGGAELFMRRASLKKEELVVHPANSPIANKNPDNPKKTTTLSYDVYKDKRFSEDQYELHIPIAINKCPKNIFKINTEVRVLLKHDDNPYVIGIARGERNLLYIVVVDGKGNIVEQYSLNEIINNFNGIRIKTDYHSLLDKKEKERFEARQNWTSIENIKELKAGYISQVVHKICELVEKYDAVIALEDLNSGFKNSRVKVEKQVYQKFEKMLIDKLNYMVDKKSNPCATGGALKGYQITNKFESFKSMSTQNGFIFYIPAWLTSKIDPSTGFVNLLKTKYTSIADSKKFISSFDRIMYVPEEDLFEFALDYKNFSRTDADYIKKWKLYSYGNRIRIFRNPKKNNVFDWEEVCLTSAYKELFNKYGINYQQGDIRALLCEQSDKAFYSSFMALMSLMLQMRNSITGRTDVDFLISPVKNSDGIFYDSRNYEAQENAILPKNADANGAYNIARKVLWAIGQFKKAEDEKLDKVKIAISNKEWLEYAQTSVKHGSSGSSGSSGSSGSSGSKLEKFTNCYSLSKTLRFKAIPVGKTQENIDNKRLLVEDEKRAEDYKGVKKLLDRYYLSFINDVLHSIKLKNLNNYISLFRKKTSGSETPGTSESATPESEASPASGPRHLMDPHIFTSNFNNGIGRHKTYLCYEVERLDNGTSVKMDQHRGFLHNQAKNLLCGFYGRHAELRFLDLVPSLQLDPAQIYRVTWFISWSPCFSWGCAGEVRAFLQENTHVRLRIFAARIYDYDPLYKEALQMLRDAGAQVSIMTYDEFKHCWDTFVDHQGCPFQPWDGLDEHSQALSGRLRAILQNQGN

SEQ ID NO: 626 - protein, 1546 aa, synthetic construct
TNLSDIIEKETGKQLVIQESILMLPEEVEEVIGNKPESDILVHTAYDESTDENVMLLTSDAPEYKPWALVIQDSNGENKIKMLSGGSGGSGGSRTEKENKELENLEINLRKEIAKAFKGNEGYKSLFKKDIIETILPEFLDDKDEIALVNSFNGFTTAFTGFFDNRENMFSEEAKSTSIAFRCINENLTRYISNMDIFEKVDAIFDKHEVQEIKEKILNSDYDVEDFFEGEFFNFVLTQEGIDVYNAIIGGFVTESGEKIKGLNEYINLYNQKTKQKLPKFKPLYKQVLSDRESLSFYGEGYTSDEEVLEVFRNTLNKNSEIFSSIKKLEKLFKNFDEYSSAGIFVKNGPAISTISKDIFGEWNVIRDKWNAEYDDIHLKKKAVVTEKYEDDRRKSFKKIGSFSLEQLQEYADADLSVVEKLKEIIIQKVDEIYKVYGSSEKLFDADFVLEKSLKKNDAVVAIMKDLLDSVKSFENYIKAFFGEGKETNRDESFYGDFVLAYDILLKVDHIYDAIRNYVTQKPYSKDKFKLYFQNPQFMGGWDKDKETDYRATILRYGSKYYLAIMDKKYAKCLQKIDKDDVNGNYEKINYKLLPGPNKMLPKVFFSKKWMAYYNPSEDIQKIYKNGTFKKGDMFNLNDCHKLIDFFKDSISRYPKWSNAYDFNFSETEKYKDIAGFYREVEEQGYKVSFESASKKEVDKLVEEGKLYMFQIYNKDFSDKSHGTPNLHTMYFKLLFDENNHGQIRLSGGAELFMRRASLKKEELVVHPANSPIANKNPDNPKKTTTLSYDVYKDKRFSEDQYELHIPIAINKCPKNIFKINTEVRVLLKHDDNPYVIGIARGERNLLYIVVVDGKGNIVEQYSLNEIINNFNGIRIKTDYHSLLDKKEKERFEARQNWTSIENIKELKAGYISQVVHKICELVEKYDAVIALEDLNSGFKNSRVKVEKQVYQKFEKMLIDKLNYMVDKKSNPCATGGALKGYQITNKFESFKSMSTQNGFIFYIPAWLTSKIDPSTGFVNLLKTKYTSIADSKKFISSFDRIMYVPEEDLFEFALDYKNFSRTDADYIKKWKLYSYGNRIRIFRNPKKNNVFDWEEVCLTSAYKELFNKYGINYQQGDIRALLCEQSDKAFYSSFMALMSLMLQMRNSITGRTDVDFLISPVKNSDGIFYDSRNYEAQENAILPKNADANGAYNIARKVLWAIGQFKKAEDEKLDKVKIAISNKEWLEYAQTSVKHGSSGSSGSSGSSGSSGSKLEKFTNCYSLSKTLRFKAIPVGKTQENIDNKRLLVEDEKRAEDYKGVKKLLDRYYLSFINDVLHSIKLKNLNNYISLFRKKTSGGSSGGSSGGSEASPASGPRHLMDPHIFTSNFNNGIGRHKTYLCYEVERLDNGTSVKMDQHRGFLHNQAKNLLCGFYGRHAELRFLDLVPSLQLDPAQIYRVTWFISWSPCFSWGCAGEVRAFLQENTHVRLRIFAARIYDYDPLYKEALQMLRDAGAQVSIMTYDEFKHCWDTFVDHQGCPFQPWDGLDEHSQALSGRLRAILQNQGN

SEQ ID NO: 627 - protein, 1542 aa, synthetic construct
TNLSDIIEKETGKQLVIQESILMLPEEVEEVIGNKPESDILVHTAYDESTDENVMLLTSDAPEYKPWALVIQDSNGENKIKMLSGGSGGSGGSRTEKENKELENLEINLRKEIAKAFKGNEGYKSLFKKDIIETILPEFLDDKDEIALVNSFNGFTTAFTGFFDNRENMFSEEAKSTSIAFRCINENLTRYISNMDIFEKVDAIFDKHEVQEIKEKILNSDYDVEDFFEGEFFNFVLTQEGIDVYNAIIGGFVTESGEKIKGLNEYINLYNQKTKQKLPKFKPLYKQVLSDRESLSFYGEGYTSDEEVLEVFRNTLNKNSEIFSSIKKLEKLFKNFDEYSSAGIFVKNGPAISTISKDIFGEWNVIRDKWNAEYDDIHLKKKAVVTEKYEDDRRKSFKKIGSFSLEQLQEYADADLSVVEKLKEIIIQKVDEIYKVYGSSEKLFDADFVLEKSLKKNDAVVAIMKDLLDSVKSFENYIKAFFGEGKETNRDESFYGDFVLAYDILLKVDHIYDAIRNYVTQKPYSKDKFKLYFQNPQFMGGWDKDKETDYRATILRYGSKYYLAIMDKKYAKCLQKIDKDDVNGNYEKINYKLLPGPNKMLPKVFFSKKWMAYYNPSEDIQKIYKNGTFKKGDMFNLNDCHKLIDFFKDSISRYPKWSNAYDFNFSETEKYKDIAGFYREVEEQGYKVSFESASKKEVDKLVEEGKLYMFQIYNKDFSDKSHGTPNLHTMYFKLLFDENNHGQIRLSGGAELFMRRASLKKEELVVHPANSPIANKNPDNPKKTTTLSYDVYKDKRFSEDQYELHIPIAINKCPKNIFKINTEVRVLLKHDDNPYVIGIARGERNLLYIVVVDGKGNIVEQYSLNEIINNFNGIRIKTDYHSLLDKKEKERFEARQNWTSIENIKELKAGYISQVVHKICELVEKYDAVIALEDLNSGFKNSRVKVEKQVYQKFEKMLIDKLNYMVDKKSNPCATGGALKGYQITNKFESFKSMSTQNGFIFYIPAWLTSKIDPSTGFVNLLKTKYTSIADSKKFISSFDRIMYVPEEDLFEFALDYKNFSRTDADYIKKWKLYSYGNRIRIFRNPKKNNVFDWEEVCLTSAYKELFNKYGINYQQGDIRALLCEQSDKAFYSSFMALMSLMLQMRNSITGRTDVDFLISPVKNSDGIFYDSRNYEAQENAILPKNADANGAYNIARKVLWAIGQFKKAEDEKLDKVKIAISNKEWLEYAQTSVKHGSSGSSGSSGSSGSSGSKLEKFTNCYSLSKTLRFKAIPVGKTQENIDNKRLLVEDEKRAEDYKGVKKLLDRYYLSFINDVLHSIKLKNLNNYISLFRKKTSGGSSGGSEASPASGPRHLMDPHIFTSNFNNGIGRHKTYLCYEVERLDNGTSVKMDQHRGFLHNQAKNLLCGFYGRHAELRFLDLVPSLQLDPAQIYRVTWFISWSPCFSWGCAGEVRAFLQENTHVRLRIFAARIYDYDPLYKEALQMLRDAGAQVSIMTYDEFKHCWDTFVDHQGCPFQPWDGLDEHSQALSGRLRAILQNQGN

SEQ ID NO: 628 - protein, 1540 aa, synthetic construct
TNLSDIIEKETGKQLVIQESILMLPEEVEEVIGNKPESDILVHTAYDESTDENVMLLTSDAPEYKPWALVIQDSNGENKIKMLSGGSGGSGGSRTEKENKELENLEINLRKEIAKAFKGNEGYKSLFKKDIIETILPEFLDDKDEIALVNSFNGFTTAFTGFFDNRENMFSEEAKSTSIAFRCINENLTRYISNMDIFEKVDAIFDKHEVQEIKEKILNSDYDVEDFFEGEFFNFVLTQEGIDVYNAIIGGFVTESGEKIKGLNEYINLYNQKTKQKLPKFKPLYKQVLSDRESLSFYGEGYTSDEEVLEVFRNTLNKNSEIFSSIKKLEKLFKNFDEYSSAGIFVKNGPAISTISKDIFGEWNVIRDKWNAEYDDIHLKKKAVVTEKYEDDRRKSFKKIGSFSLEQLQEYADADLSVVEKLKEIIIQKVDEIYKVYGSSEKLFDADFVLEKSLKKNDAVVAIMKDLLDSVKSFENYIKAFFGEGKETNRDESFYGDFVLAYDILLKVDHIYDAIRNYVTQKPYSKDKFKLYFQNPQFMGGWDKDKETDYRATILRYGSKYYLAIMDKKYAKCLQKIDKDDVNGNYEKINYKLLPGPNKMLPKVFFSKKWMAYYNPSEDIQKIYKNGTFKKGDMFNLNDCHKLIDFFKDSISRYPKWSNAYDFNFSETEKYKDIAGFYREVEEQGYKVSFESASKKEVDKLVEEGKLYMFQIYNKDFSDKSHGTPNLHTMYFKLLFDENNHGQIRLSGGAELFMRRASLKKEELVVHPANSPIANKNPDNPKKTTTLSYDVYKDKRFSEDQYELHIPIAINKCPKNIFKINTEVRVLLKHDDNPYVIGIARGERNLLYIVVVDGKGNIVEQYSLNEIINNFNGIRIKTDYHSLLDKKEKERFEARQNWTSIENIKELKAGYISQVVHKICELVEKYDAVIALEDLNSGFKNSRVKVEKQVYQKFEKMLIDKLNYMVDKKSNPCATGGALKGYQITNKFESFKSMSTQNGFIFYIPAWLTSKIDPSTGFVNLLKTKYTSIADSKKFISSFDRIMYVPEEDLFEFALDYKNFSRTDADYIKKWKLYSYGNRIRIFRNPKKNNVFDWEEVCLTSAYKELFNKYGINYQQGDIRALLCEQSDKAFYSSFMALMSLMLQMRNSITGRTDVDFLISPVKNSDGIFYDSRNYEAQENAILPKNADANGAYNIARKVLWAIGQFKKAEDEKLDKVKIAISNKEWLEYAQTSVKHGSSGSSGSSGSSGSSGSKLEKFTNCYSLSKTLRFKAIPVGKTQENIDNKRLLVEDEKRAEDYKGVKKLLDRYYLSFINDVLHSIKLKNLNNYISLFRKKTSGSSGSEASPASGPRHLMDPHIFTSNFNNGIGRHKTYLCYEVERLDNGTSVKMDQHRGFLHNQAKNLLCGFYGRHAELRFLDLVPSLQLDPAQIYRVTWFISWSPCFSWGCAGEVRAFLQENTHVRLRIFAARIYDYDPLYKEALQMLRDAGAQVSIMTYDEFKHCWDTFVDHQGCPFQPWDGLDEHSQALSGRLRAILQNQGN

SEQ ID NO: 629 - protein, 1550 aa, synthetic construct
EASPASGPRHLMDPHIFTSNFNNGIGRHKTYLCYEVERLDNGTSVKMDQHRGFLHNQAKNLLCGFYGRHAELRFLDLVPSLQLDPAQIYRVTWFISWSPCFSWGCAGEVRAFLQENTHVRLRIFAARIYDYDPLYKEALQMLRDAGAQVSIMTYDEFKHCWDTFVDHQGCPFQPWDGLDEHSQALSGRLRAILQNQGNSGSETPGTSESATPESKDKFKLYFQNPQFMGGWDKDKETDYRATILRYGSKYYLAIMDKKYAKCLQKIDKDDVNGNYEKINYKLLPGPNKMLPKVFFSKKWMAYYNPSEDIQKIYKNGTFKKGDMFNLNDCHKLIDFFKDSISRYPKWSNAYDFNFSETEKYKDIAGFYREVEEQGYKVSFESASKKEVDKLVEEGKLYMFQIYNKDFSDKSHGTPNLHTMYFKLLFDENNHGQIRLSGGAELFMRRASLKKEELVVHPANSPIANKNPDNPKKTTTLSYDVYKDKRFSEDQYELHIPIAINKCPKNIFKINTEVRVLLKHDDNPYVIGIARGERNLLYIVVVDGKGNIVEQYSLNEIINNFNGIRIKTDYHSLLDKKEKERFEARQNWTSIENIKELKAGYISQVVHKICELVEKYDAVIALEDLNSGFKNSRVKVEKQVYQKFEKMLIDKLNYMVDKKSNPCATGGALKGYQITNKFESFKSMSTQNGFIFYIPAWLTSKIDPSTGFVNLLKTKYTSIADSKKFISSFDRIMYVPEEDLFEFALDYKNFSRTDADYIKKWKLYSYGNRIRIFRNPKKNNVFDWEEVCLTSAYKELFNKYGINYQQGDIRALLCEQSDKAFYSSFMALMSLMLQMRNSITGRTDVDFLISPVKNSDGIFYDSRNYEAQENAILPKNADANGAYNIARKVLWAIGQFKKAEDEKLDKVKIAISNKEWLEYAQTSVKHGSSGSSGSSGSSGSSGSKLEKFTNCYSLSKTLRFKAIPVGKTQENIDNKRLLVEDEKRAEDYKGVKKLLDRYYLSFINDVLHSIKLKNLNNYISLFRKKTRTEKENKELENLEINLRKEIAKAFKGNEGYKSLFKKDIIETILPEFLDDKDEIALVNSFNGFTTAFTGFFDNRENMFSEEAKSTSIAFRCINENLTRYISNMDIFEKVDAIFDKHEVQEIKEKILNSDYDVEDFFEGEFFNFVLTQEGIDVYNAIIGGFVTESGEKIKGLNEYINLYNQKTKQKLPKFKPLYKQVLSDRESLSFYGEGYTSDEEVLEVFRNTLNKNSEIFSSIKKLEKLFKNFDEYSSAGIFVKNGPAISTISKDIFGEWNVIRDKWNAEYDDIHLKKKAVVTEKYEDDRRKSFKKIGSFSLEQLQEYADADLSVVEKLKEIIIQKVDEIYKVYGSSEKLFDADFVLEKSLKKNDAVVAIMKDLLDSVKSFENYIKAFFGEGKETNRDESFYGDFVLAYDILLKVDHIYDAIRNYVTQKPYSSGGSGGSGGSTNLSDIIEKETGKQLVIQESILMLPEEVEEVIGNKPESDILVHTAYDESTDENVMLLTSDAPEYKPWALVIQDSNGENKIKML

SEQ ID NO: 630 - protein, 1546 aa, synthetic construct
EASPASGPRHLMDPHIFTSNFNNGIGRHKTYLCYEVERLDNGTSVKMDQHRGFLHNQAKNLLCGFYGRHAELRFLDLVPSLQLDPAQIYRVTWFISWSPCFSWGCAGEVRAFLQENTHVRLRIFAARIYDYDPLYKEALQMLRDAGAQVSIMTYDEFKHCWDTFVDHQGCPFQPWDGLDEHSQALSGRLRAILQNQGNSGGSSGGSSGGSKDKFKLYFQNPQFMGGWDKDKETDYRATILRYGSKYYLAIMDKKYAKCLQKIDKDDVNGNYEKINYKLLPGPNKMLPKVFFSKKWMAYYNPSEDIQKIYKNGTFKKGDMFNLNDCHKLIDFFKDSISRYPKWSNAYDFNFSETEKYKDIAGFYREVEEQGYKVSFESASKKEVDKLVEEGKLYMFQIYNKDFSDKSHGTPNLHTMYFKLLFDENNHGQIRLSGGAELFMRRASLKKEELVVHPANSPIANKNPDNPKKTTTLSYDVYKDKRFSEDQYELHIPIAINKCPKNIFKINTEVRVLLKHDDNPYVIGIARGERNLLYIVVVDGKGNIVEQYSLNEIINNFNGIRIKTDYHSLLDKKEKERFEARQNWTSIENIKELKAGYISQVVHKICELVEKYDAVIALEDLNSGFKNSRVKVEKQVYQKFEKMLIDKLNYMVDKKSNPCATGGALKGYQITNKFESFKSMSTQNGFIFYIPAWLTSKIDPSTGFVNLLKTKYTSIADSKKFISSFDRIMYVPEEDLFEFALDYKNFSRTDADYIKKWKLYSYGNRIRIFRNPKKNNVFDWEEVCLTSAYKELFNKYGINYQQGDIRALLCEQSDKAFYSSFMALMSLMLQMRNSITGRTDVDFLISPVKNSDGIFYDSRNYEAQENAILPKNADANGAYNIARKVLWAIGQFKKAEDEKLDKVKIAISNKEWLEYAQTSVKHGSSGSSGSSGSSGSSGSKLEKFTNCYSLSKTLRFKAIPVGKTQENIDNKRLLVEDEKRAEDYKGVKKLLDRYYLSFINDVLHSIKLKNLNNYISLFRKKTRTEKENKELENLEINLRKEIAKAFKGNEGYKSLFKKDIIETILPEFLDDKDEIALVNSFNGFTTAFTGFFDNRENMFSEEAKSTSIAFRCINENLTRYISNMDIFEKVDAIFDKHEVQEIKEKILNSDYDVEDFFEGEFFNFVLTQEGIDVYNAIIGGFVTESGEKIKGLNEYINLYNQKTKQKLPKFKPLYKQVLSDRESLSFYGEGYTSDEEVLEVFRNTLNKNSEIFSSIKKLEKLFKNFDEYSSAGIFVKNGPAISTISKDIFGEWNVIRDKWNAEYDDIHLKKKAVVTEKYEDDRRKSFKKIGSFSLEQLQEYADADLSVVEKLKEIIIQKVDEIYKVYGSSEKLFDADFVLEKSLKKNDAVVAIMKDLLDSVKSFENYIKAFFGEGKETNRDESFYGDFVLAYDILLKVDHIYDAIRNYVTQKPYSSGGSGGSGGSTNLSDIIEKETGKQLVIQESILMLPEEVEEVIGNKPESDILVHTAYDESTDENVMLLTSDAPEYKPWALVIQDSNGENKIKML

SEQ ID NO: 631 - protein, 1542 aa, synthetic construct
EASPASGPRHLMDPHIFTSNFNNGIGRHKTYLCYEVERLDNGTSVKMDQHRGFLHNQAKNLLCGFYGRHAELRFLDLVPSLQLDPAQIYRVTWFISWSPCFSWGCAGEVRAFLQENTHVRLRIFAARIYDYDPLYKEALQMLRDAGAQVSIMTYDEFKHCWDTFVDHQGCPFQPWDGLDEHSQALSGRLRAILQNQGNSGGSSGGSKDKFKLYFQNPQFMGGWDKDKETDYRATILRYGSKYYLAIMDKKYAKCLQKIDKDDVNGNYEKINYKLLPGPNKMLPKVFFSKKWMAYYNPSEDIQKIYKNGTFKKGDMFNLNDCHKLIDFFKDSISRYPKWSNAYDFNFSETEKYKDIAGFYREVEEQGYKVSFESASKKEVDKLVEEGKLYMFQIYNKDFSDKSHGTPNLHTMYFKLLFDENNHGQIRLSGGAELFMRRASLKKEELVVHPANSPIANKNPDNPKKTTTLSYDVYKDKRFSEDQYELHIPIAINKCPKNIFKINTEVRVLLKHDDNPYVIGIARGERNLLYIVVVDGKGNIVEQYSLNEIINNFNGIRIKTDYHSLLDKKEKERFEARQNWTSIENIKELKAGYISQVVHKICELVEKYDAVIALEDLNSGFKNSRVKVEKQVYQKFEKMLIDKLNYMVDKKSNPCATGGALKGYQITNKFESFKSMSTQNGFIFYIPAWLTSKIDPSTGFVNLLKTKYTSIADSKKFISSFDRIMYVPEEDLFEFALDYKNFSRTDADYIKKWKLYSYGNRIRIFRNPKKNNVFDWEEVCLTSAYKELFNKYGINYQQGDIRALLCEQSDKAFYSSFMALMSLMLQMRNSITGRTDVDFLISPVKNSDGIFYDSRNYEAQENAILPKNADANGAYNIARKVLWAIGQFKKAEDEKLDKVKIAISNKEWLEYAQTSVKHGSSGSSGSSGSSGSSGSKLEKFTNCYSLSKTLRFKAIPVGKTQENIDNKRLLVEDEKRAEDYKGVKKLLDRYYLSFINDVLHSIKLKNLNNYISLFRKKTRTEKENKELENLEINLRKEIAKAFKGNEGYKSLFKKDIIETILPEFLDDKDEIALVNSFNGFTTAFTGFFDNRENMFSEEAKSTSIAFRCINENLTRYISNMDIFEKVDAIFDKHEVQEIKEKILNSDYDVEDFFEGEFFNFVLTQEGIDVYNAIIGGFVTESGEKIKGLNEYINLYNQKTKQKLPKFKPLYKQVLSDRESLSFYGEGYTSDEEVLEVFRNTLNKNSEIFSSIKKLEKLFKNFDEYSSAGIFVKNGPAISTISKDIFGEWNVIRDKWNAEYDDIHLKKKAVVTEKYEDDRRKSFKKIGSFSLEQLQEYADADLSVVEKLKEIIIQKVDEIYKVYGSSEKLFDADFVLEKSLKKNDAVVAIMKDLLDSVKSFENYIKAFFGEGKETNRDESFYGDFVLAYDILLKVDHIYDAIRNYVTQKPYSSGGSGGSGGSTNLSDIIEKETGKQLVIQESILMLPEEVEEVIGNKPESDILVHTAYDESTDENVMLLTSDAPEYKPWALVIQDSNGENKIKML

SEQ ID NO: 632 - protein, 1540 aa, synthetic construct
EASPASGPRHLMDPHIFTSNFNNGIGRHKTYLCYEVERLDNGTSVKMDQHRGFLHNQAKNLLCGFYGRHAELRFLDLVPSLQLDPAQIYRVTWFISWSPCFSWGCAGEVRAFLQENTHVRLRIFAARIYDYDPLYKEALQMLRDAGAQVSIMTYDEFKHCWDTFVDHQGCPFQPWDGLDEHSQALSGRLRAILQNQGNSGSSGSKDKFKLYFQNPQFMGGWDKDKETDYRATILRYGSKYYLAIMDKKYAKCLQKIDKDDVNGNYEKINYKLLPGPNKMLPKVFFSKKWMAYYNPSEDIQKIYKNGTFKKGDMFNLNDCHKLIDFFKDSISRYPKWSNAYDFNFSETEKYKDIAGFYREVEEQGYKVSFESASKKEVDKLVEEGKLYMFQIYNKDFSDKSHGTPNLHTMYFKLLFDENNHGQIRLSGGAELFMRRASLKKEELVVHPANSPIANKNPDNPKKTTTLSYDVYKDKRFSEDQYELHIPIAINKCPKNIFKINTEVRVLLKHDDNPYVIGIARGERNLLYIVVVDGKGNIVEQYSLNEIINNFNGIRIKTDYHSLLDKKEKERFEARQNWTSIENIKELKAGYISQVVHKICELVEKYDAVIALEDLNSGFKNSRVKVEKQVYQKFEKMLIDKLNYMVDKKSNPCATGGALKGYQITNKFESFKSMSTQNGFIFYIPAWLTSKIDPSTGFVNLLKTKYTSIADSKKFISSFDRIMYVPEEDLFEFALDYKNFSRTDADYIKKWKLYSYGNRIRIFRNPKKNNVFDWEEVCLTSAYKELFNKYGINYQQGDIRALLCEQSDKAFYSSFMALMSLMLQMRNSITGRTDVDFLISPVKNSDGIFYDSRNYEAQENAILPKNADANGAYNIARKVLWAIGQFKKAEDEKLDKVKIAISNKEWLEYAQTSVKHGSSGSSGSSGSSGSSGSKLEKFTNCYSLSKTLRFKAIPVGKTQENIDNKRLLVEDEKRAEDYKGVKKLLDRYYLSFINDVLHSIKLKNLNNYISLFRKKTRTEKENKELENLEINLRKEIAKAFKGNEGYKSLFKKDIIETILPEFLDDKDEIALVNSFNGFTTAFTGFFDNRENMFSEEAKSTSIAFRCINENLTRYISNMDIFEKVDAIFDKHEVQEIKEKILNSDYDVEDFFEGEFFNFVLTQEGIDVYNAIIGGFVTESGEKIKGLNEYINLYNQKTKQKLPKFKPLYKQVLSDRESLSFYGEGYTSDEEVLEVFRNTLNKNSEIFSSIKKLEKLFKNFDEYSSAGIFVKNGPAISTISKDIFGEWNVIRDKWNAEYDDIHLKKKAVVTEKYEDDRRKSFKKIGSFSLEQLQEYADADLSVVEKLKEIIIQKVDEIYKVYGSSEKLFDADFVLEKSLKKNDAVVAIMKDLLDSVKSFENYIKAFFGEGKETNRDESFYGDFVLAYDILLKVDHIYDAIRNYVTQKPYSSGGSGGSGGSTNLSDIIEKETGKQLVIQESILMLPEEVEEVIGNKPESDILVHTAYDESTDENVMLLTSDAPEYKPWALVIQDSNGENKIKML

SEQ ID NO: 633 - protein, 1538 aa, synthetic construct
EASPASGPRHLMDPHIFTSNFNNGIGRHKTYLCYEVERLDNGTSVKMDQHRGFLHNQAKNLLCGFYGRHAELRFLDLVPSLQLDPAQIYRVTWFISWSPCFSWGCAGEVRAFLQENTHVRLRIFAARIYDYDPLYKEALQMLRDAGAQVSIMTYDEFKHCWDTFVDHQGCPFQPWDGLDEHSQALSGRLRAILQNQGNSGGSKDKFKLYFQNPQFMGGWDKDKETDYRATILRYGSKYYLAIMDKKYAKCLQKIDKDDVNGNYEKINYKLLPGPNKMLPKVFFSKKWMAYYNPSEDIQKIYKNGTFKKGDMFNLNDCHKLIDFFKDSISRYPKWSNAYDFNFSETEKYKDIAGFYREVEEQGYKVSFESASKKEVDKLVEEGKLYMFQIYNKDFSDKSHGTPNLHTMYFKLLFDENNHGQIRLSGGAELFMRRASLKKEELVVHPANSPIANKNPDNPKKTTTLSYDVYKDKRFSEDQYELHIPIAINKCPKNIFKINTEVRVLLKHDDNPYVIGIARGERNLLYIVVVDGKGNIVEQYSLNEIINNFNGIRIKTDYHSLLDKKEKERFEARQNWTSIENIKELKAGYISQVVHKICELVEKYDAVIALEDLNSGFKNSRVKVEKQVYQKFEKMLIDKLNYMVDKKSNPCATGGALKGYQITNKFESFKSMSTQNGFIFYIPAWLTSKIDPSTGFVNLLKTKYTSIADSKKFISSFDRIMYVPEEDLFEFALDYKNFSRTDADYIKKWKLYSYGNRIRIFRNPKKNNVFDWEEVCLTSAYKELFNKYGINYQQGDIRALLCEQSDKAFYSSFMALMSLMLQMRNSITGRTDVDFLISPVKNSDGIFYDSRNYEAQENAILPKNADANGAYNIARKVLWAIGQFKKAEDEKLDKVKIAISNKEWLEYAQTSVKHGSSGSSGSSGSSGSSGSKLEKFTNCYSLSKTLRFKAIPVGKTQENIDNKRLLVEDEKRAEDYKGVKKLLDRYYLSFINDVLHSIKLKNLNNYISLFRKKTRTEKENKELENLEINLRKEIAKAFKGNEGYKSLFKKDIIETILPEFLDDKDEIALVNSFNGFTTAFTGFFDNRENMFSEEAKSTSIAFRCINENLTRYISNMDIFEKVDAIFDKHEVQEIKEKILNSDYDVEDFFEGEFFNFVLTQEGIDVYNAIIGGFVTESGEKIKGLNEYINLYNQKTKQKLPKFKPLYKQVLSDRESLSFYGEGYTSDEEVLEVFRNTLNKNSEIFSSIKKLEKLFKNFDEYSSAGIFVKNGPAISTISKDIFGEWNVIRDKWNAEYDDIHLKKKAVVTEKYEDDRRKSFKKIGSFSLEQLQEYADADLSVVEKLKEIIIQKVDEIYKVYGSSEKLFDADFVLEKSLKKNDAVVAIMKDLLDSVKSFENYIKAFFGEGKETNRDESFYGDFVLAYDILLKVDHIYDAIRNYVTQKPYSSGGSGGSGGSTNLSDIIEKETGKQLVIQESILMLPEEVEEVIGNKPESDILVHTAYDESTDENVMLLTSDAPEYKPWALVIQDSNGENKIKML

SEQ ID NO: 634 - protein, 1550 aa, synthetic construct
EASPASGPRHLMDPHIFTSNFNNGIGRHKTYLCYEVERLDNGTSVKMDQHRGFLHNQAKNLLCGFYGRHAELRFLDLVPSLQLDPAQIYRVTWFISWSPCFSWGCAGEVRAFLQENTHVRLRIFAARIYDYDPLYKEALQMLRDAGAQVSIMTYDEFKHCWDTFVDHQGCPFQPWDGLDEHSQALSGRLRAILQNQGNSGSETPGTSESATPESKDKFKLYFQNPQFMGGWDKDKETDYRATILRYGSKYYLAIMDKKYAKCLQKIDKDDVNGNYEKINYKLLPGPNKMLPKVFFSKKWMAYYNPSEDIQKIYKNGTFKKGDMFNLNDCHKLIDFFKDSISRYPKWSNAYDFNFSETEKYKDIAGFYREVEEQGYKVSFESASKKEVDKLVEEGKLYMFQIYNKDFSDKSHGTPNLHTMYFKLLFDENNHGQIRLSGGAELFMRRASLKKEELVVHPANSPIANKNPDNPKKTTTLSYDVYKDKRFSEDQYELHIPIAINKCPKNIFKINTEVRVLLKHDDNPYVIGIDRGERNLLYIVVVDGKGNIVEQYSLNEIINNFNGIRIKTDYHSLLDKKEKERFEARQNWTSIENIKELKAGYISQVVHKICELVEKYDAVIALEDLNSGFKNSRVKVEKQVYQKFEKMLIDKLNYMVDKKSNPCATGGALKGYQITNKFESFKSMSTQNGFIFYIPAWLTSKIDPSTGFVNLLKTKYTSIADSKKFISSFDRIMYVPEEDLFEFALDYKNFSRTDADYIKKWKLYSYGNRIRIFRNPKKNNVFDWEEVCLTSAYKELFNKYGINYQQGDIRALLCEQSDKAFYSSFMALMSLMLQMANSITGRTDVDFLISPVKNSDGIFYDSRNYEAQENAILPKNADANGAYNIARKVLWAIGQFKKAEDEKLDKVKIAISNKEWLEYAQTSVKHGSSGSSGSSGSSGSSGSKLEKFTNCYSLSKTLRFKAIPVGKTQENIDNKRLLVEDEKRAEDYKGVKKLLDRYYLSFINDVLHSIKLKNLNNYISLFRKKTRTEKENKELENLEINLRKEIAKAFKGNEGYKSLFKKDIIETILPEFLDDKDEIALVNSFNGFTTAFTGFFDNRENMFSEEAKSTSIAFRCINENLTRYISNMDIFEKVDAIFDKHEVQEIKEKILNSDYDVEDFFEGEFFNFVLTQEGIDVYNAIIGGFVTESGEKIKGLNEYINLYNQKTKQKLPKFKPLYKQVLSDRESLSFYGEGYTSDEEVLEVFRNTLNKNSEIFSSIKKLEKLFKNFDEYSSAGIFVKNGPAISTISKDIFGEWNVIRDKWNAEYDDIHLKKKAVVTEKYEDDRRKSFKKIGSFSLEQLQEYADADLSVVEKLKEIIIQKVDEIYKVYGSSEKLFDADFVLEKSLKKNDAVVAIMKDLLDSVKSFENYIKAFFGEGKETNRDESFYGDFVLAYDILLKVDHIYDAIRNYVTQKPYSSGGSGGSGGSTNLSDIIEKETGKQLVIQESILMLPEEVEEVIGNKPESDILVHTAYDESTDENVMLLTSDAPEYKPWALVIQDSNGENKIKML

SEQ ID NO: 635 - protein, 1546 aa, synthetic construct
EASPASGPRHLMDPHIFTSNFNNGIGRHKTYLCYEVERLDNGTSVKMDQHRGFLHNQAKNLLCGFYGRHAELRFLDLVPSLQLDPAQIYRVTWFISWSPCFSWGCAGEVRAFLQENTHVRLRIFAARIYDYDPLYKEALQMLRDAGAQVSIMTYDEFKHCWDTFVDHQGCPFQPWDGLDEHSQALSGRLRAILQNQGNSGGSSGGSSGGSKDKFKLYFQNPQFMGGWDKDKETDYRATILRYGSKYYLAIMDKKYAKCLQKIDKDDVNGNYEKINYKLLPGPNKMLPKVFFSKKWMAYYNPSEDIQKIYKNGTFKKGDMFNLNDCHKLIDFFKDSISRYPKWSNAYDFNFSETEKYKDIAGFYREVEEQGYKVSFESASKKEVDKLVEEGKLYMFQIYNKDFSDKSHGTPNLHTMYFKLLFDENNHGQIRLSGGAELFMRRASLKKEELVVHPANSPIANKNPDNPKKTTTLSYDVYKDKRFSEDQYELHIPIAINKCPKNIFKINTEVRVLLKHDDNPYVIGIDRGERNLLYIVVVDGKGNIVEQYSLNEIINNFNGIRIKTDYHSLLDKKEKERFEARQNWTSIENIKELKAGYISQVVHKICELVEKYDAVIALEDLNSGFKNSRVKVEKQVYQKFEKMLIDKLNYMVDKKSNPCATGGALKGYQITNKFESFKSMSTQNGFIFYIPAWLTSKIDPSTGFVNLLKTKYTSIADSKKFISSFDRIMYVPEEDLFEFALDYKNFSRTDADYIKKWKLYSYGNRIRIFRNPKKNNVFDWEEVCLTSAYKELFNKYGINYQQGDIRALLCEQSDKAFYSSFMALMSLMLQMANSITGRTDVDFLISPVKNSDGIFYDSRNYEAQENAILPKNADANGAYNIARKVLWAIGQFKKAEDEKLDKVKIAISNKEWLEYAQTSVKHGSSGSSGSSGSSGSSGSKLEKFTNCYSLSKTLRFKAIPVGKTQENIDNKRLLVEDEKRAEDYKGVKKLLDRYYLSFINDVLHSIKLKNLNNYISLFRKKTRTEKENKELENLEINLRKEIAKAFKGNEGYKSLFKKDIIETILPEFLDDKDEIALVNSFNGFTTAFTGFFDNRENMFSEEAKSTSIAFRCINENLTRYISNMDIFEKVDAIFDKHEVQEIKEKILNSDYDVEDFFEGEFFNFVLTQEGIDVYNAIIGGFVTESGEKIKGLNEYINLYNQKTKQKLPKFKPLYKQVLSDRESLSFYGEGYTSDEEVLEVFRNTLNKNSEIFSSIKKLEKLFKNFDEYSSAGIFVKNGPAISTISKDIFGEWNVIRDKWNAEYDDIHLKKKAVVTEKYEDDRRKSFKKIGSFSLEQLQEYADADLSVVEKLKEIIIQKVDEIYKVYGSSEKLFDADFVLEKSLKKNDAVVAIMKDLLDSVKSFENYIKAFFGEGKETNRDESFYGDFVLAYDILLKVDHIYDAIRNYVTQKPYSSGGSGGSGGSTNLSDIIEKETGKQLVIQESILMLPEEVEEVIGNKPESDILVHTAYDESTDENVMLLTSDAPEYKPWALVIQDSNGENKIKML

SEQ ID NO: 636 - protein, 1542 aa, synthetic construct
EASPASGPRHLMDPHIFTSNFNNGIGRHKTYLCYEVERLDNGTSVKMDQHRGFLHNQAKNLLCGFYGRHAELRFLDLVPSLQLDPAQIYRVTWFISWSPCFSWGCAGEVRAFLQENTHVRLRIFAARIYDYDPLYKEALQMLRDAGAQVSIMTYDEFKHCWDTFVDHQGCPFQPWDGLDEHSQALSGRLRAILQNQGNSGGSSGGSKDKFKLYFQNPQFMGGWDKDKETDYRATILRYGSKYYLAIMDKKYAKCLQKIDKDDVNGNYEKINYKLLPGPNKMLPKVFFSKKWMAYYNPSEDIQKIYKNGTFKKGDMFNLNDCHKLIDFFKDSISRYPKWSNAYDFNFSETEKYKDIAGFYREVEEQGYKVSFESASKKEVDKLVEEGKLYMFQIYNKDFSDKSHGTPNLHTMYFKLLFDENNHGQIRLSGGAELFMRRASLKKEELVVHPANSPIANKNPDNPKKTTTLSYDVYKDKRFSEDQYELHIPIAINKCPKNIFKINTEVRVLLKHDDNPYVIGIDRGERNLLYIVVVDGKGNIVEQYSLNEIINNFNGIRIKTDYHSLLDKKEKERFEARQNWTSIENIKELKAGYISQVVHKICELVEKYDAVIALEDLNSGFKNSRVKVEKQVYQKFEKMLIDKLNYMVDKKSNPCATGGALKGYQITNKFESFKSMSTQNGFIFYIPAWLTSKIDPSTGFVNLLKTKYTSIADSKKFISSFDRIMYVPEEDLFEFALDYKNFSRTDADYIKKWKLYSYGNRIRIFRNPKKNNVFDWEEVCLTSAYKELFNKYGINYQQGDIRALLCEQSDKAFYSSFMALMSLMLQMANSITGRTDVDFLISPVKNSDGIFYDSRNYEAQENAILPKNADANGAYNIARKVLWAIGQFKKAEDEKLDKVKIAISNKEWLEYAQTSVKHGSSGSSGSSGSSGSSGSKLEKFTNCYSLSKTLRFKAIPVGKTQENIDNKRLLVEDEKRAEDYKGVKKLLDRYYLSFINDVLHSIKLKNLNNYISLFRKKTRTEKENKELENLEINLRKEIAKAFKGNEGYKSLFKKDIIETILPEFLDDKDEIALVNSFNGFTTAFTGFFDNRENMFSEEAKSTSIAFRCINENLTRYISNMDIFEKVDAIFDKHEVQEIKEKILNSDYDVEDFFEGEFFNFVLTQEGIDVYNAIIGGFVTESGEKIKGLNEYINLYNQKTKQKLPKFKPLYKQVLSDRESLSFYGEGYTSDEEVLEVFRNTLNKNSEIFSSIKKLEKLFKNFDEYSSAGIFVKNGPAISTISKDIFGEWNVIRDKWNAEYDDIHLKKKAVVTEKYEDDRRKSFKKIGSFSLEQLQEYADADLSVVEKLKEIIIQKVDEIYKVYGSSEKLFDADFVLEKSLKKNDAVVAIMKDLLDSVKSFENYIKAFFGEGKETNRDESFYGDFVLAYDILLKVDHIYDAIRNYVTQKPYSSGGSGGSGGSTNLSDIIEKETGKQLVIQESILMLPEEVEEVIGNKPESDILVHTAYDESTDENVMLLTSDAPEYKPWALVIQDSNGENKIKML

SEQ ID NO: 637 - protein, 1540 aa, synthetic construct
EASPASGPRHLMDPHIFTSNFNNGIGRHKTYLCYEVERLDNGTSVKMDQHRGFLHNQAKNLLCGFYGRHAELRFLDLVPSLQLDPAQIYRVTWFISWSPCFSWGCAGEVRAFLQENTHVRLRIFAARIYDYDPLYKEALQMLRDAGAQVSIMTYDEFKHCWDTFVDHQGCPFQPWDGLDEHSQALSGRLRAILQNQGNSGSSGSKDKFKLYFQNPQFMGGWDKDKETDYRATILRYGSKYYLAIMDKKYAKCLQKIDKDDVNGNYEKINYKLLPGPNKMLPKVFFSKKWMAYYNPSEDIQKIYKNGTFKKGDMFNLNDCHKLIDFFKDSISRYPKWSNAYDFNFSETEKYKDIAGFYREVEEQGYKVSFESASKKEVDKLVEEGKLYMFQIYNKDFSDKSHGTPNLHTMYFKLLFDENNHGQIRLSGGAELFMRRASLKKEELVVHPANSPIANKNPDNPKKTTTLSYDVYKDKRFSEDQYELHIPIAINKCPKNIFKINTEVRVLLKHDDNPYVIGIDRGERNLLYIVVVDGKGNIVEQYSLNEIINNFNGIRIKTDYHSLLDKKEKERFEARQNWTSIENIKELKAGYISQVVHKICELVEKYDAVIALEDLNSGFKNSRVKVEKQVYQKFEKMLIDKLNYMVDKKSNPCATGGALKGYQITNKFESFKSMSTQNGFIFYIPAWLTSKIDPSTGFVNLLKTKYTSIADSKKFISSFDRIMYVPEEDLFEFALDYKNFSRTDADYIKKWKLYSYGNRIRIFRNPKKNNVFDWEEVCLTSAYKELFNKYGINYQQGDIRALLCEQSDKAFYSSFMALMSLMLQMANSITGRTDVDFLISPVKNSDGIFYDSRNYEAQENAILPKNADANGAYNIARKVLWAIGQFKKAEDEKLDKVKIAISNKEWLEYAQTSVKHGSSGSSGSSGSSGSSGSKLEKFTNCYSLSKTLRFKAIPVGKTQENIDNKRLLVEDEKRAEDYKGVKKLLDRYYLSFINDVLHSIKLKNLNNYISLFRKKTRTEKENKELENLEINLRKEIAKAFKGNEGYKSLFKKDIIETILPEFLDDKDEIALVNSFNGFTTAFTGFFDNRENMFSEEAKSTSIAFRCINENLTRYISNMDIFEKVDAIFDKHEVQEIKEKILNSDYDVEDFFEGEFFNFVLTQEGIDVYNAIIGGFVTESGEKIKGLNEYINLYNQKTKQKLPKFKPLYKQVLSDRESLSFYGEGYTSDEEVLEVFRNTLNKNSEIFSSIKKLEKLFKNFDEYSSAGIFVKNGPAISTISKDIFGEWNVIRDKWNAEYDDIHLKKKAVVTEKYEDDRRKSFKKIGSFSLEQLQEYADADLSVVEKLKEIIIQKVDEIYKVYGSSEKLFDADFVLEKSLKKNDAVVAIMKDLLDSVKSFENYIKAFFGEGKETNRDESFYGDFVLAYDILLKVDHIYDAIRNYVTQKPYSSGGSGGSGGSTNLSDIIEKETGKQLVIQESILMLPEEVEEVIGNKPESDILVHTAYDESTDENVMLLTSDAPEYKPWALVIQDSNGENKIKML

SEQ ID NO: 638 - protein, 1538 aa, synthetic construct
EASPASGPRHLMDPHIFTSNFNNGIGRHKTYLCYEVERLDNGTSVKMDQHRGFLHNQAKNLLCGFYGRHAELRFLDLVPSLQLDPAQIYRVTWFISWSPCFSWGCAGEVRAFLQENTHVRLRIFAARIYDYDPLYKEALQMLRDAGAQVSIMTYDEFKHCWDTFVDHQGCPFQPWDGLDEHSQALSGRLRAILQNQGNSGGSKDKFKLYFQNPQFMGGWDKDKETDYRATILRYGSKYYLAIMDKKYAKCLQKIDKDDVNGNYEKINYKLLPGPNKMLPKVFFSKKWMAYYNPSEDIQKIYKNGTFKKGDMFNLNDCHKLIDFFKDSISRYPKWSNAYDFNFSETEKYKDIAGFYREVEEQGYKVSFESASKKEVDKLVEEGKLYMFQIYNKDFSDKSHGTPNLHTMYFKLLFDENNHGQIRLSGGAELFMRRASLKKEELVVHPANSPIANKNPDNPKKTTTLSYDVYKDKRFSEDQYELHIPIAINKCPKNIFKINTEVRVLLKHDDNPYVIGIDRGERNLLYIVVVDGKGNIVEQYSLNEIINNFNGIRIKTDYHSLLDKKEKERFEARQNWTSIENIKELKAGYISQVVHKICELVEKYDAVIALEDLNSGFKNSRVKVEKQVYQKFEKMLIDKLNYMVDKKSNPCATGGALKGYQITNKFESFKSMSTQNGFIFYIPAWLTSKIDPSTGFVNLLKTKYTSIADSKKFISSFDRIMYVPEEDLFEFALDYKNFSRTDADYIKKWKLYSYGNRIRIFRNPKKNNVFDWEEVCLTSAYKELFNKYGINYQQGDIRALLCEQSDKAFYSSFMALMSLMLQMANSITGRTDVDFLISPVKNSDGIFYDSRNYEAQENAILPKNADANGAYNIARKVLWAIGQFKKAEDEKLDKVKIAISNKEWLEYAQTSVKHGSSGSSGSSGSSGSSGSKLEKFTNCYSLSKTLRFKAIPVGKTQENIDNKRLLVEDEKRAEDYKGVKKLLDRYYLSFINDVLHSIKLKNLNNYISLFRKKTRTEKENKELENLEINLRKEIAKAFKGNEGYKSLFKKDIIETILPEFLDDKDEIALVNSFNGFTTAFTGFFDNRENMFSEEAKSTSIAFRCINENLTRYISNMDIFEKVDAIFDKHEVQEIKEKILNSDYDVEDFFEGEFFNFVLTQEGIDVYNAIIGGFVTESGEKIKGLNEYINLYNQKTKQKLPKFKPLYKQVLSDRESLSFYGEGYTSDEEVLEVFRNTLNKNSEIFSSIKKLEKLFKNFDEYSSAGIFVKNGPAISTISKDIFGEWNVIRDKWNAEYDDIHLKKKAVVTEKYEDDRRKSFKKIGSFSLEQLQEYADADLSVVEKLKEIIIQKVDEIYKVYGSSEKLFDADFVLEKSLKKNDAVVAIMKDLLDSVKSFENYIKAFFGEGKETNRDESFYGDFVLAYDILLKVDHIYDAIRNYVTQKPYSSGGSGGSGGSTNLSDIIEKETGKQLVIQESILMLPEEVEEVIGNKPESDILVHTAYDESTDENVMLLTSDAPEYKPWALVIQDSNGENKIKML

SEQ ID NO: 639 - protein, 1566 aa, synthetic construct
EASPASGPRHLMDPHIFTSNFNNGIGRHKTYLCYEVERLDNGTSVKMDQHRGFLHNQAKNLLCGFYGRHAELRFLDLVPSLQLDPAQIYRVTWFISWSPCFSWGCAGEVRAFLQENTHVRLRIFAARIYDYDPLYKEALQMLRDAGAQVSIMTYDEFKHCWDTFVDHQGCPFQPWDGLDEHSQALSGRLRAILQNQGNSGGSSGGSSGSETPGTSESATPESSGGSSGGSKDKFKLYFQNPQFMGGWDKDKETDYRATILRYGSKYYLAIMDKKYAKCLQKIDKDDVNGNYEKINYKLLPGPNKMLPKVFFSKKWMAYYNPSEDIQKIYKNGTFKKGDMFNLNDCHKLIDFFKDSISRYPKWSNAYDFNFSETEKYKDIAGFYREVEEQGYKVSFESASKKEVDKLVEEGKLYMFQIYNKDFSDKSHGTPNLHTMYFKLLFDENNHGQIRLSGGAELFMRRASLKKEELVVHPANSPIANKNPDNPKKTTTLSYDVYKDKRFSEDQYELHIPIAINKCPKNIFKINTEVRVLLKHDDNPYVIGIDRGERNLLYIVVVDGKGNIVEQYSLNEIINNFNGIRIKTDYHSLLDKKEKERFEARQNWTSIENIKELKAGYISQVVHKICELVEKYDAVIALEDLNSGFKNSRVKVEKQVYQKFEKMLIDKLNYMVDKKSNPCATGGALKGYQITNKFESFKSMSTQNGFIFYIPAWLTSKIDPSTGFVNLLKTKYTSIADSKKFISSFDRIMYVPEEDLFEFALDYKNFSRTDADYIKKWKLYSYGNRIRIFRNPKKNNVFDWEEVCLTSAYKELFNKYGINYQQGDIRALLCEQSDKAFYSSFMALMSLMLQMANSITGRTDVDFLISPVKNSDGIFYDSRNYEAQENAILPKNADANGAYNIARKVLWAIGQFKKAEDEKLDKVKIAISNKEWLEYAQTSVKHGSSGSSGSSGSSGSSGSKLEKFTNCYSLSKTLRFKAIPVGKTQENIDNKRLLVEDEKRAEDYKGVKKLLDRYYLSFINDVLHSIKLKNLNNYISLFRKKTRTEKENKELENLEINLRKEIAKAFKGNEGYKSLFKKDIIETILPEFLDDKDEIALVNSFNGFTTAFTGFFDNRENMFSEEAKSTSIAFRCINENLTRYISNMDIFEKVDAIFDKHEVQEIKEKILNSDYDVEDFFEGEFFNFVLTQEGIDVYNAIIGGFVTESGEKIKGLNEYINLYNQKTKQKLPKFKPLYKQVLSDRESLSFYGEGYTSDEEVLEVFRNTLNKNSEIFSSIKKLEKLFKNFDEYSSAGIFVKNGPAISTISKDIFGEWNVIRDKWNAEYDDIHLKKKAVVTEKYEDDRRKSFKKIGSFSLEQLQEYADADLSVVEKLKEIIIQKVDEIYKVYGSSEKLFDADFVLEKSLKKNDAVVAIMKDLLDSVKSFENYIKAFFGEGKETNRDESFYGDFVLAYDILLKVDHIYDAIRNYVTQKPYSSGGSGGSGGSTNLSDIIEKETGKQLVIQESILMLPEEVEEVIGNKPESDILVHTAYDESTDENVMLLTSDAPEYKPWALVIQDSNGENKIKML

SEQ ID NO: 640 - DNA, 4432 bp, synthetic construct
  source 1..4432: mol_type = other DNA
tctgaggttgaattttcacatgagtattggatgagacacgctcttaccttggctaagagagcaagggatgagagagaagttccagtgggagcagttcttgtgttgaacaatagagttattggagagggttggaacaggtaagtatcaaggttacaagacaggtttaaggagaccaatagaaactgggcttgtcgagacagagaagactcttgcgtttctgataggcacctattggtcttactgacatccactttgcctttctctccacagggctattggacttcatgatcctactgctcacgcagaaattatggcacttagacaaggtggacttgttatgcagaactacaggcttatcgatgctactctttatgttacattcgagccatgtgtgatgtgcgctggagcaatgattcattctaggattggaagggttgtgttcggtgttagaaactctaagaggggagctgcaggttcacttatgaacgttttgaattatcctggtatgaaccacagagtggagattactgaaggtattttggcagatgaatgtgctgcacttttgtgcgatttttacagaatgcctagacaagtgttcaacgctcaaaagaaggcacaatcttctattaactctggtggttctagcggcagcgagactcccgggacctcagagtccgccacacccgaaagttctggtggttctcgcaccgagaaggagaacaaggagctggagaacctggagatcaacctccgcaaggaaatcgccaaagcgttcaagggcaatgaagggtacaagagcctcttcaagaaagacatcatcgaaactatcctcccagagtttctcgatgacaaggacgagatcgcgctggtgaactcctttaacgggttcacaaccgcgtttaccggcttctttgataacagggaaaatatgttctccgaggaggccaagtccaccagcatcgccttcaggtgtatcaacgagaacctcacccgctacatttccaatatggacattttcgagaaggtggatgcgatcttcgataagcacgaggtgcaggagatcaaagagaagattctcaattccgattatgacgtcgaggatttcttcgaaggggagttctttaattttgtgctcacacaagagggcattgacgtgtacaacgcgattatcgggggcttcgtcacagagtccggggagaagattaaggggctgaatgagtacatcaatctgtacaatcagaagaccaagcagaaactgccgaaattcaagccgctctacaagcaagtcctgtccgatagggaaagcctctccttctacggcgagggctataccagcgacgaggaggtgctggaagtcttccgcaacacactgaataagaatagcgagattttctcctccatcaagaagctcgagaagctctttaagaactttgacgagtacagctccgccgggattttcgtgaagaacgggccggcgatcagcaccatctccaaggacatctttggcgagtggaacgtcatcagggacaagtggaacgccgagtacgacgacatccacctgaagaagaaggcggtggtgaccgagaagtatgaggacgatcgcaggaagtccttcaaaaaaatcggctccttcagcctcgaacagctccaggagtatgccgatgcggatctgtccgtcgtcgagaagctgaaggaaatcatcattcagaaggtcgacgagatctataaagtgtacgggtccagcgagaagctgttcgacgccgactttgtgctcgagaagtccctcaaaaagaatgacgccgtggtggccattatgaaagacctgctcgactccgtgaagtccttcgaaaattacattaaagcgttctttggggaggggaaggaaactaacagggatgagtccttctatggcgactttgtcctcgcgtacgacatcctgctgaaggtcgaccacatttacgacgcgatccgcaactacgtgacacagaagccgtactccaaagacaagttcaagctgtacttccagaacccgcaatttatggggggctgggacaaggataaagagacagactaccgcgcgacaattctccgctatggctccaaatactatctggccatcatggacaagaagtacgcgaagtgcctgcagaagatcgacaaagacgacgtcaatggcaactatgaaaagatcaactacaagctgctgccgggcccgaacaagatgctcccgaaggtgttcttcagcaagaagtggatggcctactacaatccaagcgaggatattcagaaaatctataaaaacgggaccttcaagaagggggacatgtttaacctcaacgactgccacaagctcattgatttcttcaaggatagcatttcccgctacccgaaatggtccaatgcgtacgattttaacttctccgagacagaaaagtacaaagacatcgcgggcttttacagggaggtggaggagcaagggtataaagtttcttttgaatccgcgagcaagaaggaagtcgacaagctcgtcgaggagggcaagctctacatgttccaaatttataacaaggacttttccgacaagagccatgggaccccaaacctccacaccatgtacttcaaactgctctttgacgagaacaaccacgggcaaatcaggctgagcggcggcgccgaattattcatgcgcagggcctccctcaagaaggaagagctggtcgtccatccagccaattccccgatcgcgaacaagaacccggacaatccgaaaaagaccaccaccctgtcctacgacgtctacaaggacaaacgcttcagcgaagaccagtacgaattacacatcccaattgcgattaataagtgcccaaagaatatcttcaaaattaatacagaggtcagggtgctgctcaaacacgacgacaatccgtatgtcatcggcattgccaggggcgagcgcaatctgctctatatcgtggtcgtggatgggaagggcaatattgtggagcagtactccctgaacgagattatcaacaacttcaatgggattaggattaagaccgactatcacagcctgctcgacaagaaagaaaaagagaggtttgaggcccgccaaaactggacctccattgagaatatcaaagaattaaaggccggctatatttcccaagtcgtccacaagatctgcgagctggtggagaaatatgacgccgtgattgcgctcgaagacttaaattctgggttcaagaactcccgcgtgaaggtggaaaaacaggtgtatcagaaattcgagaaaatgctgatcgacaaactcaattatatggtggataagaagtccaacccgtgtgccacagggggcgcgctgaagggctatcagatcaccaacaagttcgagagcttcaagagcatgagcacccagaacgggtttattttctacatcccggcgtggctcacctccaagattgacccgagcaccggcttcgtgaacctcctgaagacaaagtatacctccattgccgacagcaagaagtttatctcctccttcgaccgcattatgtatgtgccggaggaggacctcttcgagttcgccctcgactacaaaaacttcagccgcacagatgcggattacatcaagaagtggaagctgtactcctacgggaacaggatccgcatcttcaggaatccaaaaaaaaataacgtctttgactgggaggaagtgtgcctgacatccgcctacaaggaactgttcaataaatacggcatcaattaccagcagggcgacattcgcgccctcctctgtgagcagtccgacaaagcgttttactccagcttcatggccctcatgtccctgatgctccaaatgaggaatagcatcacagggcgcaccgacgtcgacttcctcatcagcccggtgaagaactccgacgggatcttttacgactcccgcaactatgaggcgcaagagaatgcgatcctcccgaagaacgccgatgcgaacggggcctataatatcgccaggaaagtgctctgggccatcgggcagttcaaaaaggcggaggatgagaagctcgacaaggtgaaaattgccatttccaacaaggagtggctggagtacgcgcagacctccgtgaagcacggctcctctggcagctccggctctagcggctcctctggcagctccggctccaagctggagaagtttacaaactgttacagcctctccaaaaccctcaggtttaaagcgatcccggtgggcaagacccaggagaacatcgacaacaagaggctcctggtggaagacgagaagcgcgccgaagactacaagggcgtgaagaagctgctcgataggtactacctcagctttattaacgacgtgctgcacagcatcaaactcaagaatctcaacaactacatctccctcttccgcaaaaagacc

SEQ ID NO: 641 - DNA, 4408 bp, synthetic construct
  source 1..4408: mol_type = other DNA
tctgaggttgaattttcacatgagtattggatgagacacgctcttaccttggctaagagagcaagggatgagagagaagttccagtgggagcagttcttgtgttgaacaatagagttattggagagggttggaacaggtaagtatcaaggttacaagacaggtttaaggagaccaatagaaactgggcttgtcgagacagagaagactcttgcgtttctgataggcacctattggtcttactgacatccactttgcctttctctccacagggctattggacttcatgatcctactgctcacgcagaaattatggcacttagacaaggtggacttgttatgcagaactacaggcttatcgatgctactctttatgttacattcgagccatgtgtgatgtgcgctggagcaatgattcattctaggattggaagggttgtgttcggtgttagaaactctaagaggggagctgcaggttcacttatgaacgttttgaattatcctggtatgaaccacagagtggagattactgaaggtattttggcagatgaatgtgctgcacttttgtgcgatttttacagaatgcctagacaagtgttcaacgctcaaaagaaggcacaatcttctattaacagcggcagcgagactcccgggacctcagagtccgccacacccgaaagtcgcaccgagaaggagaacaaggagctggagaacctggagatcaacctccgcaaggaaatcgccaaagcgttcaagggcaatgaagggtacaagagcctcttcaagaaagacatcatcgaaactatcctcccagagtttctcgatgacaaggacgagatcgcgctggtgaactcctttaacgggttcacaaccgcgtttaccggcttctttgataacagggaaaatatgttctccgaggaggccaagtccaccagcatcgccttcaggtgtatcaacgagaacctcacccgctacatttccaatatggacattttcgagaaggtggatgcgatcttcgataagcacgaggtgcaggagatcaaagagaagattctcaattccgattatgacgtcgaggatttcttcgaaggggagttctttaattttgtgctcacacaagagggcattgacgtgtacaacgcgattatcgggggcttcgtcacagagtccggggagaagattaaggggctgaatgagtacatcaatctgtacaatcagaagaccaagcagaaactgccgaaattcaagccgctctacaagcaagtcctgtccgatagggaaagcctctccttctacggcgagggctataccagcgacgaggaggtgctggaagtcttccgcaacacactgaataagaatagcgagattttctcctccatcaagaagctcgagaagctctttaagaactttgacgagtacagctccgccgggattttcgtgaagaacgggccggcgatcagcaccatctccaaggacatctttggcgagtggaacgtcatcagggacaagtggaacgccgagtacgacgacatccacctgaagaagaaggcggtggtgaccgagaagtatgaggacgatcgcaggaagtccttcaaaaaaatcggctccttcagcctcgaacagctccaggagtatgccgatgcggatctgtccgtcgtcgagaagctgaaggaaatcatcattcagaaggtcgacgagatctataaagtgtacgggtccagcgagaagctgttcgacgccgactttgtgctcgagaagtccctcaaaaagaatgacgccgtggtggccattatgaaagacctgctcgactccgtgaagtccttcgaaaattacattaaagcgttctttggggaggggaaggaaactaacagggatgagtccttctatggcgactttgtcctcgcgtacgacatcctgctgaaggtcgaccacatttacgacgcgatccgcaactacgtgacacagaagccgtactccaaagacaagttcaagctgtacttccagaacccgcaatttatggggggctgggacaaggataaagagacagactaccgcgcgacaattctccgctatggctccaaatactatctggccatcatggacaagaagtacgcgaagtgcctgcagaagatcgacaaagacgacgtcaatggcaactatgaaaagatcaactacaagctgctgccgggcccgaacaagatgctcccgaaggtgttcttcagcaagaagtggatggcctactacaatccaagcgaggatattcagaaaatctataaaaacgggaccttcaagaagggggacatgtttaacctcaacgactgccacaagctcattgatttcttcaaggatagcatttcccgctacccgaaatggtccaatgcgtacgattttaacttctccgagacagaaaagtacaaagacatcgcgggcttttacagggaggtggaggagcaagggtataaagtttcttttgaatccgcgagcaagaaggaagtcgacaagctcgtcgaggagggcaagctctacatgttccaaatttataacaaggacttttccgacaagagccatgggaccccaaacctccacaccatgtacttcaaactgctctttgacgagaacaaccacgggcaaatcaggctgagcggcggcgccgaattattcatgcgcagggcctccctcaagaaggaagagctggtcgtccatccagccaattccccgatcgcgaacaagaacccggacaatccgaaaaagaccaccaccctgtcctacgacgtctacaaggacaaacgcttcagcgaagaccagtacgaattacacatcccaattgcgattaataagtgcccaaagaatatcttcaaaattaatacagaggtcagggtgctgctcaaacacgacgacaatccgtatgtcatcggcattgccaggggcgagcgcaatctgctctatatcgtggtcgtggatgggaagggcaatattgtggagcagtactccctgaacgagattatcaacaacttcaatgggattaggattaagaccgactatcacagcctgctcgacaagaaagaaaaagagaggtttgaggcccgccaaaactggacctccattgagaatatcaaagaattaaaggccggctatatttcccaagtcgtccacaagatctgcgagctggtggagaaatatgacgccgtgattgcgctcgaagacttaaattctgggttcaagaactcccgcgtgaaggtggaaaaacaggtgtatcagaaattcgagaaaatgctgatcgacaaactcaattatatggtggataagaagtccaacccgtgtgccacagggggcgcgctgaagggctatcagatcaccaacaagttcgagagcttcaagagcatgagcacccagaacgggtttattttctacatcccggcgtggctcacctccaagattgacccgagcaccggcttcgtgaacctcctgaagacaaagtatacctccattgccgacagcaagaagtttatctcctccttcgaccgcattatgtatgtgccggaggaggacctcttcgagttcgccctcgactacaaaaacttcagccgcacagatgcggattacatcaagaagtggaagctgtactcctacgggaacaggatccgcatcttcaggaatccaaaaaaaaataacgtctttgactgggaggaagtgtgcctgacatccgcctacaaggaactgttcaataaatacggcatcaattaccagcagggcgacattcgcgccctcctctgtgagcagtccgacaaagcgttttactccagcttcatggccctcatgtccctgatgctccaaatgaggaatagcatcacagggcgcaccgacgtcgacttcctcatcagcccggtgaagaactccgacgggatcttttacgactcccgcaactatgaggcgcaagagaatgcgatcctcccgaagaacgccgatgcgaacggggcctataatatcgccaggaaagtgctctgggccatcgggcagttcaaaaaggcggaggatgagaagctcgacaaggtgaaaattgccatttccaacaaggagtggctggagtacgcgcagacctccgtgaagcacggctcctctggcagctccggctctagcggctcctctggcagctccggctccaagctggagaagtttacaaactgttacagcctctccaaaaccctcaggtttaaagcgatcccggtgggcaagacccaggagaacatcgacaacaagaggctcctggtggaagacgagaagcgcgccgaagactacaagggcgtgaagaagctgctcgataggtactacctcagctttattaacgacgtgctgcacagcatcaaactcaagaatctcaacaactacatctccctcttccgcaaaaagacc

SEQ ID NO: 642 - DNA, 4396 bp, synthetic construct
  source 1..4396: mol_type = other DNA
tctgaggttgaattttcacatgagtattggatgagacacgctcttaccttggctaagagagcaagggatgagagagaagttccagtgggagcagttcttgtgttgaacaatagagttattggagagggttggaacaggtaagtatcaaggttacaagacaggtttaaggagaccaatagaaactgggcttgtcgagacagagaagactcttgcgtttctgataggcacctattggtcttactgacatccactttgcctttctctccacagggctattggacttcatgatcctactgctcacgcagaaattatggcacttagacaaggtggacttgttatgcagaactacaggcttatcgatgctactctttatgttacattcgagccatgtgtgatgtgcgctggagcaatgattcattctaggattggaagggttgtgttcggtgttagaaactctaagaggggagctgcaggttcacttatgaacgttttgaattatcctggtatgaaccacagagtggagattactgaaggtattttggcagatgaatgtgctgcacttttgtgcgatttttacagaatgcctagacaagtgttcaacgctcaaaagaaggcacaatcttctattaactctggtggttcttctggtggttcttctggtggttctcgcaccgagaaggagaacaaggagctggagaacctggagatcaacctccgcaaggaaatcgccaaagcgttcaagggcaatgaagggtacaagagcctcttcaagaaagacatcatcgaaactatcctcccagagtttctcgatgacaaggacgagatcgcgctggtgaactcctttaacgggttcacaaccgcgtttaccggcttctttgataacagggaaaatatgttctccgaggaggccaagtccaccagcatcgccttcaggtgtatcaacgagaacctcacccgctacatttccaatatggacattttcgagaaggtggatgcgatcttcgataagcacgaggtgcaggagatcaaagagaagattctcaattccgattatgacgtcgaggatttcttcgaaggggagttctttaattttgtgctcacacaagagggcattgacgtgtacaacgcgattatcgggggcttcgtcacagagtccggggagaagattaaggggctgaatgagtacatcaatctgtacaatcagaagaccaagcagaaactgccgaaattcaagccgctctacaagcaagtcctgtccgatagggaaagcctctccttctacggcgagggctataccagcgacgaggaggtgctggaagtcttccgcaacacactgaataagaatagcgagattttctcctccatcaagaagctcgagaagctctttaagaactttgacgagtacagctccgccgggattttcgtgaagaacgggccggcgatcagcaccatctccaaggacatctttggcgagtggaacgtcatcagggacaagtggaacgccgagtacgacgacatccacctgaagaagaaggcggtggtgaccgagaagtatgaggacgatcgcaggaagtccttcaaaaaaatcggctccttcagcctcgaacagctccaggagtatgccgatgcggatctgtccgtcgtcgagaagctgaaggaaatcatcattcagaaggtcgacgagatctataaagtgtacgggtccagcgagaagctgttcgacgccgactttgtgctcgagaagtccctcaaaaagaatgacgccgtggtggccattatgaaagacctgctcgactccgtgaagtccttcgaaaattacattaaagcgttctttggggaggggaaggaaactaacagggatgagtccttctatggcgactttgtcctcgcgtacgacatcctgctgaaggtcgaccacatttacgacgcgatccgcaactacgtgacacagaagccgtactccaaagacaagttcaagctgtacttccagaacccgcaatttatggggggctgggacaaggataaagagacagactaccgcgcgacaattctccgctatggctccaaatactatctggccatcatggacaagaagtacgcgaagtgcctgcagaagatcgacaaagacgacgtcaatggcaactatgaaaagatcaactacaagctgctgccgggcccgaacaagatgctcccgaaggtgttcttcagcaagaagtggatggcctactacaatccaagcgaggatattcagaaaatctataaaaacgggaccttcaagaagggggacatgtttaacctcaacgactgccacaagctcattgatttcttcaaggatagcatttcccgctacccgaaatggtccaatgcgtacgattttaacttctccgagacagaaaagtacaaagacatcgcgggcttttacagggaggtggaggagcaagggtataaagtttcttttgaatccgcgagcaagaaggaagtcgacaagctcgtcgaggagggcaagctctacatgttccaaatttataacaaggacttttccgacaagagccatgggaccccaaacctccacaccatgtacttcaaactgctctttgacgagaacaaccacgggcaaatcaggctgagcggcggcgccgaattattcatgcgcagggcctccctcaagaaggaagagctggtcgtccatccagccaattccccgatcgcgaacaagaacccggacaatccgaaaaagaccaccaccctgtcctacgacgtctacaaggacaaacgcttcagcgaagaccagtacgaattacacatcccaattgcgattaataagtgcccaaagaatatcttcaaaattaatacagaggtcagggtgctgctcaaacacgacgacaatccgtatgtcatcggcattgccaggggcgagcgcaatctgctctatatcgtggtcgtggatgggaagggcaatattgtggagcagtactccctgaacgagattatcaacaacttcaatgggattaggattaagaccgactatcacagcctgctcgacaagaaagaaaaagagaggtttgaggcccgccaaaactggacctccattgagaatatcaaagaattaaaggccggctatatttcccaagtcgtccacaagatctgcgagctggtggagaaatatgacgccgtgattgcgctcgaagacttaaattctgggttcaagaactcccgcgtgaaggtggaaaaacaggtgtatcagaaattcgagaaaatgctgatcgacaaactcaattatatggtggataagaagtccaacccgtgtgccacagggggcgcgctgaagggctatcagatcaccaacaagttcgagagcttcaagagcatgagcacccagaacgggtttattttctacatcccggcgtggctcacctccaagattgacccgagcaccggcttcgtgaacctcctgaagacaaagtatacctccattgccgacagcaagaagtttatctcctccttcgaccgcattatgtatgtgccggaggaggacctcttcgagttcgccctcgactacaaaaacttcagccgcacagatgcggattacatcaagaagtggaagctgtactcctacgggaacaggatccgcatcttcaggaatccaaaaaaaaataacgtctttgactgggaggaagtgtgcctgacatccgcctacaaggaactgttcaataaatacggcatcaattaccagcagggcgacattcgcgccctcctctgtgagcagtccgacaaagcgttttactccagcttcatggccctcatgtccctgatgctccaaatgaggaatagcatcacagggcgcaccgacgtcgacttcctcatcagcccggtgaagaactccgacgggatcttttacgactcccgcaactatgaggcgcaagagaatgcgatcctcccgaagaacgccgatgcgaacggggcctataatatcgccaggaaagtgctctgggccatcgggcagttcaaaaaggcggaggatgagaagctcgacaaggtgaaaattgccatttccaacaaggagtggctggagtacgcgcagacctccgtgaagcacggctcctctggcagctccggctctagcggctcctctggcagctccggctccaagctggagaagtttacaaactgttacagcctctccaaaaccctcaggtttaaagcgatcccggtgggcaagacccaggagaacatcgacaacaagaggctcctggtggaagacgagaagcgcgccgaagactacaagggcgtgaagaagctgctcgataggtactacctcagctttattaacgacgtgctgcacagcatcaaactcaagaatctcaacaactacatctccctcttccgcaaaaagacc

SEQ ID NO: 643 - DNA, 4384 bp, synthetic construct
  source 1..4384: mol_type = other DNA
tctgaggttgaattttcacatgagtattggatgagacacgctcttaccttggctaagagagcaagggatgagagagaagttccagtgggagcagttcttgtgttgaacaatagagttattggagagggttggaacaggtaagtatcaaggttacaagacaggtttaaggagaccaatagaaactgggcttgtcgagacagagaagactcttgcgtttctgataggcacctattggtcttactgacatccactttgcctttctctccacagggctattggacttcatgatcctactgctcacgcagaaattatggcacttagacaaggtggacttgttatgcagaactacaggcttatcgatgctactctttatgttacattcgagccatgtgtgatgtgcgctggagcaatgattcattctaggattggaagggttgtgttcggtgttagaaactctaagaggggagctgcaggttcacttatgaacgttttgaattatcctggtatgaaccacagagtggagattactgaaggtattttggcagatgaatgtgctgcacttttgtgcgatttttacagaatgcctagacaagtgttcaacgctcaaaagaaggcacaatcttctattaactctggtggttcttctggtggttctcgcaccgagaaggagaacaaggagctggagaacctggagatcaacctccgcaaggaaatcgccaaagcgttcaagggcaatgaagggtacaagagcctcttcaagaaagacatcatcgaaactatcctcccagagtttctcgatgacaaggacgagatcgcgctggtgaactcctttaacgggttcacaaccgcgtttaccggcttctttgataacagggaaaatatgttctccgaggaggccaagtccaccagcatcgccttcaggtgtatcaacgagaacctcacccgctacatttccaatatggacattttcgagaaggtggatgcgatcttcgataagcacgaggtgcaggagatcaaagagaagattctcaattccgattatgacgtcgaggatttcttcgaaggggagttctttaattttgtgctcacacaagagggcattgacgtgtacaacgcgattatcgggggcttcgtcacagagtccggggagaagattaaggggctgaatgagtacatcaatctgtacaatcagaagaccaagcagaaactgccgaaattcaagccgctctacaagcaagtcctgtccgatagggaaagcctctccttctacggcgagggctataccagcgacgaggaggtgctggaagtcttccgcaacacactgaataagaatagcgagattttctcctccatcaagaagctcgagaagctctttaagaactttgacgagtacagctccgccgggattttcgtgaagaacgggccggcgatcagcaccatctccaaggacatctttggcgagtggaacgtcatcagggacaagtggaacgccgagtacgacgacatccacctgaagaagaaggcggtggtgaccgagaagtatgaggacgatcgcaggaagtccttcaaaaaaatcggctccttcagcctcgaacagctccaggagtatgccgatgcggatctgtccgtcgtcgagaagctgaaggaaatcatcattcagaaggtcgacgagatctataaagtgtacgggtccagcgagaagctgttcgacgccgactttgtgctcgagaagtccctcaaaaagaatgacgccgtggtggccattatgaaagacctgctcgactccgtgaagtccttcgaaaattacattaaagcgttctttggggaggggaaggaaactaacagggatgagtccttctatggcgactttgtcctcgcgtacgacatcctgctgaaggtcgaccacatttacgacgcgatccgcaactacgtgacacagaagccgtactccaaagacaagttcaagctgtacttccagaacccgcaatttatggggggctgggacaaggataaagagacagactaccgcgcgacaattctccgctatggctccaaatactatctggccatcatggacaagaagtacgcgaagtgcctgcagaagatcgacaaagacgacgtcaatggcaactatgaaaagatcaactacaagctgctgccgggcccgaacaagatgctcccgaaggtgttcttcagcaagaagtggatggcctactacaatccaagcgaggatattcagaaaatctataaaaacgggaccttcaagaagggggacatgtttaacctcaacgactgccacaagctcattgatttcttcaaggatagcatttcccgctacccgaaatggtccaatgcgtacgattttaacttctccgagacagaaaagtacaaagacatcgcgggcttttacagggaggtggaggagcaagggtataaagtttcttttgaatccgcgagcaagaaggaagtcgacaagctcgtcgaggagggcaagctctacatgttccaaatttataacaaggacttttccgacaagagccatgggaccccaaacctccacaccatgtacttcaaactgctctttgacgagaacaaccacgggcaaatcaggctgagcggcggcgccgaattattcatgcgcagggcctccctcaagaaggaagagctggtcgtccatccagccaattccccgatcgcgaacaagaacccggacaatccgaaaaagaccaccaccctgtcctacgacgtctacaaggacaaacgcttcagcgaagaccagtacgaattacacatcccaattgcgattaataagtgcccaaagaatatcttcaaaattaatacagaggtcagggtgctgctcaaacacgacgacaatccgtatgtcatcggcattgccaggggcgagcgcaatctgctctatatcgtggtcgtggatgggaagggcaatattgtggagcagtactccctgaacgagattatcaacaacttcaatgggattaggattaagaccgactatcacagcctgctcgacaagaaagaaaaagagaggtttgaggcccgccaaaactggacctccattgagaatatcaaagaattaaaggccggctatatttcccaagtcgtccacaagatctgcgagctggtggagaaatatgacgccgtgattgcgctcgaagacttaaattctgggttcaagaactcccgcgtgaaggtggaaaaacaggtgtatcagaaattcgagaaaatgctgatcgacaaactcaattatatggtggataagaagtccaacccgtgtgccacagggggcgcgctgaagggctatcagatcaccaacaagttcgagagcttcaagagcatgagcacccagaacgggtttattttctacatcccggcgtggctcacctccaagattgacccgagcaccggcttcgtgaacctcctgaagacaaagtatacctccattgccgacagcaagaagtttatctcctccttcgaccgcattatgtatgtgccggaggaggacctcttcgagttcgccctcgactacaaaaacttcagccgcacagatgcggattacatcaagaagtggaagctgtactcctacgggaacaggatccgcatcttcaggaatccaaaaaaaaataacgtctttgactgggaggaagtgtgcctgacatccgcctacaaggaactgttcaataaatacggcatcaattaccagcagggcgacattcgcgccctcctctgtgagcagtccgacaaagcgttttactccagcttcatggccctcatgtccctgatgctccaaatgaggaatagcatcacagggcgcaccgacgtcgacttcctcatcagcccggtgaagaactccgacgggatcttttacgactcccgcaactatgaggcgcaagagaatgcgatcctcccgaagaacgccgatgcgaacggggcctataatatcgccaggaaagtgctctgggccatcgggcagttcaaaaaggcggaggatgagaagctcgacaaggtgaaaattgccatttccaacaaggagtggctggagtacgcgcagacctccgtgaagcacggctcctctggcagctccggctctagcggctcctctggcagctccggctccaagctggagaagtttacaaactgttacagcctctccaaaaccctcaggtttaaagcgatcccggtgggcaagacccaggagaacatcgacaacaagaggctcctggtggaagacgagaagcgcgccgaagactacaagggcgtgaagaagctgctcgataggtactacctcagctttattaacgacgtgctgcacagcatcaaactcaagaatctcaacaactacatctccctcttccgcaaaaagacc

SEQ ID NO: 644 - DNA, 4378 bp, synthetic construct
  source 1..4378: mol_type = other DNA
tctgaggttgaattttcacatgagtattggatgagacacgctcttaccttggctaagagagcaagggatgagagagaagttccagtgggagcagttcttgtgttgaacaatagagttattggagagggttggaacaggtaagtatcaaggttacaagacaggtttaaggagaccaatagaaactgggcttgtcgagacagagaagactcttgcgtttctgataggcacctattggtcttactgacatccactttgcctttctctccacagggctattggacttcatgatcctactgctcacgcagaaattatggcacttagacaaggtggacttgttatgcagaactacaggcttatcgatgctactctttatgttacattcgagccatgtgtgatgtgcgctggagcaatgattcattctaggattggaagggttgtgttcggtgttagaaactctaagaggggagctgcaggttcacttatgaacgttttgaattatcctggtatgaaccacagagtggagattactgaaggtattttggcagatgaatgtgctgcacttttgtgcgatttttacagaatgcctagacaagtgttcaacgctcaaaagaaggcacaatcttctattaactctggttcttctggttctcgcaccgagaaggagaacaaggagctggagaacctggagatcaacctccgcaaggaaatcgccaaagcgttcaagggcaatgaagggtacaagagcctcttcaagaaagacatcatcgaaactatcctcccagagtttctcgatgacaaggacgagatcgcgctggtgaactcctttaacgggttcacaaccgcgtttaccggcttctttgataacagggaaaatatgttctccgaggaggccaagtccaccagcatcgccttcaggtgtatcaacgagaacctcacccgctacatttccaatatggacattttcgagaaggtggatgcgatcttcgataagcacgaggtgcaggagatcaaagagaagattctcaattccgattatgacgtcgaggatttcttcgaaggggagttctttaattttgtgctcacacaagagggcattgacgtgtacaacgcgattatcgggggcttcgtcacagagtccggggagaagattaaggggctgaatgagtacatcaatctgtacaatcagaagaccaagcagaaactgccgaaattcaagccgctctacaagcaagtcctgtccgatagggaaagcctctccttctacggcgagggctataccagcgacgaggaggtgctggaagtcttccgcaacacactgaataagaatagcgagattttctcctccatcaagaagctcgagaagctctttaagaactttgacgagtacagctccgccgggattttcgtgaagaacgggccggcgatcagcaccatctccaaggacatctttggcgagtggaacgtcatcagggacaagtggaacgccgagtacgacgacatccacctgaagaagaaggcggtggtgaccgagaagtatgaggacgatcgcaggaagtccttcaaaaaaatcggctccttcagcctcgaacagctccaggagtatgccgatgcggatctgtccgtcgtcgagaagctgaaggaaatcatcattcagaaggtcgacgagatctataaagtgtacgggtccagcgagaagctgttcgacgccgactttgtgctcgagaagtccctcaaaaagaatgacgccgtggtggccattatgaaagacctgctcgactccgtgaagtccttcgaaaattacattaaagcgttctttggggaggggaaggaaactaacagggatgagtccttctatggcgactttgtcctcgcgtacgacatcctgctgaaggtcgaccacatttacgacgcgatccgcaactacgtgacacagaagccgtactccaaagacaagttcaagctgtacttccagaacccgcaatttatggggggctgggacaaggataaagagacagactaccgcgcgacaattctccgctatggctccaaatactatctggccatcatggacaagaagtacgcgaagtgcctgcagaagatcgacaaagacgacgtcaatggcaactatgaaaagatcaactacaagctgctgccgggcccgaacaagatgctcccgaaggtgttcttcagcaagaagtggatggcctactacaatccaagcgaggatattcagaaaatctataaaaacgggaccttcaagaagggggacatgtttaacctcaacgactgccacaagctcattgatttcttcaaggatagcatttcccgctacccgaaatggtccaatgcgtacgattttaacttctccgagacagaaaagtacaaagacatcgcgggcttttacagggaggtggaggagcaagggtataaagtttcttttgaatccgcgagcaagaaggaagtcgacaagctcgtcgaggagggcaagctctacatgttccaaatttataacaaggacttttccgacaagagccatgggaccccaaacctccacaccatgtacttcaaactgctctttgacgagaacaaccacgggcaaatcaggctgagcggcggcgccgaattattcatgcgcagggcctccctcaagaaggaagagctggtcgtccatccagccaattccccgatcgcgaacaagaacccggacaatccgaaaaagaccaccaccctgtcctacgacgtctacaaggacaaacgcttcagcgaagaccagtacgaattacacatcccaattgcgattaataagtgcccaaagaatatcttcaaaattaatacagaggtcagggtgctgctcaaacacgacgacaatccgtatgtcatcggcattgccaggggcgagcgcaatctgctctatatcgtggtcgtggatgggaagggcaatattgtggagcagtactccctgaacgagattatcaacaacttcaatgggattaggattaagaccgactatcacagcctgctcgacaagaaagaaaaagagaggtttgaggcccgccaaaactggacctccattgagaatatcaaagaattaaaggccggctatatttcccaagtcgtccacaagatctgcgagctggtggagaaatatgacgccgtgattgcgctcgaagacttaaattctgggttcaagaactcccgcgtgaaggtggaaaaacaggtgtatcagaaattcgagaaaatgctgatcgacaaactcaattatatggtggataagaagtccaacccgtgtgccacagggggcgcgctgaagggctatcagatcaccaacaagttcgagagcttcaagagcatgagcacccagaacgggtttattttctacatcccggcgtggctcacctccaagattgacccgagcaccggcttcgtgaacctcctgaagacaaagtatacctccattgccgacagcaagaagtttatctcctccttcgaccgcattatgtatgtgccggaggaggacctcttcgagttcgccctcgactacaaaaacttcagccgcacagatgcggattacatcaagaagtggaagctgtactcctacgggaacaggatccgcatcttcaggaatccaaaaaaaaataacgtctttgactgggaggaagtgtgcctgacatccgcctacaaggaactgttcaataaatacggcatcaattaccagcagggcgacattcgcgccctcctctgtgagcagtccgacaaagcgttttactccagcttcatggccctcatgtccctgatgctccaaatgaggaatagcatcacagggcgcaccgacgtcgacttcctcatcagcccggtgaagaactccgacgggatcttttacgactcccgcaactatgaggcgcaagagaatgcgatcctcccgaagaacgccgatgcgaacggggcctataatatcgccaggaaagtgctctgggccatcgggcagttcaaaaaggcggaggatgagaagctcgacaaggtgaaaattgccatttccaacaaggagtggctggagtacgcgcagacctccgtgaagcacggctcctctggcagctccggctctagcggctcctctggcagctccggctccaagctggagaagtttacaaactgttacagcctctccaaaaccctcaggtttaaagcgatcccggtgggcaagacccaggagaacatcgacaacaagaggctcctggtggaagacgagaagcgcgccgaagactacaagggcgtgaagaagctgctcgataggtactacctcagctttattaacgacgtgctgcacagcatcaaactcaagaatctcaacaactacatctccctcttccgcaaaaagacc

SEQ ID NO: 645 - DNA, 4432 bp, synthetic construct
  source 1..4432: mol_type = other DNA
cgcaccgagaaggagaacaaggagctggagaacctggagatcaacctccgcaaggaaatcgccaaagcgttcaagggcaatgaagggtacaagagcctcttcaagaaagacatcatcgaaactatcctcccagagtttctcgatgacaaggacgagatcgcgctggtgaactcctttaacgggttcacaaccgcgtttaccggcttctttgataacagggaaaatatgttctccgaggaggccaagtccaccagcatcgccttcaggtgtatcaacgagaacctcacccgctacatttccaatatggacattttcgagaaggtggatgcgatcttcgataagcacgaggtgcaggagatcaaagagaagattctcaattccgattatgacgtcgaggatttcttcgaaggggagttctttaattttgtgctcacacaagagggcattgacgtgtacaacgcgattatcgggggcttcgtcacagagtccggggagaagattaaggggctgaatgagtacatcaatctgtacaatcagaagaccaagcagaaactgccgaaattcaagccgctctacaagcaagtcctgtccgatagggaaagcctctccttctacggcgagggctataccagcgacgaggaggtgctggaagtcttccgcaacacactgaataagaatagcgagattttctcctccatcaagaagctcgagaagctctttaagaactttgacgagtacagctccgccgggattttcgtgaagaacgggccggcgatcagcaccatctccaaggacatctttggcgagtggaacgtcatcagggacaagtggaacgccgagtacgacgacatccacctgaagaagaaggcggtggtgaccgagaagtatgaggacgatcgcaggaagtccttcaaaaaaatcggctccttcagcctcgaacagctccaggagtatgccgatgcggatctgtccgtcgtcgagaagctgaaggaaatcatcattcagaaggtcgacgagatctataaagtgtacgggtccagcgagaagctgttcgacgccgactttgtgctcgagaagtccctcaaaaagaatgacgccgtggtggccattatgaaagacctgctcgactccgtgaagtccttcgaaaattacattaaagcgttctttggggaggggaaggaaactaacagggatgagtccttctatggcgactttgtcctcgcgtacgacatcctgctgaaggtcgaccacatttacgacgcgatccgcaactacgtgacacagaagccgtactccaaagacaagttcaagctgtacttccagaacccgcaatttatggggggctgggacaaggataaagagacagactaccgcgcgacaattctccgctatggctccaaatactatctggccatcatggacaagaagtacgcgaagtgcctgcagaagatcgacaaagacgacgtcaatggcaactatgaaaagatcaactacaagctgctgccgggcccgaacaagatgctcccgaaggtgttcttcagcaagaagtggatggcctactacaatccaagcgaggatattcagaaaatctataaaaacgggaccttcaagaagggggacatgtttaacctcaacgactgccacaagctcattgatttcttcaaggatagcatttcccgctacccgaaatggtccaatgcgtacgattttaacttctccgagacagaaaagtacaaagacatcgcgggcttttacagggaggtggaggagcaagggtataaagtttcttttgaatccgcgagcaagaaggaagtcgacaagctcgtcgaggagggcaagctctacatgttccaaatttataacaaggacttttccgacaagagccatgggaccccaaacctccacaccatgtacttcaaactgctctttgacgagaacaaccacgggcaaatcaggctgagcggcggcgccgaattattcatgcgcagggcctccctcaagaaggaagagctggtcgtccatccagccaattccccgatcgcgaacaagaacccggacaatccgaaaaagaccaccaccctgtcctacgacgtctacaaggacaaacgcttcagcgaagaccagtacgaattacacatcccaattgcgattaataagtgcccaaagaatatcttcaaaattaatacagaggtcagggtgctgctcaaacacgacgacaatccgtatgtcatcggcattgccaggggcgagcgcaatctgctctatatcgtggtcgtggatgggaagggcaatattgtggagcagtactccctgaacgagattatcaacaacttcaatgggattaggattaagaccgactatcacagcctgctcgacaagaaagaaaaagagaggtttgaggcccgccaaaactggacctccattgagaatatcaaagaattaaaggccggctatatttcccaagtcgtccacaagatctgcgagctggtggagaaatatgacgccgtgattgcgctcgaagacttaaattctgggttcaagaactcccgcgtgaaggtggaaaaacaggtgtatcagaaattcgagaaaatgctgatcgacaaactcaattatatggtggataagaagtccaacccgtgtgccacagggggcgcgctgaagggctatcagatcaccaacaagttcgagagcttcaagagcatgagcacccagaacgggtttattttctacatcccggcgtggctcacctccaagattgacccgagcaccggcttcgtgaacctcctgaagacaaagtatacctccattgccgacagcaagaagtttatctcctccttcgaccgcattatgtatgtgccggaggaggacctcttcgagttcgccctcgactacaaaaacttcagccgcacagatgcggattacatcaagaagtggaagctgtactcctacgggaacaggatccgcatcttcaggaatccaaaaaaaaataacgtctttgactgggaggaagtgtgcctgacatccgcctacaaggaactgttcaataaatacggcatcaattaccagcagggcgacattcgcgccctcctctgtgagcagtccgacaaagcgttttactccagcttcatggccctcatgtccctgatgctccaaatgaggaatagcatcacagggcgcaccgacgtcgacttcctcatcagcccggtgaagaactccgacgggatcttttacgactcccgcaactatgaggcgcaagagaatgcgatcctcccgaagaacgccgatgcgaacggggcctataatatcgccaggaaagtgctctgggccatcgggcagttcaaaaaggcggaggatgagaagctcgacaaggtgaaaattgccatttccaacaaggagtggctggagtacgcgcagacctccgtgaagcacggctcctctggcagctccggctctagcggctcctctggcagctccggctccaagctggagaagtttacaaactgttacagcctctccaaaaccctcaggtttaaagcgatcccggtgggcaagacccaggagaacatcgacaacaagaggctcctggtggaagacgagaagcgcgccgaagactacaagggcgtgaagaagctgctcgataggtactacctcagctttattaacgacgtgctgcacagcatcaaactcaagaatctcaacaactacatctccctcttccgcaaaaagacctctggtggttctagcggcagcgagactcccgggacctcagagtccgccacacccgaaagttctggtggttcttctgaggttgaattttcacatgagtattggatgagacacgctcttaccttggctaagagagcaagggatgagagagaagttccagtgggagcagttcttgtgttgaacaatagagttattggagagggttggaacaggtaagtatcaaggttacaagacaggtttaaggagaccaatagaaactgggcttgtcgagacagagaagactcttgcgtttctgataggcacctattggtcttactgacatccactttgcctttctctccacagggctattggacttcatgatcctactgctcacgcagaaattatggcacttagacaaggtggacttgttatgcagaactacaggcttatcgatgctactctttatgttacattcgagccatgtgtgatgtgcgctggagcaatgattcattctaggattggaagggttgtgttcggtgttagaaactctaagaggggagctgcaggttcacttatgaacgttttgaattatcctggtatgaaccacagagtggagattactgaaggtattttggcagatgaatgtgctgcacttttgtgcgatttttacagaatgcctagacaagtgttcaacgctcaaaagaaggcacaatcttctattaac

SEQ ID NO: 646 - DNA, 4408 bp, synthetic construct
  source 1..4408: mol_type = other DNA
cgcaccgagaaggagaacaaggagctggagaacctggagatcaacctccgcaaggaaatcgccaaagcgttcaagggcaatgaagggtacaagagcctcttcaagaaagacatcatcgaaactatcctcccagagtttctcgatgacaaggacgagatcgcgctggtgaactcctttaacgggttcacaaccgcgtttaccggcttctttgataacagggaaaatatgttctccgaggaggccaagtccaccagcatcgccttcaggtgtatcaacgagaacctcacccgctacatttccaatatggacattttcgagaaggtggatgcgatcttcgataagcacgaggtgcaggagatcaaagagaagattctcaattccgattatgacgtcgaggatttcttcgaaggggagttctttaattttgtgctcacacaagagggcattgacgtgtacaacgcgattatcgggggcttcgtcacagagtccggggagaagattaaggggctgaatgagtacatcaatctgtacaatcagaagaccaagcagaaactgccgaaattcaagccgctctacaagcaagtcctgtccgatagggaaagcctctccttctacggcgagggctataccagcgacgaggaggtgctggaagtcttccgcaacacactgaataagaatagcgagattttctcctccatcaagaagctcgagaagctctttaagaactttgacgagtacagctccgccgggattttcgtgaagaacgggccggcgatcagcaccatctccaaggacatctttggcgagtggaacgtcatcagggacaagtggaacgccgagtacgacgacatccacctgaagaagaaggcggtggtgaccgagaagtatgaggacgatcgcaggaagtccttcaaaaaaatcggctccttcagcctcgaacagctccaggagtatgccgatgcggatctgtccgtcgtcgagaagctgaaggaaatcatcattcagaaggtcgacgagatctataaagtgtacgggtccagcgagaagctgttcgacgccgactttgtgctcgagaagtccctcaaaaagaatgacgccgtggtggccattatgaaagacctgctcgactccgtgaagtccttcgaaaattacattaaagcgttctttggggaggggaaggaaactaacagggatgagtccttctatggcgactttgtcctcgcgtacgacatcctgctgaaggtcgaccacatttacgacgcgatccgcaactacgtgacacagaagccgtactccaaagacaagttcaagctgtacttccagaacccgcaatttatggggggctgggacaaggataaagagacagactaccgcgcgacaattctccgctatggctccaaatactatctggccatcatggacaagaagtacgcgaagtgcctgcagaagatcgacaaagacgacgtcaatggcaactatgaaaagatcaactacaagctgctgccgggcccgaacaagatgctcccgaaggtgttcttcagcaagaagtggatggcctactacaatccaagcgaggatattcagaaaatctataaaaacgggaccttcaagaagggggacatgtttaacctcaacgactgccacaagctcattgatttcttcaaggatagcatttcccgctacccgaaatggtccaatgcgtacgattttaacttctccgagacagaaaagtacaaagacatcgcgggcttttacagggaggtggaggagcaagggtataaagtttcttttgaatccgcgagcaagaaggaagtcgacaagctcgtcgaggagggcaagctctacatgttccaaatttataacaaggacttttccgacaagagccatgggaccccaaacctccacaccatgtacttcaaactgctctttgacgagaacaaccacgggcaaatcaggctgagcggcggcgccgaattattcatgcgcagggcctccctcaagaaggaagagctggtcgtccatccagccaattccccgatcgcgaacaagaacccggacaatccgaaaaagaccaccaccctgtcctacgacgtctacaaggacaaacgcttcagcgaagaccagtacgaattacacatcccaattgcgattaataagtgcccaaagaatatcttcaaaattaatacagaggtcagggtgctgctcaaacacgacgacaatccgtatgtcatcggcattgccaggggcgagcgcaatctgctctatatcgtggtcgtggatgggaagggcaatattgtggagcagtactccctgaacgagattatcaacaacttcaatgggattaggattaagaccgactatcacagcctgctcgacaagaaagaaaaagagaggtttgaggcccgccaaaactggacctccattgagaatatcaaagaattaaaggccggctatatttcccaagtcgtccacaagatctgcgagctggtggagaaatatgacgccgtgattgcgctcgaagacttaaattctgggttcaagaactcccgcgtgaaggtggaaaaacaggtgtatcagaaattcgagaaaatgctgatcgacaaactcaattatatggtggataagaagtccaacccgtgtgccacagggggcgcgctgaagggctatcagatcaccaacaagttcgagagcttcaagagcatgagcacccagaacgggtttattttctacatcccggcgtggctcacctccaagattgacccgagcaccggcttcgtgaacctcctgaagacaaagtatacctccattgccgacagcaagaagtttatctcctccttcgaccgcattatgtatgtgccggaggaggacctcttcgagttcgccctcgactacaaaaacttcagccgcacagatgcggattacatcaagaagtggaagctgtactcctacgggaacaggatccgcatcttcaggaatccaaaaaaaaataacgtctttgactgggaggaagtgtgcctgacatccgcctacaaggaactgttcaataaatacggcatcaattaccagcagggcgacattcgcgccctcctctgtgagcagtccgacaaagcgttttactccagcttcatggccctcatgtccctgatgctccaaatgaggaatagcatcacagggcgcaccgacgtcgacttcctcatcagcccggtgaagaactccgacgggatcttttacgactcccgcaactatgaggcgcaagagaatgcgatcctcccgaagaacgccgatgcgaacggggcctataatatcgccaggaaagtgctctgggccatcgggcagttcaaaaaggcggaggatgagaagctcgacaaggtgaaaattgccatttccaacaaggagtggctggagtacgcgcagacctccgtgaagcacggctcctctggcagctccggctctagcggctcctctggcagctccggctccaagctggagaagtttacaaactgttacagcctctccaaaaccctcaggtttaaagcgatcccggtgggcaagacccaggagaacatcgacaacaagaggctcctggtggaagacgagaagcgcgccgaagactacaagggcgtgaagaagctgctcgataggtactacctcagctttattaacgacgtgctgcacagcatcaaactcaagaatctcaacaactacatctccctcttccgcaaaaagaccagcggcagcgagactcccgggacctcagagtccgccacacccgaaagttctgaggttgaattttcacatgagtattggatgagacacgctcttaccttggctaagagagcaagggatgagagagaagttccagtgggagcagttcttgtgttgaacaatagagttattggagagggttggaacaggtaagtatcaaggttacaagacaggtttaaggagaccaatagaaactgggcttgtcgagacagagaagactcttgcgtttctgataggcacctattggtcttactgacatccactttgcctttctctccacagggctattggacttcatgatcctactgctcacgcagaaattatggcacttagacaaggtggacttgttatgcagaactacaggcttatcgatgctactctttatgttacattcgagccatgtgtgatgtgcgctggagcaatgattcattctaggattggaagggttgtgttcggtgttagaaactctaagaggggagctgcaggttcacttatgaacgttttgaattatcctggtatgaaccacagagtggagattactgaaggtattttggcagatgaatgtgctgcacttttgtgcgatttttacagaatgcctagacaagtgttcaacgctcaaaagaaggcacaatcttctattaac

SEQ ID NO: 647 - DNA, 4396 bp, synthetic construct
  source 1..4396: mol_type = other DNA
cgcaccgagaaggagaacaaggagctggagaacctggagatcaacctccgcaaggaaatcgccaaagcgttcaagggcaatgaagggtacaagagcctcttcaagaaagacatcatcgaaactatcctcccagagtttctcgatgacaaggacgagatcgcgctggtgaactcctttaacgggttcacaaccgcgtttaccggcttctttgataacagggaaaatatgttctccgaggaggccaagtccaccagcatcgccttcaggtgtatcaacgagaacctcacccgctacatttccaatatggacattttcgagaaggtggatgcgatcttcgataagcacgaggtgcaggagatcaaagagaagattctcaattccgattatgacgtcgaggatttcttcgaaggggagttctttaattttgtgctcacacaagagggcattgacgtgtacaacgcgattatcgggggcttcgtcacagagtccggggagaagattaaggggctgaatgagtacatcaatctgtacaatcagaagaccaagcagaaactgccgaaattcaagccgctctacaagcaagtcctgtccgatagggaaagcctctccttctacggcgagggctataccagcgacgaggaggtgctggaagtcttccgcaacacactgaataagaatagcgagattttctcctccatcaagaagctcgagaagctctttaagaactttgacgagtacagctccgccgggattttcgtgaagaacgggccggcgatcagcaccatctccaaggacatctttggcgagtggaacgtcatcagggacaagtggaacgccgagtacgacgacatccacctgaagaagaaggcggtggtgaccgagaagtatgaggacgatcgcaggaagtccttcaaaaaaatcggctccttcagcctcgaacagctccaggagtatgccgatgcggatctgtccgtcgtcgagaagctgaaggaaatcatcattcagaaggtcgacgagatctataaagtgtacgggtccagcgagaagctgttcgacgccgactttgtgctcgagaagtccctcaaaaagaatgacgccgtggtggccattatgaaagacctgctcgactccgtgaagtccttcgaaaattacattaaagcgttctttggggaggggaaggaaactaacagggatgagtccttctatggcgactttgtcctcgcgtacgacatcctgctgaaggtcgaccacatttacgacgcgatccgcaactacgtgacacagaagccgtactccaaagacaagttcaagctgtacttccagaacccgcaatttatggggggctgggacaaggataaagagacagactaccgcgcgacaattctccgctatggctccaaatactatctggccatcatggacaagaagtacgcgaagtgcctgcagaagatcgacaaagacgacgtcaatggcaactatgaaaagatcaactacaagctgctgccgggcccgaacaagatgctcccgaaggtgttcttcagcaagaagtggatggcctactacaatccaagcgaggatattcagaaaatctataaaaacgggaccttcaagaagggggacatgtttaacctcaacgactgccacaagctcattgatttcttcaaggatagcatttcccgctacccgaaatggtccaatgcgtacgattttaacttctccgagacagaaaagtacaaagacatcgcgggcttttacagggaggtggaggagcaagggtataaagtttcttttgaatccgcgagcaagaaggaagtcgacaagctcgtcgaggagggcaagctctacatgttccaaatttataacaaggacttttccgacaagagccatgggaccccaaacctccacaccatgtacttcaaactgctctttgacgagaacaaccacgggcaaatcaggctgagcggcggcgccgaattattcatgcgcagggcctccctcaagaaggaagagctggtcgtccatccagccaattccccgatcgcgaacaagaacccggacaatccgaaaaagaccaccaccctgtcctacgacgtctacaaggacaaacgcttcagcgaagaccagtacgaattacacatcccaattgcgattaataagtgcccaaagaatatcttcaaaattaatacagaggtcagggtgctgctcaaacacgacgacaatccgtatgtcatcggcattgccaggggcgagcgcaatctgctctatatcgtggtcgtggatgggaagggcaatattgtggagcagtactccctgaacgagattatcaacaacttcaatgggattaggattaagaccgactatcacagcctgctcgacaagaaagaaaaagagaggtttgaggcccgccaaaactggacctccattgagaatatcaaagaattaaaggccggctatatttcccaagtcgtccacaagatctgcgagctggtggagaaatatgacgccgtgattgcgctcgaagacttaaattctgggttcaagaactcccgcgtgaaggtggaaaaacaggtgtatcagaaattcgagaaaatgctgatcgacaaactcaattatatggtggataagaagtccaacccgtgtgccacagggggcgcgctgaagggctatcagatcaccaacaagttcgagagcttcaagagcatgagcacccagaacgggtttattttctacatcccggcgtggctcacctccaagattgacccgagcaccggcttcgtgaacctcctgaagacaaagtatacctccattgccgacagcaagaagtttatctcctccttcgaccgcattatgtatgtgccggaggaggacctcttcgagttcgccctcgactacaaaaacttcagccgcacagatgcggattacatcaagaagtggaagctgtactcctacgggaacaggatccgcatcttcaggaatccaaaaaaaaataacgtctttgactgggaggaagtgtgcctgacatccgcctacaaggaactgttcaataaatacggcatcaattaccagcagggcgacattcgcgccctcctctgtgagcagtccgacaaagcgttttactccagcttcatggccctcatgtccctgatgctccaaatgaggaatagcatcacagggcgcaccgacgtcgacttcctcatcagcccggtgaagaactccgacgggatcttttacgactcccgcaactatgaggcgcaagagaatgcgatcctcccgaagaacgccgatgcgaacggggcctataatatcgccaggaaagtgctctgggccatcgggcagttcaaaaaggcggaggatgagaagctcgacaaggtgaaaattgccatttccaacaaggagtggctggagtacgcgcagacctccgtgaagcacggctcctctggcagctccggctctagcggctcctctggcagctccggctccaagctggagaagtttacaaactgttacagcctctccaaaaccctcaggtttaaagcgatcccggtgggcaagacccaggagaacatcgacaacaagaggctcctggtggaagacgagaagcgcgccgaagactacaagggcgtgaagaagctgctcgataggtactacctcagctttattaacgacgtgctgcacagcatcaaactcaagaatctcaacaactacatctccctcttccgcaaaaagacctctggtggttcttctggtggttcttctggtggttcttctgaggttgaattttcacatgagtattggatgagacacgctcttaccttggctaagagagcaagggatgagagagaagttccagtgggagcagttcttgtgttgaacaatagagttattggagagggttggaacaggtaagtatcaaggttacaagacaggtttaaggagaccaatagaaactgggcttgtcgagacagagaagactcttgcgtttctgataggcacctattggtcttactgacatccactttgcctttctctccacagggctattggacttcatgatcctactgctcacgcagaaattatggcacttagacaaggtggacttgttatgcagaactacaggcttatcgatgctactctttatgttacattcgagccatgtgtgatgtgcgctggagcaatgattcattctaggattggaagggttgtgttcggtgttagaaactctaagaggggagctgcaggttcacttatgaacgttttgaattatcctggtatgaaccacagagtggagattactgaaggtattttggcagatgaatgtgctgcacttttgtgcgatttttacagaatgcctagacaagtgttcaacgctcaaaagaaggcacaatcttctattaac

SEQ ID NO: 648 - DNA, 4384 bp, synthetic construct
  source 1..4384: mol_type = other DNA
cgcaccgagaaggagaacaaggagctggagaacctggagatcaacctccgcaaggaaatcgccaaagcgttcaagggcaatgaagggtacaagagcctcttcaagaaagacatcatcgaaactatcctcccagagtttctcgatgacaaggacgagatcgcgctggtgaactcctttaacgggttcacaaccgcgtttaccggcttctttgataacagggaaaatatgttctccgaggaggccaagtccaccagcatcgccttcaggtgtatcaacgagaacctcacccgctacatttccaatatggacattttcgagaaggtggatgcgatcttcgataagcacgaggtgcaggagatcaaagagaagattctcaattccgattatgacgtcgaggatttcttcgaaggggagttctttaattttgtgctcacacaagagggcattgacgtgtacaacgcgattatcgggggcttcgtcacagagtccggggagaagattaaggggctgaatgagtacatcaatctgtacaatcagaagaccaagcagaaactgccgaaattcaagccgctctacaagcaagtcctgtccgatagggaaagcctctccttctacggcgagggctataccagcgacgaggaggtgctggaagtcttccgcaacacactgaataagaatagcgagattttctcctccatcaagaagctcgagaagctctttaagaactttgacgagtacagctccgccgggattttcgtgaagaacgggccggcgatcagcaccatctccaaggacatctttggcgagtggaacgtcatcagggacaagtggaacgccgagtacgacgacatccacctgaagaagaaggcggtggtgaccgagaagtatgaggacgatcgcaggaagtccttcaaaaaaatcggctccttcagcctcgaacagctccaggagtatgccgatgcggatctgtccgtcgtcgagaagctgaaggaaatcatcattcagaaggtcgacgagatctataaagtgtacgggtccagcgagaagctgttcgacgccgactttgtgctcgagaagtccctcaaaaagaatgacgccgtggtggccattatgaaagacctgctcgactccgtgaagtccttcgaaaattacattaaagcgttctttggggaggggaaggaaactaacagggatgagtccttctatggcgactttgtcctcgcgtacgacatcctgctgaaggtcgaccacatttacgacgcgatccgcaactacgtgacacagaagccgtactccaaagacaagttcaagctgtacttccagaacccgcaatttatggggggctgggacaaggataaagagacagactaccgcgcgacaattctccgctatggctccaaatactatctggccatcatggacaagaagtacgcgaagtgcctgcagaagatcgacaaagacgacgtcaatggcaactatgaaaagatcaactacaagctgctgccgggcccgaacaagatgctcccgaaggtgttcttcagcaagaagtggatggcctactacaatccaagcgaggatattcagaaaatctataaaaacgggaccttcaagaagggggacatgtttaacctcaacgactgccacaagctcattgatttcttcaaggatagcatttcccgctacccgaaatggtccaatgcgtacgattttaacttctccgagacagaaaagtacaaagacatcgcgggcttttacagggaggtggaggagcaagggtataaagtttcttttgaatccgcgagcaagaaggaagtcgacaagctcgtcgaggagggcaagctctacatgttccaaatttataacaaggacttttccgacaagagccatgggaccccaaacctccacaccatgtacttcaaactgctctttgacgagaacaaccacgggcaaatcaggctgagcggcggcgccgaattattcatgcgcagggcctccctcaagaaggaagagctggtcgtccatccagccaattccccgatcgcgaacaagaacccggacaatccgaaaaagaccaccaccctgtcctacgacgtctacaaggacaaacgcttcagcgaagaccagtacgaattacacatcccaattgcgattaataagtgcccaaagaatatcttcaaaattaatacagaggtcagggtgctgctcaaacacgacgacaatccgtatgtcatcggcattgccaggggcgagcgcaatctgctctatatcgtggtcgtggatgggaagggcaatattgtggagcagtactccctgaacgagattatcaacaacttcaatgggattaggattaagaccgactatcacagcctgctcgacaagaaagaaaaagagaggtttgaggcccgccaaaactggacctccattgagaatatcaaagaattaaaggccggctatatttcccaagtcgtccacaagatctgcgagctggtggagaaatatgacgccgtgattgcgctcgaagacttaaattctgggttcaagaactcccgcgtgaaggtggaaaaacaggtgtatcagaaattcgagaaaatgctgatcgacaaactcaattatatggtggataagaagtccaacccgtgtgccacagggggcgcgctgaagggctatcagatcaccaacaagttcgagagcttcaagagcatgagcacccagaacgggtttattttctacatcccggcgtggctcacctccaagattgacccgagcaccggcttcgtgaacctcctgaagacaaagtatacctccattgccgacagcaagaagtttatctcctccttcgaccgcattatgtatgtgccggaggaggacctcttcgagttcgccctcgactacaaaaacttcagccgcacagatgcggattacatcaagaagtggaagctgtactcctacgggaacaggatccgcatcttcaggaatccaaaaaaaaataacgtctttgactgggaggaagtgtgcctgacatccgcctacaaggaactgttcaataaatacggcatcaattaccagcagggcgacattcgcgccctcctctgtgagcagtccgacaaagcgttttactccagcttcatggccctcatgtccctgatgctccaaatgaggaatagcatcacagggcgcaccgacgtcgacttcctcatcagcccggtgaagaactccgacgggatcttttacgactcccgcaactatgaggcgcaagagaatgcgatcctcccgaagaacgccgatgcgaacggggcctataatatcgccaggaaagtgctctgggccatcgggcagttcaaaaaggcggaggatgagaagctcgacaaggtgaaaattgccatttccaacaaggagtggctggagtacgcgcagacctccgtgaagcacggctcctctggcagctccggctctagcggctcctctggcagctccggctccaagctggagaagtttacaaactgttacagcctctccaaaaccctcaggtttaaagcgatcccggtgggcaagacccaggagaacatcgacaacaagaggctcctggtggaagacgagaagcgcgccgaagactacaagggcgtgaagaagctgctcgataggtactacctcagctttattaacgacgtgctgcacagcatcaaactcaagaatctcaacaactacatctccctcttccgcaaaaagacctctggtggttcttctggtggttcttctgaggttgaattttcacatgagtattggatgagacacgctcttaccttggctaagagagcaagggatgagagagaagttccagtgggagcagttcttgtgttgaacaatagagttattggagagggttggaacaggtaagtatcaaggttacaagacaggtttaaggagaccaatagaaactgggcttgtcgagacagagaagactcttgcgtttctgataggcacctattggtcttactgacatccactttgcctttctctccacagggctattggacttcatgatcctactgctcacgcagaaattatggcacttagacaaggtggacttgttatgcagaactacaggcttatcgatgctactctttatgttacattcgagccatgtgtgatgtgcgctggagcaatgattcattctaggattggaagggttgtgttcggtgttagaaactctaagaggggagctgcaggttcacttatgaacgttttgaattatcctggtatgaaccacagagtggagattactgaaggtattttggcagatgaatgtgctgcacttttgtgcgatttttacagaatgcctagacaagtgttcaacgctcaaaagaaggcacaatcttctattaac

SEQ ID NO: 649 - DNA, 4378 bp, synthetic construct
  source 1..4378: mol_type = other DNA
cgcaccgagaaggagaacaaggagctggagaacctggagatcaacctccgcaaggaaatcgccaaagcgttcaagggcaatgaagggtacaagagcctcttcaagaaagacatcatcgaaactatcctcccagagtttctcgatgacaaggacgagatcgcgctggtgaactcctttaacgggttcacaaccgcgtttaccggcttctttgataacagggaaaatatgttctccgaggaggccaagtccaccagcatcgccttcaggtgtatcaacgagaacctcacccgctacatttccaatatggacattttcgagaaggtggatgcgatcttcgataagcacgaggtgcaggagatcaaagagaagattctcaattccgattatgacgtcgaggatttcttcgaaggggagttctttaattttgtgctcacacaagagggcattgacgtgtacaacgcgattatcgggggcttcgtcacagagtccggggagaagattaaggggctgaatgagtacatcaatctgtacaatcagaagaccaagcagaaactgccgaaattcaagccgctctacaagcaagtcctgtccgatagggaaagcctctccttctacggcgagggctataccagcgacgaggaggtgctggaagtcttccgcaacacactgaataagaatagcgagattttctcctccatcaagaagctcgagaagctctttaagaactttgacgagtacagctccgccgggattttcgtgaagaacgggccggcgatcagcaccatctccaaggacatctttggcgagtggaacgtcatcagggacaagtggaacgccgagtacgacgacatccacctgaagaagaaggcggtggtgaccgagaagtatgaggacgatcgcaggaagtccttcaaaaaaatcggctccttcagcctcgaacagctccaggagtatgccgatgcggatctgtccgtcgtcgagaagctgaaggaaatcatcattcagaaggtcgacgagatctataaagtgtacgggtccagcgagaagctgttcgacgccgactttgtgctcgagaagtccctcaaaaagaatgacgccgtggtggccattatgaaagacctgctcgactccgtgaagtccttcgaaaattacattaaagcgttctttggggaggggaaggaaactaacagggatgagtccttctatggcgactttgtcctcgcgtacgacatcctgctgaaggtcgaccacatttacgacgcgatccgcaactacgtgacacagaagccgtactccaaagacaagttcaagctgtacttccagaacccgcaatttatggggggctgggacaaggataaagagacagactaccgcgcgacaattctccgctatggctccaaatactatctggccatcatggacaagaagtacgcgaagtgcctgcagaagatcgacaaagacgacgtcaatggcaactatgaaaagatcaactacaagctgctgccgggcccgaacaagatgctcccgaaggtgttcttcagcaagaagtggatggcctactacaatccaagcgaggatattcagaaaatctataaaaacgggaccttcaagaagggggacatgtttaacctcaacgactgccacaagctcattgatttcttcaaggatagcatttcccgctacccgaaatggtccaatgcgtacgattttaacttctccgagacagaaaagtacaaagacatcgcgggcttttacagggaggtggaggagcaagggtataaagtttcttttgaatccgcgagcaagaaggaagtcgacaagctcgtcgaggagggcaagctctacatgttccaaatttataacaaggacttttccgacaagagccatgggaccccaaacctccacaccatgtacttcaaactgctctttgacgagaacaaccacgggcaaatcaggctgagcggcggcgccgaattattcatgcgcagggcctccctcaagaaggaagagctggtcgtccatccagccaattccccgatcgcgaacaagaacccggacaatccgaaaaagaccaccaccctgtcctacgacgtctacaaggacaaacgcttcagcgaagaccagtacgaattacacatcccaattgcgattaataagtgcccaaagaatatcttcaaaattaatacagaggtcagggtgctgctcaaacacgacgacaatccgtatgtcatcggcattgccaggggcgagcgcaatctgctctatatcgtggtcgtggatgggaagggcaatattgtggagcagtactccctgaacgagattatcaacaacttcaatgggattaggattaagaccgactatcacagcctgctcgacaagaaagaaaaagagaggtttgaggcccgccaaaactggacctccattgagaatatcaaagaattaaaggccggctatatttcccaagtcgtccacaagatctgcgagctggtggagaaatatgacgccgtgattgcgctcgaagacttaaattctgggttcaagaactcccgcgtgaaggtggaaaaacaggtgtatcagaaattcgagaaaatgctgatcgacaaactcaattatatggtggataagaagtccaacccgtgtgccacagggggcgcgctgaagggctatcagatcaccaacaagttcgagagcttcaagagcatgagcacccagaacgggtttattttctacatcccggcgtggctcacctccaagattgacccgagcaccggcttcgtgaacctcctgaagacaaagtatacctccattgccgacagcaagaagtttatctcctccttcgaccgcattatgtatgtgccggaggaggacctcttcgagttcgccctcgactacaaaaacttcagccgcacagatgcggattacatcaagaagtggaagctgtactcctacgggaacaggatccgcatcttcaggaatccaaaaaaaaataacgtctttgactgggaggaagtgtgcctgacatccgcctacaaggaactgttcaataaatacggcatcaattaccagcagggcgacattcgcgccctcctctgtgagcagtccgacaaagcgttttactccagcttcatggccctcatgtccctgatgctccaaatgaggaatagcatcacagggcgcaccgacgtcgacttcctcatcagcccggtgaagaactccgacgggatcttttacgactcccgcaactatgaggcgcaagagaatgcgatcctcccgaagaacgccgatgcgaacggggcctataatatcgccaggaaagtgctctgggccatcgggcagttcaaaaaggcggaggatgagaagctcgacaaggtgaaaattgccatttccaacaaggagtggctggagtacgcgcagacctccgtgaagcacggctcctctggcagctccggctctagcggctcctctggcagctccggctccaagctggagaagtttacaaactgttacagcctctccaaaaccctcaggtttaaagcgatcccggtgggcaagacccaggagaacatcgacaacaagaggctcctggtggaagacgagaagcgcgccgaagactacaagggcgtgaagaagctgctcgataggtactacctcagctttattaacgacgtgctgcacagcatcaaactcaagaatctcaacaactacatctccctcttccgcaaaaagacctctggttcttctggttcttctgaggttgaattttcacatgagtattggatgagacacgctcttaccttggctaagagagcaagggatgagagagaagttccagtgggagcagttcttgtgttgaacaatagagttattggagagggttggaacaggtaagtatcaaggttacaagacaggtttaaggagaccaatagaaactgggcttgtcgagacagagaagactcttgcgtttctgataggcacctattggtcttactgacatccactttgcctttctctccacagggctattggacttcatgatcctactgctcacgcagaaattatggcacttagacaaggtggacttgttatgcagaactacaggcttatcgatgctactctttatgttacattcgagccatgtgtgatgtgcgctggagcaatgattcattctaggattggaagggttgtgttcggtgttagaaactctaagaggggagctgcaggttcacttatgaacgttttgaattatcctggtatgaaccacagagtggagattactgaaggtattttggcagatgaatgtgctgcacttttgtgcgatttttacagaatgcctagacaagtgttcaacgctcaaaagaaggcacaatcttctattaac

SEQ ID NO: 650 - DNA, 4408 bp, synthetic construct
  source 1..4408: mol_type = other DNA
tccgacgggatcttttacgactcccgcaactatgaggcgcaagagaatgcgatcctcccgaagaacgccgatgcgaacggggcctataatatcgccaggaaagtgctctgggccatcgggcagttcaaaaaggcggaggatgagaagctcgacaaggtgaaaattgccatttccaacaaggagtggctggagtacgcgcagacctccgtgaagcacggctcctctggcagctccggctctagcggctcctctggcagctccggctccaagctggagaagtttacaaactgttacagcctctccaaaaccctcaggtttaaagcgatcccggtgggcaagacccaggagaacatcgacaacaagaggctcctggtggaagacgagaagcgcgccgaagactacaagggcgtgaagaagctgctcgataggtactacctcagctttattaacgacgtgctgcacagcatcaaactcaagaatctcaacaactacatctccctcttccgcaaaaagacccgcaccgagaaggagaacaaggagctggagaacctggagatcaacctccgcaaggaaatcgccaaagcgttcaagggcaatgaagggtacaagagcctcttcaagaaagacatcatcgaaactatcctcccagagtttctcgatgacaaggacgagatcgcgctggtgaactcctttaacgggttcacaaccgcgtttaccggcttctttgataacagggaaaatatgttctccgaggaggccaagtccaccagcatcgccttcaggtgtatcaacgagaacctcacccgctacatttccaatatggacattttcgagaaggtggatgcgatcttcgataagcacgaggtgcaggagatcaaagagaagattctcaattccgattatgacgtcgaggatttcttcgaaggggagttctttaattttgtgctcacacaagagggcattgacgtgtacaacgcgattatcgggggcttcgtcacagagtccggggagaagattaaggggctgaatgagtacatcaatctgtacaatcagaagaccaagcagaaactgccgaaattcaagccgctctacaagcaagtcctgtccgatagggaaagcctctccttctacggcgagggctataccagcgacgaggaggtgctggaagtcttccgcaacacactgaataagaatagcgagattttctcctccatcaagaagctcgagaagctctttaagaactttgacgagtacagctccgccgggattttcgtgaagaacgggccggcgatcagcaccatctccaaggacatctttggcgagtggaacgtcatcagggacaagtggaacgccgagtacgacgacatccacctgaagaagaaggcggtggtgaccgagaagtatgaggacgatcgcaggaagtccttcaaaaaaatcggctccttcagcctcgaacagctccaggagtatgccgatgcggatctgtccgtcgtcgagaagctgaaggaaatcatcattcagaaggtcgacgagatctataaagtgtacgggtccagcgagaagctgttcgacgccgactttgtgctcgagaagtccctcaaaaagaatgacgccgtggtggccattatgaaagacctgctcgactccgtgaagtccttcgaaaattacattaaagcgttctttggggaggggaaggaaactaacagggatgagtccttctatggcgactttgtcctcgcgtacgacatcctgctgaaggtcgaccacatttacgacgcgatccgcaactacgtgacacagaagccgtactccaaagacaagttcaagctgtacttccagaacccgcaatttatggggggctgggacaaggataaagagacagactaccgcgcgacaattctccgctatggctccaaatactatctggccatcatggacaagaagtacgcgaagtgcctgcagaagatcgacaaagacgacgtcaatggcaactatgaaaagatcaactacaagctgctgccgggcccgaacaagatgctcccgaaggtgttcttcagcaagaagtggatggcctactacaatccaagcgaggatattcagaaaatctataaaaacgggaccttcaagaagggggacatgtttaacctcaacgactgccacaagctcattgatttcttcaaggatagcatttcccgctacccgaaatggtccaatgcgtacgattttaacttctccgagacagaaaagtacaaagacatcgcgggcttttacagggaggtggaggagcaagggtataaagtttcttttgaatccgcgagcaagaaggaagtcgacaagctcgtcgaggagggcaagctctacatgttccaaatttataacaaggacttttccgacaagagccatgggaccccaaacctccacaccatgtacttcaaactgctctttgacgagaacaaccacgggcaaatcaggctgagcggcggcgccgaattattcatgcgcagggcctccctcaagaaggaagagctggtcgtccatccagccaattccccgatcgcgaacaagaacccggacaatccgaaaaagaccaccaccctgtcctacgacgtctacaaggacaaacgcttcagcgaagaccagtacgaattacacatcccaattgcgattaataagtgcccaaagaatatcttcaaaattaatacagaggtcagggtgctgctcaaacacgacgacaatccgtatgtcatcggcattgccaggggcgagcgcaatctgctctatatcgtggtcgtggatgggaagggcaatattgtggagcagtactccctgaacgagattatcaacaacttcaatgggattaggattaagaccgactatcacagcctgctcgacaagaaagaaaaagagaggtttgaggcccgccaaaactggacctccattgagaatatcaaagaattaaaggccggctatatttcccaagtcgtccacaagatctgcgagctggtggagaaatatgacgccgtgattgcgctcgaagacttaaattctgggttcaagaactcccgcgtgaaggtggaaaaacaggtgtatcagaaattcgagaaaatgctgatcgacaaactcaattatatggtggataagaagtccaacccgtgtgccacagggggcgcgctgaagggctatcagatcaccaacaagttcgagagcttcaagagcatgagcacccagaacgggtttattttctacatcccggcgtggctcacctccaagattgacccgagcaccggcttcgtgaacctcctgaagacaaagtatacctccattgccgacagcaagaagtttatctcctccttcgaccgcattatgtatgtgccggaggaggacctcttcgagttcgccctcgactacaaaaacttcagccgcacagatgcggattacatcaagaagtggaagctgtactcctacgggaacaggatccgcatcttcaggaatccaaaaaaaaataacgtctttgactgggaggaagtgtgcctgacatccgcctacaaggaactgttcaataaatacggcatcaattaccagcagggcgacattcgcgccctcctctgtgagcagtccgacaaagcgttttactccagcttcatggccctcatgtccctgatgctccaaatgaggaatagcatcacagggcgcaccgacgtcgacttcctcatcagcccggtgaagaacagcggcagcgagactcccgggacctcagagtccgccacacccgaaagttctgaggttgaattttcacatgagtattggatgagacacgctcttaccttggctaagagagcaagggatgagagagaagttccagtgggagcagttcttgtgttgaacaatagagttattggagagggttggaacaggtaagtatcaaggttacaagacaggtttaaggagaccaatagaaactgggcttgtcgagacagagaagactcttgcgtttctgataggcacctattggtcttactgacatccactttgcctttctctccacagggctattggacttcatgatcctactgctcacgcagaaattatggcacttagacaaggtggacttgttatgcagaactacaggcttatcgatgctactctttatgttacattcgagccatgtgtgatgtgcgctggagcaatgattcattctaggattggaagggttgtgttcggtgttagaaactctaagaggggagctgcaggttcacttatgaacgttttgaattatcctggtatgaaccacagagtggagattactgaaggtattttggcagatgaatgtgctgcacttttgtgcgatttttacagaatgcctagacaagtgttcaacgctcaaaagaaggcacaatcttctattaac

SEQ ID NO: 651 - DNA, 4396 bp, synthetic construct
  source 1..4396: mol_type = other DNA
tccgacgggatcttttacgactcccgcaactatgaggcgcaagagaatgcgatcctcccgaagaacgccgatgcgaacggggcctataatatcgccaggaaagtgctctgggccatcgggcagttcaaaaaggcggaggatgagaagctcgacaaggtgaaaattgccatttccaacaaggagtggctggagtacgcgcagacctccgtgaagcacggctcctctggcagctccggctctagcggctcctctggcagctccggctccaagctggagaagtttacaaactgttacagcctctccaaaaccctcaggtttaaagcgatcccggtgggcaagacccaggagaacatcgacaacaagaggctcctggtggaagacgagaagcgcgccgaagactacaagggcgtgaagaagctgctcgataggtactacctcagctttattaacgacgtgctgcacagcatcaaactcaagaatctcaacaactacatctccctcttccgcaaaaagacccgcaccgagaaggagaacaaggagctggagaacctggagatcaacctccgcaaggaaatcgccaaagcgttcaagggcaatgaagggtacaagagcctcttcaagaaagacatcatcgaaactatcctcccagagtttctcgatgacaaggacgagatcgcgctggtgaactcctttaacgggttcacaaccgcgtttaccggcttctttgataacagggaaaatatgttctccgaggaggccaagtccaccagcatcgccttcaggtgtatcaacgagaacctcacccgctacatttccaatatggacattttcgagaaggtggatgcgatcttcgataagcacgaggtgcaggagatcaaagagaagattctcaattccgattatgacgtcgaggatttcttcgaaggggagttctttaattttgtgctcacacaagagggcattgacgtgtacaacgcgattatcgggggcttcgtcacagagtccggggagaagattaaggggctgaatgagtacatcaatctgtacaatcagaagaccaagcagaaactgccgaaattcaagccgctctacaagcaagtcctgtccgatagggaaagcctctccttctacggcgagggctataccagcgacgaggaggtgctggaagtcttccgcaacacactgaataagaatagcgagattttctcctccatcaagaagctcgagaagctctttaagaactttgacgagtacagctccgccgggattttcgtgaagaacgggccggcgatcagcaccatctccaaggacatctttggcgagtggaacgtcatcagggacaagtggaacgccgagtacgacgacatccacctgaagaagaaggcggtggtgaccgagaagtatgaggacgatcgcaggaagtccttcaaaaaaatcggctccttcagcctcgaacagctccaggagtatgccgatgcggatctgtccgtcgtcgagaagctgaaggaaatcatcattcagaaggtcgacgagatctataaagtgtacgggtccagcgagaagctgttcgacgccgactttgtgctcgagaagtccctcaaaaagaatgacgccgtggtggccattatgaaagacctgctcgactccgtgaagtccttcgaaaattacattaaagcgttctttggggaggggaaggaaactaacagggatgagtccttctatggcgactttgtcctcgcgtacgacatcctgctgaaggtcgaccacatttacgacgcgatccgcaactacgtgacacagaagccgtactccaaagacaagttcaagctgtacttccagaacccgcaatttatggggggctgggacaaggataaagagacagactaccgcgcgacaattctccgctatggctccaaatactatctggccatcatggacaagaagtacgcgaagtgcctgcagaagatcgacaaagacgacgtcaatggcaactatgaaaagatcaactacaagctgctgccgggcccgaacaagatgctcccgaaggtgttcttcagcaagaagtggatggcctactacaatccaagcgaggatattcagaaaatctataaaaacgggaccttcaagaagggggacatgtttaacctcaacgactgccacaagctcattgatttcttcaaggatagcatttcccgctacccgaaatggtccaatgcgtacgattttaacttctccgagacagaaaagtacaaagacatcgcgggcttttacagggaggtggaggagcaagggtataaagtttcttttgaatccgcgagcaagaaggaagtcgacaagctcgtcgaggagggcaagctctacatgttccaaatttataacaaggacttttccgacaagagccatgggaccccaaacctccacaccatgtacttcaaactgctctttgacgagaacaaccacgggcaaatcaggctgagcggcggcgccgaattattcatgcgcagggcctccctcaagaaggaagagctggtcgtccatccagccaattccccgatcgcgaacaagaacccggacaatccgaaaaagaccaccaccctgtcctacgacgtctacaaggacaaacgcttcagcgaagaccagtacgaattacacatcccaattgcgattaataagtgcccaaagaatatcttcaaaattaatacagaggtcagggtgctgctcaaacacgacgacaatccgtatgtcatcggcattgccaggggcgagcgcaatctgctctatatcgtggtcgtggatgggaagggcaatattgtggagcagtactccctgaacgagattatcaacaacttcaatgggattaggattaagaccgactatcacagcctgctcgacaagaaagaaaaagagaggtttgaggcccgccaaaactggacctccattgagaatatcaaagaattaaaggccggctatatttcccaagtcgtccacaagatctgcgagctggtggagaaatatgacgccgtgattgcgctcgaagacttaaattctgggttcaagaactcccgcgtgaaggtggaaaaacaggtgtatcagaaattcgagaaaatgctgatcgacaaactcaattatatggtggataagaagtccaacccgtgtgccacagggggcgcgctgaagggctatcagatcaccaacaagttcgagagcttcaagagcatgagcacccagaacgggtttattttctacatcccggcgtggctcacctccaagattgacccgagcaccggcttcgtgaacctcctgaagacaaagtatacctccattgccgacagcaagaagtttatctcctccttcgaccgcattatgtatgtgccggaggaggacctcttcgagttcgccctcgactacaaaaacttcagccgcacagatgcggattacatcaagaagtggaagctgtactcctacgggaacaggatccgcatcttcaggaatccaaaaaaaaataacgtctttgactgggaggaagtgtgcctgacatccgcctacaaggaactgttcaataaatacggcatcaattaccagcagggcgacattcgcgccctcctctgtgagcagtccgacaaagcgttttactccagcttcatggccctcatgtccctgatgctccaaatgaggaatagcatcacagggcgcaccgacgtcgacttcctcatcagcccggtgaagaactctggtggttcttctggtggttcttctggtggttcttctgaggttgaattttcacatgagtattggatgagacacgctcttaccttggctaagagagcaagggatgagagagaagttccagtgggagcagttcttgtgttgaacaatagagttattggagagggttggaacaggtaagtatcaaggttacaagacaggtttaaggagaccaatagaaactgggcttgtcgagacagagaagactcttgcgtttctgataggcacctattggtcttactgacatccactttgcctttctctccacagggctattggacttcatgatcctactgctcacgcagaaattatggcacttagacaaggtggacttgttatgcagaactacaggcttatcgatgctactctttatgttacattcgagccatgtgtgatgtgcgctggagcaatgattcattctaggattggaagggttgtgttcggtgttagaaactctaagaggggagctgcaggttcacttatgaacgttttgaattatcctggtatgaaccacagagtggagattactgaaggtattttggcagatgaatgtgctgcacttttgtgcgatttttacagaatgcctagacaagtgttcaacgctcaaaagaaggcacaatcttctattaac

SEQ ID NO: 652 - DNA, 4384 bp, synthetic construct
  source 1..4384: mol_type = other DNA
tccgacgggatcttttacgactcccgcaactatgaggcgcaagagaatgcgatcctcccgaagaacgccgatgcgaacggggcctataatatcgccaggaaagtgctctgggccatcgggcagttcaaaaaggcggaggatgagaagctcgacaaggtgaaaattgccatttccaacaaggagtggctggagtacgcgcagacctccgtgaagcacggctcctctggcagctccggctctagcggctcctctggcagctccggctccaagctggagaagtttacaaactgttacagcctctccaaaaccctcaggtttaaagcgatcccggtgggcaagacccaggagaacatcgacaacaagaggctcctggtggaagacgagaagcgcgccgaagactacaagggcgtgaagaagctgctcgataggtactacctcagctttattaacgacgtgctgcacagcatcaaactcaagaatctcaacaactacatctccctcttccgcaaaaagacccgcaccgagaaggagaacaaggagctggagaacctggagatcaacctccgcaaggaaatcgccaaagcgttcaagggcaatgaagggtacaagagcctcttcaagaaagacatcatcgaaactatcctcccagagtttctcgatgacaaggacgagatcgcgctggtgaactcctttaacgggttcacaaccgcgtttaccggcttctttgataacagggaaaatatgttctccgaggaggccaagtccaccagcatcgccttcaggtgtatcaacgagaacctcacccgctacatttccaatatggacattttcgagaaggtggatgcgatcttcgataagcacgaggtgcaggagatcaaagagaagattctcaattccgattatgacgtcgaggatttcttcgaaggggagttctttaattttgtgctcacacaagagggcattgacgtgtacaacgcgattatcgggggcttcgtcacagagtccggggagaagattaaggggctgaatgagtacatcaatctgtacaatcagaagaccaagcagaaactgccgaaattcaagccgctctacaagcaagtcctgtccgatagggaaagcctctccttctacggcgagggctataccagcgacgaggaggtgctggaagtcttccgcaacacactgaataagaatagcgagattttctcctccatcaagaagctcgagaagctctttaagaactttgacgagtacagctccgccgggattttcgtgaagaacgggccggcgatcagcaccatctccaaggacatctttggcgagtggaacgtcatcagggacaagtggaacgccgagtacgacgacatccacctgaagaagaaggcggtggtgaccgagaagtatgaggacgatcgcaggaagtccttcaaaaaaatcggctccttcagcctcgaacagctccaggagtatgccgatgcggatctgtccgtcgtcgagaagctgaaggaaatcatcattcagaaggtcgacgagatctataaagtgtacgggtccagcgagaagctgttcgacgccgactttgtgctcgagaagtccctcaaaaagaatgacgccgtggtggccattatgaaagacctgctcgactccgtgaagtccttcgaaaattacattaaagcgttctttggggaggggaaggaaactaacagggatgagtccttctatggcgactttgtcctcgcgtacgacatcctgctgaaggtcgaccacatttacgacgcgatccgcaactacgtgacacagaagccgtactccaaagacaagttcaagctgtacttccagaacccgcaatttatggggggctgggacaaggataaagagacagactaccgcgcgacaattctccgctatggctccaaatactatctggccatcatggacaagaagtacgcgaagtgcctgcagaagatcgacaaagacgacgtcaatggcaactatgaaaagatcaactacaagctgctgccgggcccgaacaagatgctcccgaaggtgttcttcagcaagaagtggatggcctactacaatccaagcgaggatattcagaaaatctataaaaacgggaccttcaagaagggggacatgtttaacctcaacgactgccacaagctcattgatttcttcaaggatagcatttcccgctacccgaaatggtccaatgcgtacgattttaacttctccgagacagaaaagtacaaagacatcgcgggcttttacagggaggtggaggagcaagggtataaagtttcttttgaatccgcgagcaagaaggaagtcgacaagctcgtcgaggagggcaagctctacatgttccaaatttataacaaggacttttccgacaagagccatgggaccccaaacctccacaccatgtacttcaaactgctctttgacgagaacaaccacgggcaaatcaggctgagcggcggcgccgaattattcatgcgcagggcctccctcaagaaggaagagctggtcgtccatccagccaattccccgatcgcgaacaagaacccggacaatccgaaaaagaccaccaccctgtcctacgacgtctacaaggacaaacgcttcagcgaagaccagtacgaattacacatcccaattgcgattaataagtgcccaaagaatatcttcaaaattaatacagaggtcagggtgctgctcaaacacgacgacaatccgtatgtcatcggcattgccaggggcgagcgcaatctgctctatatcgtggtcgtggatgggaagggcaatattgtggagcagtactccctgaacgagattatcaacaacttcaatgggattaggattaagaccgactatcacagcctgctcgacaagaaagaaaaagagaggtttgaggcccgccaaaactggacctccattgagaatatcaaagaattaaaggccggctatatttcccaagtcgtccacaagatctgcgagctggtggagaaatatgacgccgtgattgcgctcgaagacttaaattctgggttcaagaactcccgcgtgaaggtggaaaaacaggtgtatcagaaattcgagaaaatgctgatcgacaaactcaattatatggtggataagaagtccaacccgtgtgccacagggggcgcgctgaagggctatcagatcaccaacaagttcgagagcttcaagagcatgagcacccagaacgggtttattttctacatcccggcgtggctcacctccaagattgacccgagcaccggcttcgtgaacctcctgaagacaaagtatacctccattgccgacagcaagaagtttatctcctccttcgaccgcattatgtatgtgccggaggaggacctcttcgagttcgccctcgactacaaaaacttcagccgcacagatgcggattacatcaagaagtggaagctgtactcctacgggaacaggatccgcatcttcaggaatccaaaaaaaaataacgtctttgactgggaggaagtgtgcctgacatccgcctacaaggaactgttcaataaatacggcatcaattaccagcagggcgacattcgcgccctcctctgtgagcagtccgacaaagcgttttactccagcttcatggccctcatgtccctgatgctccaaatgaggaatagcatcacagggcgcaccgacgtcgacttcctcatcagcccggtgaagaactctggtggttcttctggtggttcttctgaggttgaattttcacatgagtattggatgagacacgctcttaccttggctaagagagcaagggatgagagagaagttccagtgggagcagttcttgtgttgaacaatagagttattggagagggttggaacaggtaagtatcaaggttacaagacaggtttaaggagaccaatagaaactgggcttgtcgagacagagaagactcttgcgtttctgataggcacctattggtcttactgacatccactttgcctttctctccacagggctattggacttcatgatcctactgctcacgcagaaattatggcacttagacaaggtggacttgttatgcagaactacaggcttatcgatgctactctttatgttacattcgagccatgtgtgatgtgcgctggagcaatgattcattctaggattggaagggttgtgttcggtgttagaaactctaagaggggagctgcaggttcacttatgaacgttttgaattatcctggtatgaaccacagagtggagattactgaaggtattttggcagatgaatgtgctgcacttttgtgcgatttttacagaatgcctagacaagtgttcaacgctcaaaagaaggcacaatcttctattaac

SEQ ID NO: 653 - DNA, 4378 bp, synthetic construct
  source 1..4378: mol_type = other DNA
tccgacgggatcttttacgactcccgcaactatgaggcgcaagagaatgcgatcctcccgaagaacgccgatgcgaacggggcctataatatcgccaggaaagtgctctgggccatcgggcagttcaaaaaggcggaggatgagaagctcgacaaggtgaaaattgccatttccaacaaggagtggctggagtacgcgcagacctccgtgaagcacggctcctctggcagctccggctctagcggctcctctggcagctccggctccaagctggagaagtttacaaactgttacagcctctccaaaaccctcaggtttaaagcgatcccggtgggcaagacccaggagaacatcgacaacaagaggctcctggtggaagacgagaagcgcgccgaagactacaagggcgtgaagaagctgctcgataggtactacctcagctttattaacgacgtgctgcacagcatcaaactcaagaatctcaacaactacatctccctcttccgcaaaaagacccgcaccgagaaggagaacaaggagctggagaacctggagatcaacctccgcaaggaaatcgccaaagcgttcaagggcaatgaagggtacaagagcctcttcaagaaagacatcatcgaaactatcctcccagagtttctcgatgacaaggacgagatcgcgctggtgaactcctttaacgggttcacaaccgcgtttaccggcttctttgataacagggaaaatatgttctccgaggaggccaagtccaccagcatcgccttcaggtgtatcaacgagaacctcacccgctacatttccaatatggacattttcgagaaggtggatgcgatcttcgataagcacgaggtgcaggagatcaaagagaagattctcaattccgattatgacgtcgaggatttcttcgaaggggagttctttaattttgtgctcacacaagagggcattgacgtgtacaacgcgattatcgggggcttcgtcacagagtccggggagaagattaaggggctgaatgagtacatcaatctgtacaatcagaagaccaagcagaaactgccgaaattcaagccgctctacaagcaagtcctgtccgatagggaaagcctctccttctacggcgagggctataccagcgacgaggaggtgctggaagtcttccgcaacacactgaataagaatagcgagattttctcctccatcaagaagctcgagaagctctttaagaactttgacgagtacagctccgccgggattttcgtgaagaacgggccggcgatcagcaccatctccaaggacatctttggcgagtggaacgtcatcagggacaagtggaacgccgagtacgacgacatccacctgaagaagaaggcggtggtgaccgagaagtatgaggacgatcgcaggaagtccttcaaaaaaatcggctccttcagcctcgaacagctccaggagtatgccgatgcggatctgtccgtcgtcgagaagctgaaggaaatcatcattcagaaggtcgacgagatctataaagtgtacgggtccagcgagaagctgttcgacgccgactttgtgctcgagaagtccctcaaaaagaatgacgccgtggtggccattatgaaagacctgctcgactccgtgaagtccttcgaaaattacattaaagcgttctttggggaggggaaggaaactaacagggatgagtccttctatggcgactttgtcctcgcgtacgacatcctgctgaaggtcgaccacatttacgacgcgatccgcaactacgtgacacagaagccgtactccaaagacaagttcaagctgtacttccagaacccgcaatttatggggggctgggacaaggataaagagacagactaccgcgcgacaattctccgctatggctccaaatactatctggccatcatggacaagaagtacgcgaagtgcctgcagaagatcgacaaagacgacgtcaatggcaactatgaaaagatcaactacaagctgctgccgggcccgaacaagatgctcccgaaggtgttcttcagcaagaagtggatggcctactacaatccaagcgaggatattcagaaaatctataaaaacgggaccttcaagaagggggacatgtttaacctcaacgactgccacaagctcattgatttcttcaaggatagcatttcccgctacccgaaatggtccaatgcgtacgattttaacttctccgagacagaaaagtacaaagacatcgcgggcttttacagggaggtggaggagcaagggtataaagtttcttttgaatccgcgagcaagaaggaagtcgacaagctcgtcgaggagggcaagctctacatgttccaaatttataacaaggacttttccgacaagagccatgggaccccaaacctccacaccatgtacttcaaactgctctttgacgagaacaaccacgggcaaatcaggctgagcggcggcgccgaattattcatgcgcagggcctccctcaagaaggaagagctggtcgtccatccagccaattccccgatcgcgaacaagaacccggacaatccgaaaaagaccaccaccctgtcctacgacgtctacaaggacaaacgcttcagcgaagaccagtacgaattacacatcccaattgcgattaataagtgcccaaagaatatcttcaaaattaatacagaggtcagggtgctgctcaaacacgacgacaatccgtatgtcatcggcattgccaggggcgagcgcaatctgctctatatcgtggtcgtggatgggaagggcaatattgtggagcagtactccctgaacgagattatcaacaacttcaatgggattaggattaagaccgactatcacagcctgctcgacaagaaagaaaaagagaggtttgaggcccgccaaaactggacctccattgagaatatcaaagaattaaaggccggctatatttcccaagtcgtccacaagatctgcgagctggtggagaaatatgacgccgtgattgcgctcgaagacttaaattctgggttcaagaactcccgcgtgaaggtggaaaaacaggtgtatcagaaattcgagaaaatgctgatcgacaaactcaattatatggtggataagaagtccaacccgtgtgccacagggggcgcgctgaagggctatcagatcaccaacaagttcgagagcttcaagagcatgagcacccagaacgggtttattttctacatcccggcgtggctcacctccaagattgacccgagcaccggcttcgtgaacctcctgaagacaaagtatacctccattgccgacagcaagaagtttatctcctccttcgaccgcattatgtatgtgccggaggaggacctcttcgagttcgccctcgactacaaaaacttcagccgcacagatgcggattacatcaagaagtggaagctgtactcctacgggaacaggatccgcatcttcaggaatccaaaaaaaaataacgtctttgactgggaggaagtgtgcctgacatccgcctacaaggaactgttcaataaatacggcatcaattaccagcagggcgacattcgcgccctcctctgtgagcagtccgacaaagcgttttactccagcttcatggccctcatgtccctgatgctccaaatgaggaatagcatcacagggcgcaccgacgtcgacttcctcatcagcccggtgaagaactctggttcttctggttcttctgaggttgaattttcacatgagtattggatgagacacgctcttaccttggctaagagagcaagggatgagagagaagttccagtgggagcagttcttgtgttgaacaatagagttattggagagggttggaacaggtaagtatcaaggttacaagacaggtttaaggagaccaatagaaactgggcttgtcgagacagagaagactcttgcgtttctgataggcacctattggtcttactgacatccactttgcctttctctccacagggctattggacttcatgatcctactgctcacgcagaaattatggcacttagacaaggtggacttgttatgcagaactacaggcttatcgatgctactctttatgttacattcgagccatgtgtgatgtgcgctggagcaatgattcattctaggattggaagggttgtgttcggtgttagaaactctaagaggggagctgcaggttcacttatgaacgttttgaattatcctggtatgaaccacagagtggagattactgaaggtattttggcagatgaatgtgctgcacttttgtgcgatttttacagaatgcctagacaagtgttcaacgctcaaaagaaggcacaatcttctattaac

SEQ ID NO: 654 - DNA, 4372 bp, synthetic construct
  source 1..4372: mol_type = other DNA
tccgacgggatcttttacgactcccgcaactatgaggcgcaagagaatgcgatcctcccgaagaacgccgatgcgaacggggcctataatatcgccaggaaagtgctctgggccatcgggcagttcaaaaaggcggaggatgagaagctcgacaaggtgaaaattgccatttccaacaaggagtggctggagtacgcgcagacctccgtgaagcacggctcctctggcagctccggctctagcggctcctctggcagctccggctccaagctggagaagtttacaaactgttacagcctctccaaaaccctcaggtttaaagcgatcccggtgggcaagacccaggagaacatcgacaacaagaggctcctggtggaagacgagaagcgcgccgaagactacaagggcgtgaagaagctgctcgataggtactacctcagctttattaacgacgtgctgcacagcatcaaactcaagaatctcaacaactacatctccctcttccgcaaaaagacccgcaccgagaaggagaacaaggagctggagaacctggagatcaacctccgcaaggaaatcgccaaagcgttcaagggcaatgaagggtacaagagcctcttcaagaaagacatcatcgaaactatcctcccagagtttctcgatgacaaggacgagatcgcgctggtgaactcctttaacgggttcacaaccgcgtttaccggcttctttgataacagggaaaatatgttctccgaggaggccaagtccaccagcatcgccttcaggtgtatcaacgagaacctcacccgctacatttccaatatggacattttcgagaaggtggatgcgatcttcgataagcacgaggtgcaggagatcaaagagaagattctcaattccgattatgacgtcgaggatttcttcgaaggggagttctttaattttgtgctcacacaagagggcattgacgtgtacaacgcgattatcgggggcttcgtcacagagtccggggagaagattaaggggctgaatgagtacatcaatctgtacaatcagaagaccaagcagaaactgccgaaattcaagccgctctacaagcaagtcctgtccgatagggaaagcctctccttctacggcgagggctataccagcgacgaggaggtgctggaagtcttccgcaacacactgaataagaatagcgagattttctcctccatcaagaagctcgagaagctctttaagaactttgacgagtacagctccgccgggattttcgtgaagaacgggccggcgatcagcaccatctccaaggacatctttggcgagtggaacgtcatcagggacaagtggaacgccgagtacgacgacatccacctgaagaagaaggcggtggtgaccgagaagtatgaggacgatcgcaggaagtccttcaaaaaaatcggctccttcagcctcgaacagctccaggagtatgccgatgcggatctgtccgtcgtcgagaagctgaaggaaatcatcattcagaaggtcgacgagatctataaagtgtacgggtccagcgagaagctgttcgacgccgactttgtgctcgagaagtccctcaaaaagaatgacgccgtggtggccattatgaaagacctgctcgactccgtgaagtccttcgaaaattacattaaagcgttctttggggaggggaaggaaactaacagggatgagtccttctatggcgactttgtcctcgcgtacgacatcctgctgaaggtcgaccacatttacgacgcgatccgcaactacgtgacacagaagccgtactccaaagacaagttcaagctgtacttccagaacccgcaatttatggggggctgggacaaggataaagagacagactaccgcgcgacaattctccgctatggctccaaatactatctggccatcatggacaagaagtacgcgaagtgcctgcagaagatcgacaaagacgacgtcaatggcaactatgaaaagatcaactacaagctgctgccgggcccgaacaagatgctcccgaaggtgttcttcagcaagaagtggatggcctactacaatccaagcgaggatattcagaaaatctataaaaacgggaccttcaagaagggggacatgtttaacctcaacgactgccacaagctcattgatttcttcaaggatagcatttcccgctacccgaaatggtccaatgcgtacgattttaacttctccgagacagaaaagtacaaagacatcgcgggcttttacagggaggtggaggagcaagggtataaagtttcttttgaatccgcgagcaagaaggaagtcgacaagctcgtcgaggagggcaagctctacatgttccaaatttataacaaggacttttccgacaagagccatgggaccccaaacctccacaccatgtacttcaaactgctctttgacgagaacaaccacgggcaaatcaggctgagcggcggcgccgaattattcatgcgcagggcctccctcaagaaggaagagctggtcgtccatccagccaattccccgatcgcgaacaagaacccggacaatccgaaaaagaccaccaccctgtcctacgacgtctacaaggacaaacgcttcagcgaagaccagtacgaattacacatcccaattgcgattaataagtgcccaaagaatatcttcaaaattaatacagaggtcagggtgctgctcaaacacgacgacaatccgtatgtcatcggcattgccaggggcgagcgcaatctgctctatatcgtggtcgtggatgggaagggcaatattgtggagcagtactccctgaacgagattatcaacaacttcaatgggattaggattaagaccgactatcacagcctgctcgacaagaaagaaaaagagaggtttgaggcccgccaaaactggacctccattgagaatatcaaagaattaaaggccggctatatttcccaagtcgtccacaagatctgcgagctggtggagaaatatgacgccgtgattgcgctcgaagacttaaattctgggttcaagaactcccgcgtgaaggtggaaaaacaggtgtatcagaaattcgagaaaatgctgatcgacaaactcaattatatggtggataagaagtccaacccgtgtgccacagggggcgcgctgaagggctatcagatcaccaacaagttcgagagcttcaagagcatgagcacccagaacgggtttattttctacatcccggcgtggctcacctccaagattgacccgagcaccggcttcgtgaacctcctgaagacaaagtatacctccattgccgacagcaagaagtttatctcctccttcgaccgcattatgtatgtgccggaggaggacctcttcgagttcgccctcgactacaaaaacttcagccgcacagatgcggattacatcaagaagtggaagctgtactcctacgggaacaggatccgcatcttcaggaatccaaaaaaaaataacgtctttgactgggaggaagtgtgcctgacatccgcctacaaggaactgttcaataaatacggcatcaattaccagcagggcgacattcgcgccctcctctgtgagcagtccgacaaagcgttttactccagcttcatggccctcatgtccctgatgctccaaatgaggaatagcatcacagggcgcaccgacgtcgacttcctcatcagcccggtgaagaactctggtggttcttctgaggttgaattttcacatgagtattggatgagacacgctcttaccttggctaagagagcaagggatgagagagaagttccagtgggagcagttcttgtgttgaacaatagagttattggagagggttggaacaggtaagtatcaaggttacaagacaggtttaaggagaccaatagaaactgggcttgtcgagacagagaagactcttgcgtttctgataggcacctattggtcttactgacatccactttgcctttctctccacagggctattggacttcatgatcctactgctcacgcagaaattatggcacttagacaaggtggacttgttatgcagaactacaggcttatcgatgctactctttatgttacattcgagccatgtgtgatgtgcgctggagcaatgattcattctaggattggaagggttgtgttcggtgttagaaactctaagaggggagctgcaggttcacttatgaacgttttgaattatcctggtatgaaccacagagtggagattactgaaggtattttggcagatgaatgtgctgcacttttgtgcgatttttacagaatgcctagacaagtgttcaacgctcaaaagaaggcacaatcttctattaac

SEQ ID NO: 655 - DNA, 4807 bp, synthetic construct
  source 1..4807: mol_type = other DNA
accaacctcagcgacattatcgagaaggaaaccggcaagcaactcgtgatccaggagagcatactgatgctccccgaggaggtcgaggaggtgattggcaataagcccgagtccgatatactggttcatactgcgtatgacgaaagcacagacgagaacgtcatgctacttaccagcgacgccccggagtacaagccctgggccctagtcatccaagacagcaacggtgagaacaagatcaagatgctttcaggcggaagtggtggaagtggcggtagtcgcaccgagaaggagaacaaggagctggagaacctggagatcaacctccgcaaggaaatcgccaaagcgttcaagggcaatgaagggtacaagagcctcttcaagaaagacatcatcgaaactatcctcccagagtttctcgatgacaaggacgagatcgcgctggtgaactcctttaacgggttcacaaccgcgtttaccggcttctttgataacagggaaaatatgttctccgaggaggccaagtccaccagcatcgccttcaggtgtatcaacgagaacctcacccgctacatttccaatatggacattttcgagaaggtggatgcgatcttcgataagcacgaggtgcaggagatcaaagagaagattctcaattccgattatgacgtcgaggatttcttcgaaggggagttctttaattttgtgctcacacaagagggcattgacgtgtacaacgcgattatcgggggcttcgtcacagagtccggggagaagattaaggggctgaatgagtacatcaatctgtacaatcagaagaccaagcagaaactgccgaaattcaagccgctctacaagcaagtcctgtccgatagggaaagcctctccttctacggcgagggctataccagcgacgaggaggtgctggaagtcttccgcaacacactgaataagaatagcgagattttctcctccatcaagaagctcgagaagctctttaagaactttgacgagtacagctccgccgggattttcgtgaagaacgggccggcgatcagcaccatctccaaggacatctttggcgagtggaacgtcatcagggacaagtggaacgccgagtacgacgacatccacctgaagaagaaggcggtggtgaccgagaagtatgaggacgatcgcaggaagtccttcaaaaaaatcggctccttcagcctcgaacagctccaggagtatgccgatgcggatctgtccgtcgtcgagaagctgaaggaaatcatcattcagaaggtcgacgagatctataaagtgtacgggtccagcgagaagctgttcgacgccgactttgtgctcgagaagtccctcaaaaagaatgacgccgtggtggccattatgaaagacctgctcgactccgtgaagtccttcgaaaattacattaaagcgttctttggggaggggaaggaaactaacagggatgagtccttctatggcgactttgtcctcgcgtacgacatcctgctgaaggtcgaccacatttacgacgcgatccgcaactacgtgacacagaagccgtactccaaagacaagttcaagctgtacttccagaacccgcaatttatggggggctgggacaaggataaagagacagactaccgcgcgacaattctccgctatggctccaaatactatctggccatcatggacaagaagtacgcgaagtgcctgcagaagatcgacaaagacgacgtcaatggcaactatgaaaagatcaactacaagctgctgccgggcccgaacaagatgctcccgaaggtgttcttcagcaagaagtggatggcctactacaatccaagcgaggatattcagaaaatctataaaaacgggaccttcaagaagggggacatgtttaacctcaacgactgccacaagctcattgatttcttcaaggatagcatttcccgctacccgaaatggtccaatgcgtacgattttaacttctccgagacagaaaagtacaaagacatcgcgggcttttacagggaggtggaggagcaagggtataaagtttcttttgaatccgcgagcaagaaggaagtcgacaagctcgtcgaggagggcaagctctacatgttccaaatttataacaaggacttttccgacaagagccatgggaccccaaacctccacaccatgtacttcaaactgctctttgacgagaacaaccacgggcaaatcaggctgagcggcggcgccgaattattcatgcgcagggcctccctcaagaaggaagagctggtcgtccatccagccaattccccgatcgcgaacaagaacccggacaatccgaaaaagaccaccaccctgtcctacgacgtctacaaggacaaacgcttcagcgaagaccagtacgaattacacatcccaattgcgattaataagtgcccaaagaatatcttcaaaattaatacagaggtcagggtgctgctcaaacacgacgacaatccgtatgtcatcggcattgccaggggcgagcgcaatctgctctatatcgtggtcgtggatgggaagggcaatattgtggagcagtactccctgaacgagattatcaacaacttcaatgggattaggattaagaccgactatcacagcctgctcgacaagaaagaaaaagagaggtttgaggcccgccaaaactggacctccattgagaatatcaaagaattaaaggccggctatatttcccaagtcgtccacaagatctgcgagctggtggagaaatatgacgccgtgattgcgctcgaagacttaaattctgggttcaagaactcccgcgtgaaggtggaaaaacaggtgtatcagaaattcgagaaaatgctgatcgacaaactcaattatatggtggataagaagtccaacccgtgtgccacagggggcgcgctgaagggctatcagatcaccaacaagttcgagagcttcaagagcatgagcacccagaacgggtttattttctacatcccggcgtggctcacctccaagattgacccgagcaccggcttcgtgaacctcctgaagacaaagtatacctccattgccgacagcaagaagtttatctcctccttcgaccgcattatgtatgtgccggaggaggacctcttcgagttcgccctcgactacaaaaacttcagccgcacagatgcggattacatcaagaagtggaagctgtactcctacgggaacaggatccgcatcttcaggaatccaaaaaaaaataacgtctttgactgggaggaagtgtgcctgacatccgcctacaaggaactgttcaataaatacggcatcaattaccagcagggcgacattcgcgccctcctctgtgagcagtccgacaaagcgttttactccagcttcatggccctcatgtccctgatgctccaaatgaggaatagcatcacagggcgcaccgacgtcgacttcctcatcagcccggtgaagaactccgacgggatcttttacgactcccgcaactatgaggcgcaagagaatgcgatcctcccgaagaacgccgatgcgaacggggcctataatatcgccaggaaagtgctctgggccatcgggcagttcaaaaaggcggaggatgagaagctcgacaaggtgaaaattgccatttccaacaaggagtggctggagtacgcgcagacctccgtgaagcacggctcctctggcagctccggctctagcggctcctctggcagctccggctccaagctggagaagtttacaaactgttacagcctctccaaaaccctcaggtttaaagcgatcccggtgggcaagacccaggagaacatcgacaacaagaggctcctggtggaagacgagaagcgcgccgaagactacaagggcgtgaagaagctgctcgataggtactacctcagctttattaacgacgtgctgcacagcatcaaactcaagaatctcaacaactacatctccctcttccgcaaaaagacctctggtggttctagcggcagcgagactcccgggacctcagagtccgccacacccgaaagttctggtggttctgaggcctcccccgcatcaggacctagacacctgatggatccccatattttcacatctaacttcaacaacggaatcggcagacacaagacctacctgtgctatgaggtggaaaggctggataacggaacctctgtgaagatggaccagcacaggtaagtatcaaggttacaagacaggtttaaggagaccaatagaaactgggcttgtcgagacagagaagactcttgcgtttctgataggcacctattggtcttactgacatccactttgcctttctctccacaggggcttcctgcataaccaggccaagaatctgctgtgcggtttctacgggagacatgcagaactgaggtttctggatctggtgccatccctgcagctggaccccgctcagatctacagagtgacttggttcatctcttggagcccttgcttttcatggggatgtgctggcgaggtgagggccttccttcaggaaaacacacacgtgagactgaggatttttgctgccagaatctacgattatgacccactgtacaaggaagctctgcagatgctgagggatgcaggcgctcaggtgagcattatgacctatgacgaattcaagcactgctgggatacttttgtggaccatcagggttgtccttttcagccatgggatgggctggacgagcattctcaggcactgagcggtagactgagggctatcctgcagaaccaggggaat

SEQ ID NO: 656 - DNA, 4783 bp, synthetic construct
  source 1..4783: mol_type = other DNA
accaacctcagcgacattatcgagaaggaaaccggcaagcaactcgtgatccaggagagcatactgatgctccccgaggaggtcgaggaggtgattggcaataagcccgagtccgatatactggttcatactgcgtatgacgaaagcacagacgagaacgtcatgctacttaccagcgacgccccggagtacaagccctgggccctagtcatccaagacagcaacggtgagaacaagatcaagatgctttcaggcggaagtggtggaagtggcggtagtcgcaccgagaaggagaacaaggagctggagaacctggagatcaacctccgcaaggaaatcgccaaagcgttcaagggcaatgaagggtacaagagcctcttcaagaaagacatcatcgaaactatcctcccagagtttctcgatgacaaggacgagatcgcgctggtgaactcctttaacgggttcacaaccgcgtttaccggcttctttgataacagggaaaatatgttctccgaggaggccaagtccaccagcatcgccttcaggtgtatcaacgagaacctcacccgctacatttccaatatggacattttcgagaaggtggatgcgatcttcgataagcacgaggtgcaggagatcaaagagaagattctcaattccgattatgacgtcgaggatttcttcgaaggggagttctttaattttgtgctcacacaagagggcattgacgtgtacaacgcgattatcgggggcttcgtcacagagtccggggagaagattaaggggctgaatgagtacatcaatctgtacaatcagaagaccaagcagaaactgccgaaattcaagccgctctacaagcaagtcctgtccgatagggaaagcctctccttctacggcgagggctataccagcgacgaggaggtgctggaagtcttccgcaacacactgaataagaatagcgagattttctcctccatcaagaagctcgagaagctctttaagaactttgacgagtacagctccgccgggattttcgtgaagaacgggccggcgatcagcaccatctccaaggacatctttggcgagtggaacgtcatcagggacaagtggaacgccgagtacgacgacatccacctgaagaagaaggcggtggtgaccgagaagtatgaggacgatcgcaggaagtccttcaaaaaaatcggctccttcagcctcgaacagctccaggagtatgccgatgcggatctgtccgtcgtcgagaagctgaaggaaatcatcattcagaaggtcgacgagatctataaagtgtacgggtccagcgagaagctgttcgacgccgactttgtgctcgagaagtccctcaaaaagaatgacgccgtggtggccattatgaaagacctgctcgactccgtgaagtccttcgaaaattacattaaagcgttctttggggaggggaaggaaactaacagggatgagtccttctatggcgactttgtcctcgcgtacgacatcctgctgaaggtcgaccacatttacgacgcgatccgcaactacgtgacacagaagccgtactccaaagacaagttcaagctgtacttccagaacccgcaatttatggggggctgggacaaggataaagagacagactaccgcgcgacaattctccgctatggctccaaatactatctggccatcatggacaagaagtacgcgaagtgcctgcagaagatcgacaaagacgacgtcaatggcaactatgaaaagatcaactacaagctgctgccgggcccgaacaagatgctcccgaaggtgttcttcagcaagaagtggatggcctactacaatccaagcgaggatattcagaaaatctataaaaacgggaccttcaagaagggggacatgtttaacctcaacgactgccacaagctcattgatttcttcaaggatagcatttcccgctacccgaaatggtccaatgcgtacgattttaacttctccgagacagaaaagtacaaagacatcgcgggcttttacagggaggtggaggagcaagggtataaagtttcttttgaatccgcgagcaagaaggaagtcgacaagctcgtcgaggagggcaagctctacatgttccaaatttataacaaggacttttccgacaagagccatgggaccccaaacctccacaccatgtacttcaaactgctctttgacgagaacaaccacgggcaaatcaggctgagcggcggcgccgaattattcatgcgcagggcctccctcaagaaggaagagctggtcgtccatccagccaattccccgatcgcgaacaagaacccggacaatccgaaaaagaccaccaccctgtcctacgacgtctacaaggacaaacgcttcagcgaagaccagtacgaattacacatcccaattgcgattaataagtgcccaaagaatatcttcaaaattaatacagaggtcagggtgctgctcaaacacgacgacaatccgtatgtcatcggcattgccaggggcgagcgcaatctgctctatatcgtggtcgtggatgggaagggcaatattgtggagcagtactccctgaacgagattatcaacaacttcaatgggattaggattaagaccgactatcacagcctgctcgacaagaaagaaaaagagaggtttgaggcccgccaaaactggacctccattgagaatatcaaagaattaaaggccggctatatttcccaagtcgtccacaagatctgcgagctggtggagaaatatgacgccgtgattgcgctcgaagacttaaattctgggttcaagaactcccgcgtgaaggtggaaaaacaggtgtatcagaaattcgagaaaatgctgatcgacaaactcaattatatggtggataagaagtccaacccgtgtgccacagggggcgcgctgaagggctatcagatcaccaacaagttcgagagcttcaagagcatgagcacccagaacgggtttattttctacatcccggcgtggctcacctccaagattgacccgagcaccggcttcgtgaacctcctgaagacaaagtatacctccattgccgacagcaagaagtttatctcctccttcgaccgcattatgtatgtgccggaggaggacctcttcgagttcgccctcgactacaaaaacttcagccgcacagatgcggattacatcaagaagtggaagctgtactcctacgggaacaggatccgcatcttcaggaatccaaaaaaaaataacgtctttgactgggaggaagtgtgcctgacatccgcctacaaggaactgttcaataaatacggcatcaattaccagcagggcgacattcgcgccctcctctgtgagcagtccgacaaagcgttttactccagcttcatggccctcatgtccctgatgctccaaatgaggaatagcatcacagggcgcaccgacgtcgacttcctcatcagcccggtgaagaactccgacgggatcttttacgactcccgcaactatgaggcgcaagagaatgcgatcctcccgaagaacgccgatgcgaacggggcctataatatcgccaggaaagtgctctgggccatcgggcagttcaaaaaggcggaggatgagaagctcgacaaggtgaaaattgccatttccaacaaggagtggctggagtacgcgcagacctccgtgaagcacggctcctctggcagctccggctctagcggctcctctggcagctccggctccaagctggagaagtttacaaactgttacagcctctccaaaaccctcaggtttaaagcgatcccggtgggcaagacccaggagaacatcgacaacaagaggctcctggtggaagacgagaagcgcgccgaagactacaagggcgtgaagaagctgctcgataggtactacctcagctttattaacgacgtgctgcacagcatcaaactcaagaatctcaacaactacatctccctcttccgcaaaaagaccagcggcagcgagactcccgggacctcagagtccgccacacccgaaagtgaggcctcccccgcatcaggacctagacacctgatggatccccatattttcacatctaacttcaacaacggaatcggcagacacaagacctacctgtgctatgaggtggaaaggctggataacggaacctctgtgaagatggaccagcacaggtaagtatcaaggttacaagacaggtttaaggagaccaatagaaactgggcttgtcgagacagagaagactcttgcgtttctgataggcacctattggtcttactgacatccactttgcctttctctccacaggggcttcctgcataaccaggccaagaatctgctgtgcggtttctacgggagacatgcagaactgaggtttctggatctggtgccatccctgcagctggaccccgctcagatctacagagtgacttggttcatctcttggagcccttgcttttcatggggatgtgctggcgaggtgagggccttccttcaggaaaacacacacgtgagactgaggatttttgctgccagaatctacgattatgacccactgtacaaggaagctctgcagatgctgagggatgcaggcgctcaggtgagcattatgacctatgacgaattcaagcactgctgggatacttttgtggaccatcagggttgtccttttcagccatgggatgggctggacgagcattctcaggcactgagcggtagactgagggctatcctgcagaaccaggggaat

SEQ ID NO: 657 - DNA, 4771 bp, synthetic construct
  source 1..4771: mol_type = other DNA
accaacctcagcgacattatcgagaaggaaaccggcaagcaactcgtgatccaggagagcatactgatgctccccgaggaggtcgaggaggtgattggcaataagcccgagtccgatatactggttcatactgcgtatgacgaaagcacagacgagaacgtcatgctacttaccagcgacgccccggagtacaagccctgggccctagtcatccaagacagcaacggtgagaacaagatcaagatgctttcaggcggaagtggtggaagtggcggtagtcgcaccgagaaggagaacaaggagctggagaacctggagatcaacctccgcaaggaaatcgccaaagcgttcaagggcaatgaagggtacaagagcctcttcaagaaagacatcatcgaaactatcctcccagagtttctcgatgacaaggacgagatcgcgctggtgaactcctttaacgggttcacaaccgcgtttaccggcttctttgataacagggaaaatatgttctccgaggaggccaagtccaccagcatcgccttcaggtgtatcaacgagaacctcacccgctacatttccaatatggacattttcgagaaggtggatgcgatcttcgataagcacgaggtgcaggagatcaaagagaagattctcaattccgattatgacgtcgaggatttcttcgaaggggagttctttaattttgtgctcacacaagagggcattgacgtgtacaacgcgattatcgggggcttcgtcacagagtccggggagaagattaaggggctgaatgagtacatcaatctgtacaatcagaagaccaagcagaaactgccgaaattcaagccgctctacaagcaagtcctgtccgatagggaaagcctctccttctacggcgagggctataccagcgacgaggaggtgctggaagtcttccgcaacacactgaataagaatagcgagattttctcctccatcaagaagctcgagaagctctttaagaactttgacgagtacagctccgccgggattttcgtgaagaacgggccggcgatcagcaccatctccaaggacatctttggcgagtggaacgtcatcagggacaagtggaacgccgagtacgacgacatccacctgaagaagaaggcggtggtgaccgagaagtatgaggacgatcgcaggaagtccttcaaaaaaatcggctccttcagcctcgaacagctccaggagtatgccgatgcggatctgtccgtcgtcgagaagctgaaggaaatcatcattcagaaggtcgacgagatctataaagtgtacgggtccagcgagaagctgttcgacgccgactttgtgctcgagaagtccctcaaaaagaatgacgccgtggtggccattatgaaagacctgctcgactccgtgaagtccttcgaaaattacattaaagcgttctttggggaggggaaggaaactaacagggatgagtccttctatggcgactttgtcctcgcgtacgacatcctgctgaaggtcgaccacatttacgacgcgatccgcaactacgtgacacagaagccgtactccaaagacaagttcaagctgtacttccagaacccgcaatttatggggggctgggacaaggataaagagacagactaccgcgcgacaattctccgctatggctccaaatactatctggccatcatggacaagaagtacgcgaagtgcctgcagaagatcgacaaagacgacgtcaatggcaactatgaaaagatcaactacaagctgctgccgggcccgaacaagatgctcccgaaggtgttcttcagcaagaagtggatggcctactacaatccaagcgaggatattcagaaaatctataaaaacgggaccttcaagaagggggacatgtttaacctcaacgactgccacaagctcattgatttcttcaaggatagcatttcccgctacccgaaatggtccaatgcgtacgattttaacttctccgagacagaaaagtacaaagacatcgcgggcttttacagggaggtggaggagcaagggtataaagtttcttttgaatccgcgagcaagaaggaagtcgacaagctcgtcgaggagggcaagctctacatgttccaaatttataacaaggacttttccgacaagagccatgggaccccaaacctccacaccatgtacttcaaactgctctttgacgagaacaaccacgggcaaatcaggctgagcggcggcgccgaattattcatgcgcagggcctccctcaagaaggaagagctggtcgtccatccagccaattccccgatcgcgaacaagaacccggacaatccgaaaaagaccaccaccctgtcctacgacgtctacaaggacaaacgcttcagcgaagaccagtacgaattacacatcccaattgcgattaataagtgcccaaagaatatcttcaaaattaatacagaggtcagggtgctgctcaaacacgacgacaatccgtatgtcatcggcattgccaggggcgagcgcaatctgctctatatcgtggtcgtggatgggaagggcaatattgtggagcagtactccctgaacgagattatcaacaacttcaatgggattaggattaagaccgactatcacagcctgctcgacaagaaagaaaaagagaggtttgaggcccgccaaaactggacctccattgagaatatcaaagaattaaaggccggctatatttcccaagtcgtccacaagatctgcgagctggtggagaaatatgacgccgtgattgcgctcgaagacttaaattctgggttcaagaactcccgcgtgaaggtggaaaaacaggtgtatcagaaattcgagaaaatgctgatcgacaaactcaattatatggtggataagaagtccaacccgtgtgccacagggggcgcgctgaagggctatcagatcaccaacaagttcgagagcttcaagagcatgagcacccagaacgggtttattttctacatcccggcgtggctcacctccaagattgacccgagcaccggcttcgtgaacctcctgaagacaaagtatacctccattgccgacagcaagaagtttatctcctccttcgaccgcattatgtatgtgccggaggaggacctcttcgagttcgccctcgactacaaaaacttcagccgcacagatgcggattacatcaagaagtggaagctgtactcctacgggaacaggatccgcatcttcaggaatccaaaaaaaaataacgtctttgactgggaggaagtgtgcctgacatccgcctacaaggaactgttcaataaatacggcatcaattaccagcagggcgacattcgcgccctcctctgtgagcagtccgacaaagcgttttactccagcttcatggccctcatgtccctgatgctccaaatgaggaatagcatcacagggcgcaccgacgtcgacttcctcatcagcccggtgaagaactccgacgggatcttttacgactcccgcaactatgaggcgcaagagaatgcgatcctcccgaagaacgccgatgcgaacggggcctataatatcgccaggaaagtgctctgggccatcgggcagttcaaaaaggcggaggatgagaagctcgacaaggtgaaaattgccatttccaacaaggagtggctggagtacgcgcagacctccgtgaagcacggctcctctggcagctccggctctagcggctcctctggcagctccggctccaagctggagaagtttacaaactgttacagcctctccaaaaccctcaggtttaaagcgatcccggtgggcaagacccaggagaacatcgacaacaagaggctcctggtggaagacgagaagcgcgccgaagactacaagggcgtgaagaagctgctcgataggtactacctcagctttattaacgacgtgctgcacagcatcaaactcaagaatctcaacaactacatctccctcttccgcaaaaagacctctggtggttcttctggtggttcttctggtggttctgaggcctcccccgcatcaggacctagacacctgatggatccccatattttcacatctaacttcaacaacggaatcggcagacacaagacctacctgtgctatgaggtggaaaggctggataacggaacctctgtgaagatggaccagcacaggtaagtatcaaggttacaagacaggtttaaggagaccaatagaaactgggcttgtcgagacagagaagactcttgcgtttctgataggcacctattggtcttactgacatccactttgcctttctctccacaggggcttcctgcataaccaggccaagaatctgctgtgcggtttctacgggagacatgcagaactgaggtttctggatctggtgccatccctgcagctggaccccgctcagatctacagagtgacttggttcatctcttggagcccttgcttttcatggggatgtgctggcgaggtgagggccttccttcaggaaaacacacacgtgagactgaggatttttgctgccagaatctacgattatgacccactgtacaaggaagctctgcagatgctgagggatgcaggcgctcaggtgagcattatgacctatgacgaattcaagcactgctgggatacttttgtggaccatcagggttgtccttttcagccatgggatgggctggacgagcattctcaggcactgagcggtagactgagggctatcctgcagaaccaggggaat

SEQ ID NO: 658 - DNA, 4759 bp, synthetic construct
  source 1..4759: mol_type = other DNA
accaacctcagcgacattatcgagaaggaaaccggcaagcaactcgtgatccaggagagcatactgatgctccccgaggaggtcgaggaggtgattggcaataagcccgagtccgatatactggttcatactgcgtatgacgaaagcacagacgagaacgtcatgctacttaccagcgacgccccggagtacaagccctgggccctagtcatccaagacagcaacggtgagaacaagatcaagatgctttcaggcggaagtggtggaagtggcggtagtcgcaccgagaaggagaacaaggagctggagaacctggagatcaacctccgcaaggaaatcgccaaagcgttcaagggcaatgaagggtacaagagcctcttcaagaaagacatcatcgaaactatcctcccagagtttctcgatgacaaggacgagatcgcgctggtgaactcctttaacgggttcacaaccgcgtttaccggcttctttgataacagggaaaatatgttctccgaggaggccaagtccaccagcatcgccttcaggtgtatcaacgagaacctcacccgctacatttccaatatggacattttcgagaaggtggatgcgatcttcgataagcacgaggtgcaggagatcaaagagaagattctcaattccgattatgacgtcgaggatttcttcgaaggggagttctttaattttgtgctcacacaagagggcattgacgtgtacaacgcgattatcgggggcttcgtcacagagtccggggagaagattaaggggctgaatgagtacatcaatctgtacaatcagaagaccaagcagaaactgccgaaattcaagccgctctacaagcaagtcctgtccgatagggaaagcctctccttctacggcgagggctataccagcgacgaggaggtgctggaagtcttccgcaacacactgaataagaatagcgagattttctcctccatcaagaagctcgagaagctctttaagaactttgacgagtacagctccgccgggattttcgtgaagaacgggccggcgatcagcaccatctccaaggacatctttggcgagtggaacgtcatcagggacaagtggaacgccgagtacgacgacatccacctgaagaagaaggcggtggtgaccgagaagtatgaggacgatcgcaggaagtccttcaaaaaaatcggctccttcagcctcgaacagctccaggagtatgccgatgcggatctgtccgtcgtcgagaagctgaaggaaatcatcattcagaaggtcgacgagatctataaagtgtacgggtccagcgagaagctgttcgacgccgactttgtgctcgagaagtccctcaaaaagaatgacgccgtggtggccattatgaaagacctgctcgactccgtgaagtccttcgaaaattacattaaagcgttctttggggaggggaaggaaactaacagggatgagtccttctatggcgactttgtcctcgcgtacgacatcctgctgaaggtcgaccacatttacgacgcgatccgcaactacgtgacacagaagccgtactccaaagacaagttcaagctgtacttccagaacccgcaatttatggggggctgggacaaggataaagagacagactaccgcgcgacaattctccgctatggctccaaatactatctggccatcatggacaagaagtacgcgaagtgcctgcagaagatcgacaaagacgacgtcaatggcaactatgaaaagatcaactacaagctgctgccgggcccgaacaagatgctcccgaaggtgttcttcagcaagaagtggatggcctactacaatccaagcgaggatattcagaaaatctataaaaacgggaccttcaagaagggggacatgtttaacctcaacgactgccacaagctcattgatttcttcaaggatagcatttcccgctacccgaaatggtccaatgcgtacgattttaacttctccgagacagaaaagtacaaagacatcgcgggcttttacagggaggtggaggagcaagggtataaagtttcttttgaatccgcgagcaagaaggaagtcgacaagctcgtcgaggagggcaagctctacatgttccaaatttataacaaggacttttccgacaagagccatgggaccccaaacctccacaccatgtacttcaaactgctctttgacgagaacaaccacgggcaaatcaggctgagcggcggcgccgaattattcatgcgcagggcctccctcaagaaggaagagctggtcgtccatccagccaattccccgatcgcgaacaagaacccggacaatccgaaaaagaccaccaccctgtcctacgacgtctacaaggacaaacgcttcagcgaagaccagtacgaattacacatcccaattgcgattaataagtgcccaaagaatatcttcaaaattaatacagaggtcagggtgctgctcaaacacgacgacaatccgtatgtcatcggcattgccaggggcgagcgcaatctgctctatatcgtggtcgtggatgggaagggcaatattgtggagcagtactccctgaacgagattatcaacaacttcaatgggattaggattaagaccgactatcacagcctgctcgacaagaaagaaaaagagaggtttgaggcccgccaaaactggacctccattgagaatatcaaagaattaaaggccggctatatttcccaagtcgtccacaagatctgcgagctggtggagaaatatgacgccgtgattgcgctcgaagacttaaattctgggttcaagaactcccgcgtgaaggtggaaaaacaggtgtatcagaaattcgagaaaatgctgatcgacaaactcaattatatggtggataagaagtccaacccgtgtgccacagggggcgcgctgaagggctatcagatcaccaacaagttcgagagcttcaagagcatgagcacccagaacgggtttattttctacatcccggcgtggctcacctccaagattgacccgagcaccggcttcgtgaacctcctgaagacaaagtatacctccattgccgacagcaagaagtttatctcctccttcgaccgcattatgtatgtgccggaggaggacctcttcgagttcgccctcgactacaaaaacttcagccgcacagatgcggattacatcaagaagtggaagctgtactcctacgggaacaggatccgcatcttcaggaatccaaaaaaaaataacgtctttgactgggaggaagtgtgcctgacatccgcctacaaggaactgttcaataaatacggcatcaattaccagcagggcgacattcgcgccctcctctgtgagcagtccgacaaagcgttttactccagcttcatggccctcatgtccctgatgctccaaatgaggaatagcatcacagggcgcaccgacgtcgacttcctcatcagcccggtgaagaactccgacgggatcttttacgactcccgcaactatgaggcgcaagagaatgcgatcctcccgaagaacgccgatgcgaacggggcctataatatcgccaggaaagtgctctgggccatcgggcagttcaaaaaggcggaggatgagaagctcgacaaggtgaaaattgccatttccaacaaggagtggctggagtacgcgcagacctccgtgaagcacggctcctctggcagctccggctctagcggctcctctggcagctccggctccaagctggagaagtttacaaactgttacagcctctccaaaaccctcaggtttaaagcgatcccggtgggcaagacccaggagaacatcgacaacaagaggctcctggtggaagacgagaagcgcgccgaagactacaagggcgtgaagaagctgctcgataggtactacctcagctttattaacgacgtgctgcacagcatcaaactcaagaatctcaacaactacatctccctcttccgcaaaaagacctctggtggttcttctggtggttctgaggcctcccccgcatcaggacctagacacctgatggatccccatattttcacatctaacttcaacaacggaatcggcagacacaagacctacctgtgctatgaggtggaaaggctggataacggaacctctgtgaagatggaccagcacaggtaagtatcaaggttacaagacaggtttaaggagaccaatagaaactgggcttgtcgagacagagaagactcttgcgtttctgataggcacctattggtcttactgacatccactttgcctttctctccacaggggcttcctgcataaccaggccaagaatctgctgtgcggtttctacgggagacatgcagaactgaggtttctggatctggtgccatccctgcagctggaccccgctcagatctacagagtgacttggttcatctcttggagcccttgcttttcatggggatgtgctggcgaggtgagggccttccttcaggaaaacacacacgtgagactgaggatttttgctgccagaatctacgattatgacccactgtacaaggaagctctgcagatgctgagggatgcaggcgctcaggtgagcattatgacctatgacgaattcaagcactgctgggatacttttgtggaccatcagggttgtccttttcagccatgggatgggctggacgagcattctcaggcactgagcggtagactgagggctatcctgcagaaccaggggaat

SEQ ID NO: 659 - DNA, 4753 bp, synthetic construct
  source 1..4753: mol_type = other DNA
accaacctcagcgacattatcgagaaggaaaccggcaagcaactcgtgatccaggagagcatactgatgctccccgaggaggtcgaggaggtgattggcaataagcccgagtccgatatactggttcatactgcgtatgacgaaagcacagacgagaacgtcatgctacttaccagcgacgccccggagtacaagccctgggccctagtcatccaagacagcaacggtgagaacaagatcaagatgctttcaggcggaagtggtggaagtggcggtagtcgcaccgagaaggagaacaaggagctggagaacctggagatcaacctccgcaaggaaatcgccaaagcgttcaagggcaatgaagggtacaagagcctcttcaagaaagacatcatcgaaactatcctcccagagtttctcgatgacaaggacgagatcgcgctggtgaactcctttaacgggttcacaaccgcgtttaccggcttctttgataacagggaaaatatgttctccgaggaggccaagtccaccagcatcgccttcaggtgtatcaacgagaacctcacccgctacatttccaatatggacattttcgagaaggtggatgcgatcttcgataagcacgaggtgcaggagatcaaagagaagattctcaattccgattatgacgtcgaggatttcttcgaaggggagttctttaattttgtgctcacacaagagggcattgacgtgtacaacgcgattatcgggggcttcgtcacagagtccggggagaagattaaggggctgaatgagtacatcaatctgtacaatcagaagaccaagcagaaactgccgaaattcaagccgctctacaagcaagtcctgtccgatagggaaagcctctccttctacggcgagggctataccagcgacgaggaggtgctggaagtcttccgcaacacactgaataagaatagcgagattttctcctccatcaagaagctcgagaagctctttaagaactttgacgagtacagctccgccgggattttcgtgaagaacgggccggcgatcagcaccatctccaaggacatctttggcgagtggaacgtcatcagggacaagtggaacgccgagtacgacgacatccacctgaagaagaaggcggtggtgaccgagaagtatgaggacgatcgcaggaagtccttcaaaaaaatcggctccttcagcctcgaacagctccaggagtatgccgatgcggatctgtccgtcgtcgagaagctgaaggaaatcatcattcagaaggtcgacgagatctataaagtgtacgggtccagcgagaagctgttcgacgccgactttgtgctcgagaagtccctcaaaaagaatgacgccgtggtggccattatgaaagacctgctcgactccgtgaagtccttcgaaaattacattaaagcgttctttggggaggggaaggaaactaacagggatgagtccttctatggcgactttgtcctcgcgtacgacatcctgctgaaggtcgaccacatttacgacgcgatccgcaactacgtgacacagaagccgtactccaaagacaagttcaagctgtacttccagaacccgcaatttatggggggctgggacaaggataaagagacagactaccgcgcgacaattctccgctatggctccaaatactatctggccatcatggacaagaagtacgcgaagtgcctgcagaagatcgacaaagacgacgtcaatggcaactatgaaaagatcaactacaagctgctgccgggcccgaacaagatgctcccgaaggtgttcttcagcaagaagtggatggcctactacaatccaagcgaggatattcagaaaatctataaaaacgggaccttcaagaagggggacatgtttaacctcaacgactgccacaagctcattgatttcttcaaggatagcatttcccgctacccgaaatggtccaatgcgtacgattttaacttctccgagacagaaaagtacaaagacatcgcgggcttttacagggaggtggaggagcaagggtataaagtttcttttgaatccgcgagcaagaaggaagtcgacaagctcgtcgaggagggcaagctctacatgttccaaatttataacaaggacttttccgacaagagccatgggaccccaaacctccacaccatgtacttcaaactgctctttgacgagaacaaccacgggcaaatcaggctgagcggcggcgccgaattattcatgcgcagggcctccctcaagaaggaagagctggtcgtccatccagccaattccccgatcgcgaacaagaacccggacaatccgaaaaagaccaccaccctgtcctacgacgtctacaaggacaaacgcttcagcgaagaccagtacgaattacacatcccaattgcgattaataagtgcccaaagaatatcttcaaaattaatacagaggtcagggtgctgctcaaacacgacgacaatccgtatgtcatcggcattgccaggggcgagcgcaatctgctctatatcgtggtcgtggatgggaagggcaatattgtggagcagtactccctgaacgagattatcaacaacttcaatgggattaggattaagaccgactatcacagcctgctcgacaagaaagaaaaagagaggtttgaggcccgccaaaactggacctccattgagaatatcaaagaattaaaggccggctatatttcccaagtcgtccacaagatctgcgagctggtggagaaatatgacgccgtgattgcgctcgaagacttaaattctgggttcaagaactcccgcgtgaaggtggaaaaacaggtgtatcagaaattcgagaaaatgctgatcgacaaactcaattatatggtggataagaagtccaacccgtgtgccacagggggcgcgctgaagggctatcagatcaccaacaagttcgagagcttcaagagcatgagcacccagaacgggtttattttctacatcccggcgtggctcacctccaagattgacccgagcaccggcttcgtgaacctcctgaagacaaagtatacctccattgccgacagcaagaagtttatctcctccttcgaccgcattatgtatgtgccggaggaggacctcttcgagttcgccctcgactacaaaaacttcagccgcacagatgcggattacatcaagaagtggaagctgtactcctacgggaacaggatccgcatcttcaggaatccaaaaaaaaataacgtctttgactgggaggaagtgtgcctgacatccgcctacaaggaactgttcaataaatacggcatcaattaccagcagggcgacattcgcgccctcctctgtgagcagtccgacaaagcgttttactccagcttcatggccctcatgtccctgatgctccaaatgaggaatagcatcacagggcgcaccgacgtcgacttcctcatcagcccggtgaagaactccgacgggatcttttacgactcccgcaactatgaggcgcaagagaatgcgatcctcccgaagaacgccgatgcgaacggggcctataatatcgccaggaaagtgctctgggccatcgggcagttcaaaaaggcggaggatgagaagctcgacaaggtgaaaattgccatttccaacaaggagtggctggagtacgcgcagacctccgtgaagcacggctcctctggcagctccggctctagcggctcctctggcagctccggctccaagctggagaagtttacaaactgttacagcctctccaaaaccctcaggtttaaagcgatcccggtgggcaagacccaggagaacatcgacaacaagaggctcctggtggaagacgagaagcgcgccgaagactacaagggcgtgaagaagctgctcgataggtactacctcagctttattaacgacgtgctgcacagcatcaaactcaagaatctcaacaactacatctccctcttccgcaaaaagacctctggttcttctggttctgaggcctcccccgcatcaggacctagacacctgatggatccccatattttcacatctaacttcaacaacggaatcggcagacacaagacctacctgtgctatgaggtggaaaggctggataacggaacctctgtgaagatggaccagcacaggtaagtatcaaggttacaagacaggtttaaggagaccaatagaaactgggcttgtcgagacagagaagactcttgcgtttctgataggcacctattggtcttactgacatccactttgcctttctctccacaggggcttcctgcataaccaggccaagaatctgctgtgcggtttctacgggagacatgcagaactgaggtttctggatctggtgccatccctgcagctggaccccgctcagatctacagagtgacttggttcatctcttggagcccttgcttttcatggggatgtgctggcgaggtgagggccttccttcaggaaaacacacacgtgagactgaggatttttgctgccagaatctacgattatgacccactgtacaaggaagctctgcagatgctgagggatgcaggcgctcaggtgagcattatgacctatgacgaattcaagcactgctgggatacttttgtggaccatcagggttgtccttttcagccatgggatgggctggacgagcattctcaggcactgagcggtagactgagggctatcctgcagaaccaggggaat

SEQ ID NO: 660 - DNA, 4783 bp, synthetic construct
  source 1..4783: mol_type = other DNA
gaggcctcccccgcatcaggacctagacacctgatggatccccatattttcacatctaacttcaacaacggaatcggcagacacaagacctacctgtgctatgaggtggaaaggctggataacggaacctctgtgaagatggaccagcacaggtaagtatcaaggttacaagacaggtttaaggagaccaatagaaactgggcttgtcgagacagagaagactcttgcgtttctgataggcacctattggtcttactgacatccactttgcctttctctccacaggggcttcctgcataaccaggccaagaatctgctgtgcggtttctacgggagacatgcagaactgaggtttctggatctggtgccatccctgcagctggaccccgctcagatctacagagtgacttggttcatctcttggagcccttgcttttcatggggatgtgctggcgaggtgagggccttccttcaggaaaacacacacgtgagactgaggatttttgctgccagaatctacgattatgacccactgtacaaggaagctctgcagatgctgagggatgcaggcgctcaggtgagcattatgacctatgacgaattcaagcactgctgggatacttttgtggaccatcagggttgtccttttcagccatgggatgggctggacgagcattctcaggcactgagcggtagactgagggctatcctgcagaaccaggggaatagcggcagcgagactcccgggacctcagagtccgccacacccgaaagtaaagacaagttcaagctgtacttccagaacccgcaatttatggggggctgggacaaggataaagagacagactaccgcgcgacaattctccgctatggctccaaatactatctggccatcatggacaagaagtacgcgaagtgcctgcagaagatcgacaaagacgacgtcaatggcaactatgaaaagatcaactacaagctgctgccgggcccgaacaagatgctcccgaaggtgttcttcagcaagaagtggatggcctactacaatccaagcgaggatattcagaaaatctataaaaacgggaccttcaagaagggggacatgtttaacctcaacgactgccacaagctcattgatttcttcaaggatagcatttcccgctacccgaaatggtccaatgcgtacgattttaacttctccgagacagaaaagtacaaagacatcgcgggcttttacagggaggtggaggagcaagggtataaagtttcttttgaatccgcgagcaagaaggaagtcgacaagctcgtcgaggagggcaagctctacatgttccaaatttataacaaggacttttccgacaagagccatgggaccccaaacctccacaccatgtacttcaaactgctctttgacgagaacaaccacgggcaaatcaggctgagcggcggcgccgaattattcatgcgcagggcctccctcaagaaggaagagctggtcgtccatccagccaattccccgatcgcgaacaagaacccggacaatccgaaaaagaccaccaccctgtcctacgacgtctacaaggacaaacgcttcagcgaagaccagtacgaattacacatcccaattgcgattaataagtgcccaaagaatatcttcaaaattaatacagaggtcagggtgctgctcaaacacgacgacaatccgtatgtcatcggcattgccaggggcgagcgcaatctgctctatatcgtggtcgtggatgggaagggcaatattgtggagcagtactccctgaacgagattatcaacaacttcaatgggattaggattaagaccgactatcacagcctgctcgacaagaaagaaaaagagaggtttgaggcccgccaaaactggacctccattgagaatatcaaagaattaaaggccggctatatttcccaagtcgtccacaagatctgcgagctggtggagaaatatgacgccgtgattgcgctcgaagacttaaattctgggttcaagaactcccgcgtgaaggtggaaaaacaggtgtatcagaaattcgagaaaatgctgatcgacaaactcaattatatggtggataagaagtccaacccgtgtgccacagggggcgcgctgaagggctatcagatcaccaacaagttcgagagcttcaagagcatgagcacccagaacgggtttattttctacatcccggcgtggctcacctccaagattgacccgagcaccggcttcgtgaacctcctgaagacaaagtatacctccattgccgacagcaagaagtttatctcctccttcgaccgcattatgtatgtgccggaggaggacctcttcgagttcgccctcgactacaaaaacttcagccgcacagatgcggattacatcaagaagtggaagctgtactcctacgggaacaggatccgcatcttcaggaatccaaaaaaaaataacgtctttgactgggaggaagtgtgcctgacatccgcctacaaggaactgttcaataaatacggcatcaattaccagcagggcgacattcgcgccctcctctgtgagcagtccgacaaagcgttttactccagcttcatggccctcatgtccctgatgctccaaatgaggaatagcatcacagggcgcaccgacgtcgacttcctcatcagcccggtgaagaactccgacgggatcttttacgactcccgcaactatgaggcgcaagagaatgcgatcctcccgaagaacgccgatgcgaacggggcctataatatcgccaggaaagtgctctgggccatcgggcagttcaaaaaggcggaggatgagaagctcgacaaggtgaaaattgccatttccaacaaggagtggctggagtacgcgcagacctccgtgaagcacggctcctctggcagctccggctctagcggctcctctggcagctccggctccaagctggagaagtttacaaactgttacagcctctccaaaaccctcaggtttaaagcgatcccggtgggcaagacccaggagaacatcgacaacaagaggctcctggtggaagacgagaagcgcgccgaagactacaagggcgtgaagaagctgctcgataggtactacctcagctttattaacgacgtgctgcacagcatcaaactcaagaatctcaacaactacatctccctcttccgcaaaaagacccgcaccgagaaggagaacaaggagctggagaacctggagatcaacctccgcaaggaaatcgccaaagcgttcaagggcaatgaagggtacaagagcctcttcaagaaagacatcatcgaaactatcctcccagagtttctcgatgacaaggacgagatcgcgctggtgaactcctttaacgggttcacaaccgcgtttaccggcttctttgataacagggaaaatatgttctccgaggaggccaagtccaccagcatcgccttcaggtgtatcaacgagaacctcacccgctacatttccaatatggacattttcgagaaggtggatgcgatcttcgataagcacgaggtgcaggagatcaaagagaagattctcaattccgattatgacgtcgaggatttcttcgaaggggagttctttaattttgtgctcacacaagagggcattgacgtgtacaacgcgattatcgggggcttcgtcacagagtccggggagaagattaaggggctgaatgagtacatcaatctgtacaatcagaagaccaagcagaaactgccgaaattcaagccgctctacaagcaagtcctgtccgatagggaaagcctctccttctacggcgagggctataccagcgacgaggaggtgctggaagtcttccgcaacacactgaataagaatagcgagattttctcctccatcaagaagctcgagaagctctttaagaactttgacgagtacagctccgccgggattttcgtgaagaacgggccggcgatcagcaccatctccaaggacatctttggcgagtggaacgtcatcagggacaagtggaacgccgagtacgacgacatccacctgaagaagaaggcggtggtgaccgagaagtatgaggacgatcgcaggaagtccttcaaaaaaatcggctccttcagcctcgaacagctccaggagtatgccgatgcggatctgtccgtcgtcgagaagctgaaggaaatcatcattcagaaggtcgacgagatctataaagtgtacgggtccagcgagaagctgttcgacgccgactttgtgctcgagaagtccctcaaaaagaatgacgccgtggtggccattatgaaagacctgctcgactccgtgaagtccttcgaaaattacattaaagcgttctttggggaggggaaggaaactaacagggatgagtccttctatggcgactttgtcctcgcgtacgacatcctgctgaaggtcgaccacatttacgacgcgatccgcaactacgtgacacagaagccgtactcctcaggcggaagtggtggaagtggcggtagtaccaacctcagcgacattatcgagaaggaaaccggcaagcaactcgtgatccaggagagcatactgatgctccccgaggaggtcgaggaggtgattggcaataagcccgagtccgatatactggttcatactgcgtatgacgaaagcacagacgagaacgtcatgctacttaccagcgacgccccggagtacaagccctgggccctagtcatccaagacagcaacggtgagaacaagatcaagatgctt

SEQ ID NO: 661 - DNA, 4771 bp, synthetic construct
  source 1..4771: mol_type = other DNA
gaggcctcccccgcatcaggacctagacacctgatggatccccatattttcacatctaacttcaacaacggaatcggcagacacaagacctacctgtgctatgaggtggaaaggctggataacggaacctctgtgaagatggaccagcacaggtaagtatcaaggttacaagacaggtttaaggagaccaatagaaactgggcttgtcgagacagagaagactcttgcgtttctgataggcacctattggtcttactgacatccactttgcctttctctccacaggggcttcctgcataaccaggccaagaatctgctgtgcggtttctacgggagacatgcagaactgaggtttctggatctggtgccatccctgcagctggaccccgctcagatctacagagtgacttggttcatctcttggagcccttgcttttcatggggatgtgctggcgaggtgagggccttccttcaggaaaacacacacgtgagactgaggatttttgctgccagaatctacgattatgacccactgtacaaggaagctctgcagatgctgagggatgcaggcgctcaggtgagcattatgacctatgacgaattcaagcactgctgggatacttttgtggaccatcagggttgtccttttcagccatgggatgggctggacgagcattctcaggcactgagcggtagactgagggctatcctgcagaaccaggggaattctggtggttcttctggtggttcttctggtggttctaaagacaagttcaagctgtacttccagaacccgcaatttatggggggctgggacaaggataaagagacagactaccgcgcgacaattctccgctatggctccaaatactatctggccatcatggacaagaagtacgcgaagtgcctgcagaagatcgacaaagacgacgtcaatggcaactatgaaaagatcaactacaagctgctgccgggcccgaacaagatgctcccgaaggtgttcttcagcaagaagtggatggcctactacaatccaagcgaggatattcagaaaatctataaaaacgggaccttcaagaagggggacatgtttaacctcaacgactgccacaagctcattgatttcttcaaggatagcatttcccgctacccgaaatggtccaatgcgtacgattttaacttctccgagacagaaaagtacaaagacatcgcgggcttttacagggaggtggaggagcaagggtataaagtttcttttgaatccgcgagcaagaaggaagtcgacaagctcgtcgaggagggcaagctctacatgttccaaatttataacaaggacttttccgacaagagccatgggaccccaaacctccacaccatgtacttcaaactgctctttgacgagaacaaccacgggcaaatcaggctgagcggcggcgccgaattattcatgcgcagggcctccctcaagaaggaagagctggtcgtccatccagccaattccccgatcgcgaacaagaacccggacaatccgaaaaagaccaccaccctgtcctacgacgtctacaaggacaaacgcttcagcgaagaccagtacgaattacacatcccaattgcgattaataagtgcccaaagaatatcttcaaaattaatacagaggtcagggtgctgctcaaacacgacgacaatccgtatgtcatcggcattgccaggggcgagcgcaatctgctctatatcgtggtcgtggatgggaagggcaatattgtggagcagtactccctgaacgagattatcaacaacttcaatgggattaggattaagaccgactatcacagcctgctcgacaagaaagaaaaagagaggtttgaggcccgccaaaactggacctccattgagaatatcaaagaattaaaggccggctatatttcccaagtcgtccacaagatctgcgagctggtggagaaatatgacgccgtgattgcgctcgaagacttaaattctgggttcaagaactcccgcgtgaaggtggaaaaacaggtgtatcagaaattcgagaaaatgctgatcgacaaactcaattatatggtggataagaagtccaacccgtgtgccacagggggcgcgctgaagggctatcagatcaccaacaagttcgagagcttcaagagcatgagcacccagaacgggtttattttctacatcccggcgtggctcacctccaagattgacccgagcaccggcttcgtgaacctcctgaagacaaagtatacctccattgccgacagcaagaagtttatctcctccttcgaccgcattatgtatgtgccggaggaggacctcttcgagttcgccctcgactacaaaaacttcagccgcacagatgcggattacatcaagaagtggaagctgtactcctacgggaacaggatccgcatcttcaggaatccaaaaaaaaataacgtctttgactgggaggaagtgtgcctgacatccgcctacaaggaactgttcaataaatacggcatcaattaccagcagggcgacattcgcgccctcctctgtgagcagtccgacaaagcgttttactccagcttcatggccctcatgtccctgatgctccaaatgaggaatagcatcacagggcgcaccgacgtcgacttcctcatcagcccggtgaagaactccgacgggatcttttacgactcccgcaactatgaggcgcaagagaatgcgatcctcccgaagaacgccgatgcgaacggggcctataatatcgccaggaaagtgctctgggccatcgggcagttcaaaaaggcggaggatgagaagctcgacaaggtgaaaattgccatttccaacaaggagtggctggagtacgcgcagacctccgtgaagcacggctcctctggcagctccggctctagcggctcctctggcagctccggctccaagctggagaagtttacaaactgttacagcctctccaaaaccctcaggtttaaagcgatcccggtgggcaagacccaggagaacatcgacaacaagaggctcctggtggaagacgagaagcgcgccgaagactacaagggcgtgaagaagctgctcgataggtactacctcagctttattaacgacgtgctgcacagcatcaaactcaagaatctcaacaactacatctccctcttccgcaaaaagacccgcaccgagaaggagaacaaggagctggagaacctggagatcaacctccgcaaggaaatcgccaaagcgttcaagggcaatgaagggtacaagagcctcttcaagaaagacatcatcgaaactatcctcccagagtttctcgatgacaaggacgagatcgcgctggtgaactcctttaacgggttcacaaccgcgtttaccggcttctttgataacagggaaaatatgttctccgaggaggccaagtccaccagcatcgccttcaggtgtatcaacgagaacctcacccgctacatttccaatatggacattttcgagaaggtggatgcgatcttcgataagcacgaggtgcaggagatcaaagagaagattctcaattccgattatgacgtcgaggatttcttcgaaggggagttctttaattttgtgctcacacaagagggcattgacgtgtacaacgcgattatcgggggcttcgtcacagagtccggggagaagattaaggggctgaatgagtacatcaatctgtacaatcagaagaccaagcagaaactgccgaaattcaagccgctctacaagcaagtcctgtccgatagggaaagcctctccttctacggcgagggctataccagcgacgaggaggtgctggaagtcttccgcaacacactgaataagaatagcgagattttctcctccatcaagaagctcgagaagctctttaagaactttgacgagtacagctccgccgggattttcgtgaagaacgggccggcgatcagcaccatctccaaggacatctttggcgagtggaacgtcatcagggacaagtggaacgccgagtacgacgacatccacctgaagaagaaggcggtggtgaccgagaagtatgaggacgatcgcaggaagtccttcaaaaaaatcggctccttcagcctcgaacagctccaggagtatgccgatgcggatctgtccgtcgtcgagaagctgaaggaaatcatcattcagaaggtcgacgagatctataaagtgtacgggtccagcgagaagctgttcgacgccgactttgtgctcgagaagtccctcaaaaagaatgacgccgtggtggccattatgaaagacctgctcgactccgtgaagtccttcgaaaattacattaaagcgttctttggggaggggaaggaaactaacagggatgagtccttctatggcgactttgtcctcgcgtacgacatcctgctgaaggtcgaccacatttacgacgcgatccgcaactacgtgacacagaagccgtactcctcaggcggaagtggtggaagtggcggtagtaccaacctcagcgacattatcgagaaggaaaccggcaagcaactcgtgatccaggagagcatactgatgctccccgaggaggtcgaggaggtgattggcaataagcccgagtccgatatactggttcatactgcgtatgacgaaagcacagacgagaacgtcatgctacttaccagcgacgccccggagtacaagccctgggccctagtcatccaagacagcaacggtgagaacaagatcaagatgctt

SEQ ID NO: 662 - DNA, 4759 bp, synthetic construct
  source 1..4759: mol_type = other DNA
gaggcctcccccgcatcaggacctagacacctgatggatccccatattttcacatctaacttcaacaacggaatcggcagacacaagacctacctgtgctatgaggtggaaaggctggataacggaacctctgtgaagatggaccagcacaggtaagtatcaaggttacaagacaggtttaaggagaccaatagaaactgggcttgtcgagacagagaagactcttgcgtttctgataggcacctattggtcttactgacatccactttgcctttctctccacaggggcttcctgcataaccaggccaagaatctgctgtgcggtttctacgggagacatgcagaactgaggtttctggatctggtgccatccctgcagctggaccccgctcagatctacagagtgacttggttcatctcttggagcccttgcttttcatggggatgtgctggcgaggtgagggccttccttcaggaaaacacacacgtgagactgaggatttttgctgccagaatctacgattatgacccactgtacaaggaagctctgcagatgctgagggatgcaggcgctcaggtgagcattatgacctatgacgaattcaagcactgctgggatacttttgtggaccatcagggttgtccttttcagccatgggatgggctggacgagcattctcaggcactgagcggtagactgagggctatcctgcagaaccaggggaattctggtggttcttctggtggttctaaagacaagttcaagctgtacttccagaacccgcaatttatggggggctgggacaaggataaagagacagactaccgcgcgacaattctccgctatggctccaaatactatctggccatcatggacaagaagtacgcgaagtgcctgcagaagatcgacaaagacgacgtcaatggcaactatgaaaagatcaactacaagctgctgccgggcccgaacaagatgctcccgaaggtgttcttcagcaagaagtggatggcctactacaatccaagcgaggatattcagaaaatctataaaaacgggaccttcaagaagggggacatgtttaacctcaacgactgccacaagctcattgatttcttcaaggatagcatttcccgctacccgaaatggtccaatgcgtacgattttaacttctccgagacagaaaagtacaaagacatcgcgggcttttacagggaggtggaggagcaagggtataaagtttcttttgaatccgcgagcaagaaggaagtcgacaagctcgtcgaggagggcaagctctacatgttccaaatttataacaaggacttttccgacaagagccatgggaccccaaacctccacaccatgtacttcaaactgctctttgacgagaacaaccacgggcaaatcaggctgagcggcggcgccgaattattcatgcgcagggcctccctcaagaaggaagagctggtcgtccatccagccaattccccgatcgcgaacaagaacccggacaatccgaaaaagaccaccaccctgtcctacgacgtctacaaggacaaacgcttcagcgaagaccagtacgaattacacatcccaattgcgattaataagtgcccaaagaatatcttcaaaattaatacagaggtcagggtgctgctcaaacacgacgacaatccgtatgtcatcggcattgccaggggcgagcgcaatctgctctatatcgtggtcgtggatgggaagggcaatattgtggagcagtactccctgaacgagattatcaacaacttcaatgggattaggattaagaccgactatcacagcctgctcgacaagaaagaaaaagagaggtttgaggcccgccaaaactggacctccattgagaatatcaaagaattaaaggccggctatatttcccaagtcgtccacaagatctgcgagctggtggagaaatatgacgccgtgattgcgctcgaagacttaaattctgggttcaagaactcccgcgtgaaggtggaaaaacaggtgtatcagaaattcgagaaaatgctgatcgacaaactcaattatatggtggataagaagtccaacccgtgtgccacagggggcgcgctgaagggctatcagatcaccaacaagttcgagagcttcaagagcatgagcacccagaacgggtttattttctacatcccggcgtggctcacctccaagattgacccgagcaccggcttcgtgaacctcctgaagacaaagtatacctccattgccgacagcaagaagtttatctcctccttcgaccgcattatgtatgtgccggaggaggacctcttcgagttcgccctcgactacaaaaacttcagccgcacagatgcggattacatcaagaagtggaagctgtactcctacgggaacaggatccgcatcttcaggaatccaaaaaaaaataacgtctttgactgggaggaagtgtgcctgacatccgcctacaaggaactgttcaataaatacggcatcaattaccagcagggcgacattcgcgccctcctctgtgagcagtccgacaaagcgttttactccagcttcatggccctcatgtccctgatgctccaaatgaggaatagcatcacagggcgcaccgacgtcgacttcctcatcagcccggtgaagaactccgacgggatcttttacgactcccgcaactatgaggcgcaagagaatgcgatcctcccgaagaacgccgatgcgaacggggcctataatatcgccaggaaagtgctctgggccatcgggcagttcaaaaaggcggaggatgagaagctcgacaaggtgaaaattgccatttccaacaaggagtggctggagtacgcgcagacctccgtgaagcacggctcctctggcagctccggctctagcggctcctctggcagctccggctccaagctggagaagtttacaaactgttacagcctctccaaaaccctcaggtttaaagcgatcccggtgggcaagacccaggagaacatcgacaacaagaggctcctggtggaagacgagaagcgcgccgaagactacaagggcgtgaagaagctgctcgataggtactacctcagctttattaacgacgtgctgcacagcatcaaactcaagaatctcaacaactacatctccctcttccgcaaaaagacccgcaccgagaaggagaacaaggagctggagaacctggagatcaacctccgcaaggaaatcgccaaagcgttcaagggcaatgaagggtacaagagcctcttcaagaaagacatcatcgaaactatcctcccagagtttctcgatgacaaggacgagatcgcgctggtgaactcctttaacgggttcacaaccgcgtttaccggcttctttgataacagggaaaatatgttctccgaggaggccaagtccaccagcatcgccttcaggtgtatcaacgagaacctcacccgctacatttccaatatggacattttcgagaaggtggatgcgatcttcgataagcacgaggtgcaggagatcaaagagaagattctcaattccgattatgacgtcgaggatttcttcgaaggggagttctttaattttgtgctcacacaagagggcattgacgtgtacaacgcgattatcgggggcttcgtcacagagtccggggagaagattaaggggctgaatgagtacatcaatctgtacaatcagaagaccaagcagaaactgccgaaattcaagccgctctacaagcaagtcctgtccgatagggaaagcctctccttctacggcgagggctataccagcgacgaggaggtgctggaagtcttccgcaacacactgaataagaatagcgagattttctcctccatcaagaagctcgagaagctctttaagaactttgacgagtacagctccgccgggattttcgtgaagaacgggccggcgatcagcaccatctccaaggacatctttggcgagtggaacgtcatcagggacaagtggaacgccgagtacgacgacatccacctgaagaagaaggcggtggtgaccgagaagtatgaggacgatcgcaggaagtccttcaaaaaaatcggctccttcagcctcgaacagctccaggagtatgccgatgcggatctgtccgtcgtcgagaagctgaaggaaatcatcattcagaaggtcgacgagatctataaagtgtacgggtccagcgagaagctgttcgacgccgactttgtgctcgagaagtccctcaaaaagaatgacgccgtggtggccattatgaaagacctgctcgactccgtgaagtccttcgaaaattacattaaagcgttctttggggaggggaaggaaactaacagggatgagtccttctatggcgactttgtcctcgcgtacgacatcctgctgaaggtcgaccacatttacgacgcgatccgcaactacgtgacacagaagccgtactcctcaggcggaagtggtggaagtggcggtagtaccaacctcagcgacattatcgagaaggaaaccggcaagcaactcgtgatccaggagagcatactgatgctccccgaggaggtcgaggaggtgattggcaataagcccgagtccgatatactggttcatactgcgtatgacgaaagcacagacgagaacgtcatgctacttaccagcgacgccccggagtacaagccctgggccctagtcatccaagacagcaacggtgagaacaagatcaagatgctt

SEQ ID NO: 663 - DNA, 4753 bp, synthetic construct
  source 1..4753: mol_type = other DNA
gaggcctcccccgcatcaggacctagacacctgatggatccccatattttcacatctaacttcaacaacggaatcggcagacacaagacctacctgtgctatgaggtggaaaggctggataacggaacctctgtgaagatggaccagcacaggtaagtatcaaggttacaagacaggtttaaggagaccaatagaaactgggcttgtcgagacagagaagactcttgcgtttctgataggcacctattggtcttactgacatccactttgcctttctctccacaggggcttcctgcataaccaggccaagaatctgctgtgcggtttctacgggagacatgcagaactgaggtttctggatctggtgccatccctgcagctggaccccgctcagatctacagagtgacttggttcatctcttggagcccttgcttttcatggggatgtgctggcgaggtgagggccttccttcaggaaaacacacacgtgagactgaggatttttgctgccagaatctacgattatgacccactgtacaaggaagctctgcagatgctgagggatgcaggcgctcaggtgagcattatgacctatgacgaattcaagcactgctgggatacttttgtggaccatcagggttgtccttttcagccatgggatgggctggacgagcattctcaggcactgagcggtagactgagggctatcctgcagaaccaggggaattctggttcttctggttctaaagacaagttcaagctgtacttccagaacccgcaatttatggggggctgggacaaggataaagagacagactaccgcgcgacaattctccgctatggctccaaatactatctggccatcatggacaagaagtacgcgaagtgcctgcagaagatcgacaaagacgacgtcaatggcaactatgaaaagatcaactacaagctgctgccgggcccgaacaagatgctcccgaaggtgttcttcagcaagaagtggatggcctactacaatccaagcgaggatattcagaaaatctataaaaacgggaccttcaagaagggggacatgtttaacctcaacgactgccacaagctcattgatttcttcaaggatagcatttcccgctacccgaaatggtccaatgcgtacgattttaacttctccgagacagaaaagtacaaagacatcgcgggcttttacagggaggtggaggagcaagggtataaagtttcttttgaatccgcgagcaagaaggaagtcgacaagctcgtcgaggagggcaagctctacatgttccaaatttataacaaggacttttccgacaagagccatgggaccccaaacctccacaccatgtacttcaaactgctctttgacgagaacaaccacgggcaaatcaggctgagcggcggcgccgaattattcatgcgcagggcctccctcaagaaggaagagctggtcgtccatccagccaattccccgatcgcgaacaagaacccggacaatccgaaaaagaccaccaccctgtcctacgacgtctacaaggacaaacgcttcagcgaagaccagtacgaattacacatcccaattgcgattaataagtgcccaaagaatatcttcaaaattaatacagaggtcagggtgctgctcaaacacgacgacaatccgtatgtcatcggcattgccaggggcgagcgcaatctgctctatatcgtggtcgtggatgggaagggcaatattgtggagcagtactccctgaacgagattatcaacaacttcaatgggattaggattaagaccgactatcacagcctgctcgacaagaaagaaaaagagaggtttgaggcccgccaaaactggacctccattgagaatatcaaagaattaaaggccggctatatttcccaagtcgtccacaagatctgcgagctggtggagaaatatgacgccgtgattgcgctcgaagacttaaattctgggttcaagaactcccgcgtgaaggtggaaaaacaggtgtatcagaaattcgagaaaatgctgatcgacaaactcaattatatggtggataagaagtccaacccgtgtgccacagggggcgcgctgaagggctatcagatcaccaacaagttcgagagcttcaagagcatgagcacccagaacgggtttattttctacatcccggcgtggctcacctccaagattgacccgagcaccggcttcgtgaacctcctgaagacaaagtatacctccattgccgacagcaagaagtttatctcctccttcgaccgcattatgtatgtgccggaggaggacctcttcgagttcgccctcgactacaaaaacttcagccgcacagatgcggattacatcaagaagtggaagctgtactcctacgggaacaggatccgcatcttcaggaatccaaaaaaaaataacgtctttgactgggaggaagtgtgcctgacatccgcctacaaggaactgttcaataaatacggcatcaattaccagcagggcgacattcgcgccctcctctgtgagcagtccgacaaagcgttttactccagcttcatggccctcatgtccctgatgctccaaatgaggaatagcatcacagggcgcaccgacgtcgacttcctcatcagcccggtgaagaactccgacgggatcttttacgactcccgcaactatgaggcgcaagagaatgcgatcctcccgaagaacgccgatgcgaacggggcctataatatcgccaggaaagtgctctgggccatcgggcagttcaaaaaggcggaggatgagaagctcgacaaggtgaaaattgccatttccaacaaggagtggctggagtacgcgcagacctccgtgaagcacggctcctctggcagctccggctctagcggctcctctggcagctccggctccaagctggagaagtttacaaactgttacagcctctccaaaaccctcaggtttaaagcgatcccggtgggcaagacccaggagaacatcgacaacaagaggctcctggtggaagacgagaagcgcgccgaagactacaagggcgtgaagaagctgctcgataggtactacctcagctttattaacgacgtgctgcacagcatcaaactcaagaatctcaacaactacatctccctcttccgcaaaaagacccgcaccgagaaggagaacaaggagctggagaacctggagatcaacctccgcaaggaaatcgccaaagcgttcaagggcaatgaagggtacaagagcctcttcaagaaagacatcatcgaaactatcctcccagagtttctcgatgacaaggacgagatcgcgctggtgaactcctttaacgggttcacaaccgcgtttaccggcttctttgataacagggaaaatatgttctccgaggaggccaagtccaccagcatcgccttcaggtgtatcaacgagaacctcacccgctacatttccaatatggacattttcgagaaggtggatgcgatcttcgataagcacgaggtgcaggagatcaaagagaagattctcaattccgattatgacgtcgaggatttcttcgaaggggagttctttaattttgtgctcacacaagagggcattgacgtgtacaacgcgattatcgggggcttcgtcacagagtccggggagaagattaaggggctgaatgagtacatcaatctgtacaatcagaagaccaagcagaaactgccgaaattcaagccgctctacaagcaagtcctgtccgatagggaaagcctctccttctacggcgagggctataccagcgacgaggaggtgctggaagtcttccgcaacacactgaataagaatagcgagattttctcctccatcaagaagctcgagaagctctttaagaactttgacgagtacagctccgccgggattttcgtgaagaacgggccggcgatcagcaccatctccaaggacatctttggcgagtggaacgtcatcagggacaagtggaacgccgagtacgacgacatccacctgaagaagaaggcggtggtgaccgagaagtatgaggacgatcgcaggaagtccttcaaaaaaatcggctccttcagcctcgaacagctccaggagtatgccgatgcggatctgtccgtcgtcgagaagctgaaggaaatcatcattcagaaggtcgacgagatctataaagtgtacgggtccagcgagaagctgttcgacgccgactttgtgctcgagaagtccctcaaaaagaatgacgccgtggtggccattatgaaagacctgctcgactccgtgaagtccttcgaaaattacattaaagcgttctttggggaggggaaggaaactaacagggatgagtccttctatggcgactttgtcctcgcgtacgacatcctgctgaaggtcgaccacatttacgacgcgatccgcaactacgtgacacagaagccgtactcctcaggcggaagtggtggaagtggcggtagtaccaacctcagcgacattatcgagaaggaaaccggcaagcaactcgtgatccaggagagcatactgatgctccccgaggaggtcgaggaggtgattggcaataagcccgagtccgatatactggttcatactgcgtatgacgaaagcacagacgagaacgtcatgctacttaccagcgacgccccggagtacaagccctgggccctagtcatccaagacagcaacggtgagaacaagatcaagatgctt

SEQ ID NO: 664 - DNA, 4747 bp, synthetic construct
  source 1..4747: mol_type = other DNA
gaggcctcccccgcatcaggacctagacacctgatggatccccatattttcacatctaacttcaacaacggaatcggcagacacaagacctacctgtgctatgaggtggaaaggctggataacggaacctctgtgaagatggaccagcacaggtaagtatcaaggttacaagacaggtttaaggagaccaatagaaactgggcttgtcgagacagagaagactcttgcgtttctgataggcacctattggtcttactgacatccactttgcctttctctccacaggggcttcctgcataaccaggccaagaatctgctgtgcggtttctacgggagacatgcagaactgaggtttctggatctggtgccatccctgcagctggaccccgctcagatctacagagtgacttggttcatctcttggagcccttgcttttcatggggatgtgctggcgaggtgagggccttccttcaggaaaacacacacgtgagactgaggatttttgctgccagaatctacgattatgacccactgtacaaggaagctctgcagatgctgagggatgcaggcgctcaggtgagcattatgacctatgacgaattcaagcactgctgggatacttttgtggaccatcagggttgtccttttcagccatgggatgggctggacgagcattctcaggcactgagcggtagactgagggctatcctgcagaaccaggggaattctggtggttctaaagacaagttcaagctgtacttccagaacccgcaatttatggggggctgggacaaggataaagagacagactaccgcgcgacaattctccgctatggctccaaatactatctggccatcatggacaagaagtacgcgaagtgcctgcagaagatcgacaaagacgacgtcaatggcaactatgaaaagatcaactacaagctgctgccgggcccgaacaagatgctcccgaaggtgttcttcagcaagaagtggatggcctactacaatccaagcgaggatattcagaaaatctataaaaacgggaccttcaagaagggggacatgtttaacctcaacgactgccacaagctcattgatttcttcaaggatagcatttcccgctacccgaaatggtccaatgcgtacgattttaacttctccgagacagaaaagtacaaagacatcgcgggcttttacagggaggtggaggagcaagggtataaagtttcttttgaatccgcgagcaagaaggaagtcgacaagctcgtcgaggagggcaagctctacatgttccaaatttataacaaggacttttccgacaagagccatgggaccccaaacctccacaccatgtacttcaaactgctctttgacgagaacaaccacgggcaaatcaggctgagcggcggcgccgaattattcatgcgcagggcctccctcaagaaggaagagctggtcgtccatccagccaattccccgatcgcgaacaagaacccggacaatccgaaaaagaccaccaccctgtcctacgacgtctacaaggacaaacgcttcagcgaagaccagtacgaattacacatcccaattgcgattaataagtgcccaaagaatatcttcaaaattaatacagaggtcagggtgctgctcaaacacgacgacaatccgtatgtcatcggcattgccaggggcgagcgcaatctgctctatatcgtggtcgtggatgggaagggcaatattgtggagcagtactccctgaacgagattatcaacaacttcaatgggattaggattaagaccgactatcacagcctgctcgacaagaaagaaaaagagaggtttgaggcccgccaaaactggacctccattgagaatatcaaagaattaaaggccggctatatttcccaagtcgtccacaagatctgcgagctggtggagaaatatgacgccgtgattgcgctcgaagacttaaattctgggttcaagaactcccgcgtgaaggtggaaaaacaggtgtatcagaaattcgagaaaatgctgatcgacaaactcaattatatggtggataagaagtccaacccgtgtgccacagggggcgcgctgaagggctatcagatcaccaacaagttcgagagcttcaagagcatgagcacccagaacgggtttattttctacatcccggcgtggctcacctccaagattgacccgagcaccggcttcgtgaacctcctgaagacaaagtatacctccattgccgacagcaagaagtttatctcctccttcgaccgcattatgtatgtgccggaggaggacctcttcgagttcgccctcgactacaaaaacttcagccgcacagatgcggattacatcaagaagtggaagctgtactcctacgggaacaggatccgcatcttcaggaatccaaaaaaaaataacgtctttgactgggaggaagtgtgcctgacatccgcctacaaggaactgttcaataaatacggcatcaattaccagcagggcgacattcgcgccctcctctgtgagcagtccgacaaagcgttttactccagcttcatggccctcatgtccctgatgctccaaatgaggaatagcatcacagggcgcaccgacgtcgacttcctcatcagcccggtgaagaactccgacgggatcttttacgactcccgcaactatgaggcgcaagagaatgcgatcctcccgaagaacgccgatgcgaacggggcctataatatcgccaggaaagtgctctgggccatcgggcagttcaaaaaggcggaggatgagaagctcgacaaggtgaaaattgccatttccaacaaggagtggctggagtacgcgcagacctccgtgaagcacggctcctctggcagctccggctctagcggctcctctggcagctccggctccaagctggagaagtttacaaactgttacagcctctccaaaaccctcaggtttaaagcgatcccggtgggcaagacccaggagaacatcgacaacaagaggctcctggtggaagacgagaagcgcgccgaagactacaagggcgtgaagaagctgctcgataggtactacctcagctttattaacgacgtgctgcacagcatcaaactcaagaatctcaacaactacatctccctcttccgcaaaaagacccgcaccgagaaggagaacaaggagctggagaacctggagatcaacctccgcaaggaaatcgccaaagcgttcaagggcaatgaagggtacaagagcctcttcaagaaagacatcatcgaaactatcctcccagagtttctcgatgacaaggacgagatcgcgctggtgaactcctttaacgggttcacaaccgcgtttaccggcttctttgataacagggaaaatatgttctccgaggaggccaagtccaccagcatcgccttcaggtgtatcaacgagaacctcacccgctacatttccaatatggacattttcgagaaggtggatgcgatcttcgataagcacgaggtgcaggagatcaaagagaagattctcaattccgattatgacgtcgaggatttcttcgaaggggagttctttaattttgtgctcacacaagagggcattgacgtgtacaacgcgattatcgggggcttcgtcacagagtccggggagaagattaaggggctgaatgagtacatcaatctgtacaatcagaagaccaagcagaaactgccgaaattcaagccgctctacaagcaagtcctgtccgatagggaaagcctctccttctacggcgagggctataccagcgacgaggaggtgctggaagtcttccgcaacacactgaataagaatagcgagattttctcctccatcaagaagctcgagaagctctttaagaactttgacgagtacagctccgccgggattttcgtgaagaacgggccggcgatcagcaccatctccaaggacatctttggcgagtggaacgtcatcagggacaagtggaacgccgagtacgacgacatccacctgaagaagaaggcggtggtgaccgagaagtatgaggacgatcgcaggaagtccttcaaaaaaatcggctccttcagcctcgaacagctccaggagtatgccgatgcggatctgtccgtcgtcgagaagctgaaggaaatcatcattcagaaggtcgacgagatctataaagtgtacgggtccagcgagaagctgttcgacgccgactttgtgctcgagaagtccctcaaaaagaatgacgccgtggtggccattatgaaagacctgctcgactccgtgaagtccttcgaaaattacattaaagcgttctttggggaggggaaggaaactaacagggatgagtccttctatggcgactttgtcctcgcgtacgacatcctgctgaaggtcgaccacatttacgacgcgatccgcaactacgtgacacagaagccgtactcctcaggcggaagtggtggaagtggcggtagtaccaacctcagcgacattatcgagaaggaaaccggcaagcaactcgtgatccaggagagcatactgatgctccccgaggaggtcgaggaggtgattggcaataagcccgagtccgatatactggttcatactgcgtatgacgaaagcacagacgagaacgtcatgctacttaccagcgacgccccggagtacaagccctgggccctagtcatccaagacagcaacggtgagaacaagatcaagatgctt

SEQ ID NO: 665 - DNA, 4783 bp, synthetic construct
  source 1..4783: mol_type = other DNA
gaggcctcccccgcatcaggacctagacacctgatggatccccatattttcacatctaacttcaacaacggaatcggcagacacaagacctacctgtgctatgaggtggaaaggctggataacggaacctctgtgaagatggaccagcacaggtaagtatcaaggttacaagacaggtttaaggagaccaatagaaactgggcttgtcgagacagagaagactcttgcgtttctgataggcacctattggtcttactgacatccactttgcctttctctccacaggggcttcctgcataaccaggccaagaatctgctgtgcggtttctacgggagacatgcagaactgaggtttctggatctggtgccatccctgcagctggaccccgctcagatctacagagtgacttggttcatctcttggagcccttgcttttcatggggatgtgctggcgaggtgagggccttccttcaggaaaacacacacgtgagactgaggatttttgctgccagaatctacgattatgacccactgtacaaggaagctctgcagatgctgagggatgcaggcgctcaggtgagcattatgacctatgacgaattcaagcactgctgggatacttttgtggaccatcagggttgtccttttcagccatgggatgggctggacgagcattctcaggcactgagcggtagactgagggctatcctgcagaaccaggggaatagcggcagcgagactcccgggacctcagagtccgccacacccgaaagtaaagacaagttcaagctgtacttccagaacccgcaatttatggggggctgggacaaggataaagagacagactaccgcgcgacaattctccgctatggctccaaatactatctggccatcatggacaagaagtacgcgaagtgcctgcagaagatcgacaaagacgacgtcaatggcaactatgaaaagatcaactacaagctgctgccgggcccgaacaagatgctcccgaaggtgttcttcagcaagaagtggatggcctactacaatccaagcgaggatattcagaaaatctataaaaacgggaccttcaagaagggggacatgtttaacctcaacgactgccacaagctcattgatttcttcaaggatagcatttcccgctacccgaaatggtccaatgcgtacgattttaacttctccgagacagaaaagtacaaagacatcgcgggcttttacagggaggtggaggagcaagggtataaagtttcttttgaatccgcgagcaagaaggaagtcgacaagctcgtcgaggagggcaagctctacatgttccaaatttataacaaggacttttccgacaagagccatgggaccccaaacctccacaccatgtacttcaaactgctctttgacgagaacaaccacgggcaaatcaggctgagcggcggcgccgaattattcatgcgcagggcctccctcaagaaggaagagctggtcgtccatccagccaattccccgatcgcgaacaagaacccggacaatccgaaaaagaccaccaccctgtcctacgacgtctacaaggacaaacgcttcagcgaagaccagtacgaattacacatcccaattgcgattaataagtgcccaaagaatatcttcaaaattaatacagaggtcagggtgctgctcaaacacgacgacaatccgtatgtcatcggcattgacaggggcgagcgcaatctgctctatatcgtggtcgtggatgggaagggcaatattgtggagcagtactccctgaacgagattatcaacaacttcaatgggattaggattaagaccgactatcacagcctgctcgacaagaaagaaaaagagaggtttgaggcccgccaaaactggacctccattgagaatatcaaagaattaaaggccggctatatttcccaagtcgtccacaagatctgcgagctggtggagaaatatgacgccgtgattgcgctcgaagacttaaattctgggttcaagaactcccgcgtgaaggtggaaaaacaggtgtatcagaaattcgagaaaatgctgatcgacaaactcaattatatggtggataagaagtccaacccgtgtgccacagggggcgcgctgaagggctatcagatcaccaacaagttcgagagcttcaagagcatgagcacccagaacgggtttattttctacatcccggcgtggctcacctccaagattgacccgagcaccggcttcgtgaacctcctgaagacaaagtatacctccattgccgacagcaagaagtttatctcctccttcgaccgcattatgtatgtgccggaggaggacctcttcgagttcgccctcgactacaaaaacttcagccgcacagatgcggattacatcaagaagtggaagctgtactcctacgggaacaggatccgcatcttcaggaatccaaaaaaaaataacgtctttgactgggaggaagtgtgcctgacatccgcctacaaggaactgttcaataaatacggcatcaattaccagcagggcgacattcgcgccctcctctgtgagcagtccgacaaagcgttttactccagcttcatggccctcatgtccctgatgctccaaatggccaatagcatcacagggcgcaccgacgtcgacttcctcatcagcccggtgaagaactccgacgggatcttttacgactcccgcaactatgaggcgcaagagaatgcgatcctcccgaagaacgccgatgcgaacggggcctataatatcgccaggaaagtgctctgggccatcgggcagttcaaaaaggcggaggatgagaagctcgacaaggtgaaaattgccatttccaacaaggagtggctggagtacgcgcagacctccgtgaagcacggctcctctggcagctccggctctagcggctcctctggcagctccggctccaagctggagaagtttacaaactgttacagcctctccaaaaccctcaggtttaaagcgatcccggtgggcaagacccaggagaacatcgacaacaagaggctcctggtggaagacgagaagcgcgccgaagactacaagggcgtgaagaagctgctcgataggtactacctcagctttattaacgacgtgctgcacagcatcaaactcaagaatctcaacaactacatctccctcttccgcaaaaagacccgcaccgagaaggagaacaaggagctggagaacctggagatcaacctccgcaaggaaatcgccaaagcgttcaagggcaatgaagggtacaagagcctcttcaagaaagacatcatcgaaactatcctcccagagtttctcgatgacaaggacgagatcgcgctggtgaactcctttaacgggttcacaaccgcgtttaccggcttctttgataacagggaaaatatgttctccgaggaggccaagtccaccagcatcgccttcaggtgtatcaacgagaacctcacccgctacatttccaatatggacattttcgagaaggtggatgcgatcttcgataagcacgaggtgcaggagatcaaagagaagattctcaattccgattatgacgtcgaggatttcttcgaaggggagttctttaattttgtgctcacacaagagggcattgacgtgtacaacgcgattatcgggggcttcgtcacagagtccggggagaagattaaggggctgaatgagtacatcaatctgtacaatcagaagaccaagcagaaactgccgaaattcaagccgctctacaagcaagtcctgtccgatagggaaagcctctccttctacggcgagggctataccagcgacgaggaggtgctggaagtcttccgcaacacactgaataagaatagcgagattttctcctccatcaagaagctcgagaagctctttaagaactttgacgagtacagctccgccgggattttcgtgaagaacgggccggcgatcagcaccatctccaaggacatctttggcgagtggaacgtcatcagggacaagtggaacgccgagtacgacgacatccacctgaagaagaaggcggtggtgaccgagaagtatgaggacgatcgcaggaagtccttcaaaaaaatcggctccttcagcctcgaacagctccaggagtatgccgatgcggatctgtccgtcgtcgagaagctgaaggaaatcatcattcagaaggtcgacgagatctataaagtgtacgggtccagcgagaagctgttcgacgccgactttgtgctcgagaagtccctcaaaaagaatgacgccgtggtggccattatgaaagacctgctcgactccgtgaagtccttcgaaaattacattaaagcgttctttggggaggggaaggaaactaacagggatgagtccttctatggcgactttgtcctcgcgtacgacatcctgctgaaggtcgaccacatttacgacgcgatccgcaactacgtgacacagaagccgtactcctcaggcggaagtggtggaagtggcggtagtaccaacctcagcgacattatcgagaaggaaaccggcaagcaactcgtgatccaggagagcatactgatgctccccgaggaggtcgaggaggtgattggcaataagcccgagtccgatatactggttcatactgcgtatgacgaaagcacagacgagaacgtcatgctacttaccagcgacgccccggagtacaagccctgggccctagtcatccaagacagcaacggtgagaacaagatcaagatgctt

SEQ ID NO: 666 - DNA, 4771 bp, synthetic construct
  source 1..4771: mol_type = other DNA
gaggcctcccccgcatcaggacctagacacctgatggatccccatattttcacatctaacttcaacaacggaatcggcagacacaagacctacctgtgctatgaggtggaaaggctggataacggaacctctgtgaagatggaccagcacaggtaagtatcaaggttacaagacaggtttaaggagaccaatagaaactgggcttgtcgagacagagaagactcttgcgtttctgataggcacctattggtcttactgacatccactttgcctttctctccacaggggcttcctgcataaccaggccaagaatctgctgtgcggtttctacgggagacatgcagaactgaggtttctggatctggtgccatccctgcagctggaccccgctcagatctacagagtgacttggttcatctcttggagcccttgcttttcatggggatgtgctggcgaggtgagggccttccttcaggaaaacacacacgtgagactgaggatttttgctgccagaatctacgattatgacccactgtacaaggaagctctgcagatgctgagggatgcaggcgctcaggtgagcattatgacctatgacgaattcaagcactgctgggatacttttgtggaccatcagggttgtccttttcagccatgggatgggctggacgagcattctcaggcactgagcggtagactgagggctatcctgcagaaccaggggaattctggtggttcttctggtggttcttctggtggttctaaagacaagttcaagctgtacttccagaacccgcaatttatggggggctgggacaaggataaagagacagactaccgcgcgacaattctccgctatggctccaaatactatctggccatcatggacaagaagtacgcgaagtgcctgcagaagatcgacaaagacgacgtcaatggcaactatgaaaagatcaactacaagctgctgccgggcccgaacaagatgctcccgaaggtgttcttcagcaagaagtggatggcctactacaatccaagcgaggatattcagaaaatctataaaaacgggaccttcaagaagggggacatgtttaacctcaacgactgccacaagctcattgatttcttcaaggatagcatttcccgctacccgaaatggtccaatgcgtacgattttaacttctccgagacagaaaagtacaaagacatcgcgggcttttacagggaggtggaggagcaagggtataaagtttcttttgaatccgcgagcaagaaggaagtcgacaagctcgtcgaggagggcaagctctacatgttccaaatttataacaaggacttttccgacaagagccatgggaccccaaacctccacaccatgtacttcaaactgctctttgacgagaacaaccacgggcaaatcaggctgagcggcggcgccgaattattcatgcgcagggcctccctcaagaaggaagagctggtcgtccatccagccaattccccgatcgcgaacaagaacccggacaatccgaaaaagaccaccaccctgtcctacgacgtctacaaggacaaacgcttcagcgaagaccagtacgaattacacatcccaattgcgattaataagtgcccaaagaatatcttcaaaattaatacagaggtcagggtgctgctcaaacacgacgacaatccgtatgtcatcggcattgacaggggcgagcgcaatctgctctatatcgtggtcgtggatgggaagggcaatattgtggagcagtactccctgaacgagattatcaacaacttcaatgggattaggattaagaccgactatcacagcctgctcgacaagaaagaaaaagagaggtttgaggcccgccaaaactggacctccattgagaatatcaaagaattaaaggccggctatatttcccaagtcgtccacaagatctgcgagctggtggagaaatatgacgccgtgattgcgctcgaagacttaaattctgggttcaagaactcccgcgtgaaggtggaaaaacaggtgtatcagaaattcgagaaaatgctgatcgacaaactcaattatatggtggataagaagtccaacccgtgtgccacagggggcgcgctgaagggctatcagatcaccaacaagttcgagagcttcaagagcatgagcacccagaacgggtttattttctacatcccggcgtggctcacctccaagattgacccgagcaccggcttcgtgaacctcctgaagacaaagtatacctccattgccgacagcaagaagtttatctcctccttcgaccgcattatgtatgtgccggaggaggacctcttcgagttcgccctcgactacaaaaacttcagccgcacagatgcggattacatcaagaagtggaagctgtactcctacgggaacaggatccgcatcttcaggaatccaaaaaaaaataacgtctttgactgggaggaagtgtgcctgacatccgcctacaaggaactgttcaataaatacggcatcaattaccagcagggcgacattcgcgccctcctctgtgagcagtccgacaaagcgttttactccagcttcatggccctcatgtccctgatgctccaaatggccaatagcatcacagggcgcaccgacgtcgacttcctcatcagcccggtgaagaactccgacgggatcttttacgactcccgcaactatgaggcgcaagagaatgcgatcctcccgaagaacgccgatgcgaacggggcctataatatcgccaggaaagtgctctgggccatcgggcagttcaaaaaggcggaggatgagaagctcgacaaggtgaaaattgccatttccaacaaggagtggctggagtacgcgcagacctccgtgaagcacggctcctctggcagctccggctctagcggctcctctggcagctccggctccaagctggagaagtttacaaactgttacagcctctccaaaaccctcaggtttaaagcgatcccggtgggcaagacccaggagaacatcgacaacaagaggctcctggtggaagacgagaagcgcgccgaagactacaagggcgtgaagaagctgctcgataggtactacctcagctttattaacgacgtgctgcacagcatcaaactcaagaatctcaacaactacatctccctcttccgcaaaaagacccgcaccgagaaggagaacaaggagctggagaacctggagatcaacctccgcaaggaaatcgccaaagcgttcaagggcaatgaagggtacaagagcctcttcaagaaagacatcatcgaaactatcctcccagagtttctcgatgacaaggacgagatcgcgctggtgaactcctttaacgggttcacaaccgcgtttaccggcttctttgataacagggaaaatatgttctccgaggaggccaagtccaccagcatcgccttcaggtgtatcaacgagaacctcacccgctacatttccaatatggacattttcgagaaggtggatgcgatcttcgataagcacgaggtgcaggagatcaaagagaagattctcaattccgattatgacgtcgaggatttcttcgaaggggagttctttaattttgtgctcacacaagagggcattgacgtgtacaacgcgattatcgggggcttcgtcacagagtccggggagaagattaaggggctgaatgagtacatcaatctgtacaatcagaagaccaagcagaaactgccgaaattcaagccgctctacaagcaagtcctgtccgatagggaaagcctctccttctacggcgagggctataccagcgacgaggaggtgctggaagtcttccgcaacacactgaataagaatagcgagattttctcctccatcaagaagctcgagaagctctttaagaactttgacgagtacagctccgccgggattttcgtgaagaacgggccggcgatcagcaccatctccaaggacatctttggcgagtggaacgtcatcagggacaagtggaacgccgagtacgacgacatccacctgaagaagaaggcggtggtgaccgagaagtatgaggacgatcgcaggaagtccttcaaaaaaatcggctccttcagcctcgaacagctccaggagtatgccgatgcggatctgtccgtcgtcgagaagctgaaggaaatcatcattcagaaggtcgacgagatctataaagtgtacgggtccagcgagaagctgttcgacgccgactttgtgctcgagaagtccctcaaaaagaatgacgccgtggtggccattatgaaagacctgctcgactccgtgaagtccttcgaaaattacattaaagcgttctttggggaggggaaggaaactaacagggatgagtccttctatggcgactttgtcctcgcgtacgacatcctgctgaaggtcgaccacatttacgacgcgatccgcaactacgtgacacagaagccgtactcctcaggcggaagtggtggaagtggcggtagtaccaacctcagcgacattatcgagaaggaaaccggcaagcaactcgtgatccaggagagcatactgatgctccccgaggaggtcgaggaggtgattggcaataagcccgagtccgatatactggttcatactgcgtatgacgaaagcacagacgagaacgtcatgctacttaccagcgacgccccggagtacaagccctgggccctagtcatccaagacagcaacggtgagaacaagatcaagatgctt

SEQ ID NO: 667 - DNA, 4759 bp, synthetic construct
  source 1..4759: mol_type = other DNA
gaggcctcccccgcatcaggacctagacacctgatggatccccatattttcacatctaacttcaacaacggaatcggcagacacaagacctacctgtgctatgaggtggaaaggctggataacggaacctctgtgaagatggaccagcacaggtaagtatcaaggttacaagacaggtttaaggagaccaatagaaactgggcttgtcgagacagagaagactcttgcgtttctgataggcacctattggtcttactgacatccactttgcctttctctccacaggggcttcctgcataaccaggccaagaatctgctgtgcggtttctacgggagacatgcagaactgaggtttctggatctggtgccatccctgcagctggaccccgctcagatctacagagtgacttggttcatctcttggagcccttgcttttcatggggatgtgctggcgaggtgagggccttccttcaggaaaacacacacgtgagactgaggatttttgctgccagaatctacgattatgacccactgtacaaggaagctctgcagatgctgagggatgcaggcgctcaggtgagcattatgacctatgacgaattcaagcactgctgggatacttttgtggaccatcagggttgtccttttcagccatgggatgggctggacgagcattctcaggcactgagcggtagactgagggctatcctgcagaaccaggggaattctggtggttcttctggtggttctaaagacaagttcaagctgtacttccagaacccgcaatttatggggggctgggacaaggataaagagacagactaccgcgcgacaattctccgctatggctccaaatactatctggccatcatggacaagaagtacgcgaagtgcctgcagaagatcgacaaagacgacgtcaatggcaactatgaaaagatcaactacaagctgctgccgggcccgaacaagatgctcccgaaggtgttcttcagcaagaagtggatggcctactacaatccaagcgaggatattcagaaaatctataaaaacgggaccttcaagaagggggacatgtttaacctcaacgactgccacaagctcattgatttcttcaaggatagcatttcccgctacccgaaatggtccaatgcgtacgattttaacttctccgagacagaaaagtacaaagacatcgcgggcttttacagggaggtggaggagcaagggtataaagtttcttttgaatccgcgagcaagaaggaagtcgacaagctcgtcgaggagggcaagctctacatgttccaaatttataacaaggacttttccgacaagagccatgggaccccaaacctccacaccatgtacttcaaactgctctttgacgagaacaaccacgggcaaatcaggctgagcggcggcgccgaattattcatgcgcagggcctccctcaagaaggaagagctggtcgtccatccagccaattccccgatcgcgaacaagaacccggacaatccgaaaaagaccaccaccctgtcctacgacgtctacaaggacaaacgcttcagcgaagaccagtacgaattacacatcccaattgcgattaataagtgcccaaagaatatcttcaaaattaatacagaggtcagggtgctgctcaaacacgacgacaatccgtatgtcatcggcattgacaggggcgagcgcaatctgctctatatcgtggtcgtggatgggaagggcaatattgtggagcagtactccctgaacgagattatcaacaacttcaatgggattaggattaagaccgactatcacagcctgctcgacaagaaagaaaaagagaggtttgaggcccgccaaaactggacctccattgagaatatcaaagaattaaaggccggctatatttcccaagtcgtccacaagatctgcgagctggtggagaaatatgacgccgtgattgcgctcgaagacttaaattctgggttcaagaactcccgcgtgaaggtggaaaaacaggtgtatcagaaattcgagaaaatgctgatcgacaaactcaattatatggtggataagaagtccaacccgtgtgccacagggggcgcgctgaagggctatcagatcaccaacaagttcgagagcttcaagagcatgagcacccagaacgggtttattttctacatcccggcgtggctcacctccaagattgacccgagcaccggcttcgtgaacctcctgaagacaaagtatacctccattgccgacagcaagaagtttatctcctccttcgaccgcattatgtatgtgccggaggaggacctcttcgagttcgccctcgactacaaaaacttcagccgcacagatgcggattacatcaagaagtggaagctgtactcctacgggaacaggatccgcatcttcaggaatccaaaaaaaaataacgtctttgactgggaggaagtgtgcctgacatccgcctacaaggaactgttcaataaatacggcatcaattaccagcagggcgacattcgcgccctcctctgtgagcagtccgacaaagcgttttactccagcttcatggccctcatgtccctgatgctccaaatggccaatagcatcacagggcgcaccgacgtcgacttcctcatcagcccggtgaagaactccgacgggatcttttacgactcccgcaactatgaggcgcaagagaatgcgatcctcccgaagaacgccgatgcgaacggggcctataatatcgccaggaaagtgctctgggccatcgggcagttcaaaaaggcggaggatgagaagctcgacaaggtgaaaattgccatttccaacaaggagtggctggagtacgcgcagacctccgtgaagcacggctcctctggcagctccggctctagcggctcctctggcagctccggctccaagctggagaagtttacaaactgttacagcctctccaaaaccctcaggtttaaagcgatcccggtgggcaagacccaggagaacatcgacaacaagaggctcctggtggaagacgagaagcgcgccgaagactacaagggcgtgaagaagctgctcgataggtactacctcagctttattaacgacgtgctgcacagcatcaaactcaagaatctcaacaactacatctccctcttccgcaaaaagacccgcaccgagaaggagaacaaggagctggagaacctggagatcaacctccgcaaggaaatcgccaaagcgttcaagggcaatgaagggtacaagagcctcttcaagaaagacatcatcgaaactatcctcccagagtttctcgatgacaaggacgagatcgcgctggtgaactcctttaacgggttcacaaccgcgtttaccggcttctttgataacagggaaaatatgttctccgaggaggccaagtccaccagcatcgccttcaggtgtatcaacgagaacctcacccgctacatttccaatatggacattttcgagaaggtggatgcgatcttcgataagcacgaggtgcaggagatcaaagagaagattctcaattccgattatgacgtcgaggatttcttcgaaggggagttctttaattttgtgctcacacaagagggcattgacgtgtacaacgcgattatcgggggcttcgtcacagagtccggggagaagattaaggggctgaatgagtacatcaatctgtacaatcagaagaccaagcagaaactgccgaaattcaagccgctctacaagcaagtcctgtccgatagggaaagcctctccttctacggcgagggctataccagcgacgaggaggtgctggaagtcttccgcaacacactgaataagaatagcgagattttctcctccatcaagaagctcgagaagctctttaagaactttgacgagtacagctccgccgggattttcgtgaagaacgggccggcgatcagcaccatctccaaggacatctttggcgagtggaacgtcatcagggacaagtggaacgccgagtacgacgacatccacctgaagaagaaggcggtggtgaccgagaagtatgaggacgatcgcaggaagtccttcaaaaaaatcggctccttcagcctcgaacagctccaggagtatgccgatgcggatctgtccgtcgtcgagaagctgaaggaaatcatcattcagaaggtcgacgagatctataaagtgtacgggtccagcgagaagctgttcgacgccgactttgtgctcgagaagtccctcaaaaagaatgacgccgtggtggccattatgaaagacctgctcgactccgtgaagtccttcgaaaattacattaaagcgttctttggggaggggaaggaaactaacagggatgagtccttctatggcgactttgtcctcgcgtacgacatcctgctgaaggtcgaccacatttacgacgcgatccgcaactacgtgacacagaagccgtactcctcaggcggaagtggtggaagtggcggtagtaccaacctcagcgacattatcgagaaggaaaccggcaagcaactcgtgatccaggagagcatactgatgctccccgaggaggtcgaggaggtgattggcaataagcccgagtccgatatactggttcatactgcgtatgacgaaagcacagacgagaacgtcatgctacttaccagcgacgccccggagtacaagccctgggccctagtcatccaagacagcaacggtgagaacaagatcaagatgctt

SEQ ID NO: 668 - DNA, 4753 bp, synthetic construct
  source 1..4753: mol_type = other DNA
gaggcctcccccgcatcaggacctagacacctgatggatccccatattttcacatctaacttcaacaacggaatcggcagacacaagacctacctgtgctatgaggtggaaaggctggataacggaacctctgtgaagatggaccagcacaggtaagtatcaaggttacaagacaggtttaaggagaccaatagaaactgggcttgtcgagacagagaagactcttgcgtttctgataggcacctattggtcttactgacatccactttgcctttctctccacaggggcttcctgcataaccaggccaagaatctgctgtgcggtttctacgggagacatgcagaactgaggtttctggatctggtgccatccctgcagctggaccccgctcagatctacagagtgacttggttcatctcttggagcccttgcttttcatggggatgtgctggcgaggtgagggccttccttcaggaaaacacacacgtgagactgaggatttttgctgccagaatctacgattatgacccactgtacaaggaagctctgcagatgctgagggatgcaggcgctcaggtgagcattatgacctatgacgaattcaagcactgctgggatacttttgtggaccatcagggttgtccttttcagccatgggatgggctggacgagcattctcaggcactgagcggtagactgagggctatcctgcagaaccaggggaattctggttcttctggttctaaagacaagttcaagctgtacttccagaacccgcaatttatggggggctgggacaaggataaagagacagactaccgcgcgacaattctccgctatggctccaaatactatctggccatcatggacaagaagtacgcgaagtgcctgcagaagatcgacaaagacgacgtcaatggcaactatgaaaagatcaactacaagctgctgccgggcccgaacaagatgctcccgaaggtgttcttcagcaagaagtggatggcctactacaatccaagcgaggatattcagaaaatctataaaaacgggaccttcaagaagggggacatgtttaacctcaacgactgccacaagctcattgatttcttcaaggatagcatttcccgctacccgaaatggtccaatgcgtacgattttaacttctccgagacagaaaagtacaaagacatcgcgggcttttacagggaggtggaggagcaagggtataaagtttcttttgaatccgcgagcaagaaggaagtcgacaagctcgtcgaggagggcaagctctacatgttccaaatttataacaaggacttttccgacaagagccatgggaccccaaacctccacaccatgtacttcaaactgctctttgacgagaacaaccacgggcaaatcaggctgagcggcggcgccgaattattcatgcgcagggcctccctcaagaaggaagagctggtcgtccatccagccaattccccgatcgcgaacaagaacccggacaatccgaaaaagaccaccaccctgtcctacgacgtctacaaggacaaacgcttcagcgaagaccagtacgaattacacatcccaattgcgattaataagtgcccaaagaatatcttcaaaattaatacagaggtcagggtgctgctcaaacacgacgacaatccgtatgtcatcggcattgacaggggcgagcgcaatctgctctatatcgtggtcgtggatgggaagggcaatattgtggagcagtactccctgaacgagattatcaacaacttcaatgggattaggattaagaccgactatcacagcctgctcgacaagaaagaaaaagagaggtttgaggcccgccaaaactggacctccattgagaatatcaaagaattaaaggccggctatatttcccaagtcgtccacaagatctgcgagctggtggagaaatatgacgccgtgattgcgctcgaagacttaaattctgggttcaagaactcccgcgtgaaggtggaaaaacaggtgtatcagaaattcgagaaaatgctgatcgacaaactcaattatatggtggataagaagtccaacccgtgtgccacagggggcgcgctgaagggctatcagatcaccaacaagttcgagagcttcaagagcatgagcacccagaacgggtttattttctacatcccggcgtggctcacctccaagattgacccgagcaccggcttcgtgaacctcctgaagacaaagtatacctccattgccgacagcaagaagtttatctcctccttcgaccgcattatgtatgtgccggaggaggacctcttcgagttcgccctcgactacaaaaacttcagccgcacagatgcggattacatcaagaagtggaagctgtactcctacgggaacaggatccgcatcttcaggaatccaaaaaaaaataacgtctttgactgggaggaagtgtgcctgacatccgcctacaaggaactgttcaataaatacggcatcaattaccagcagggcgacattcgcgccctcctctgtgagcagtccgacaaagcgttttactccagcttcatggccctcatgtccctgatgctccaaatggccaatagcatcacagggcgcaccgacgtcgacttcctcatcagcccggtgaagaactccgacgggatcttttacgactcccgcaactatgaggcgcaagagaatgcgatcctcccgaagaacgccgatgcgaacggggcctataatatcgccaggaaagtgctctgggccatcgggcagttcaaaaaggcggaggatgagaagctcgacaaggtgaaaattgccatttccaacaaggagtggctggagtacgcgcagacctccgtgaagcacggctcctctggcagctccggctctagcggctcctctggcagctccggctccaagctggagaagtttacaaactgttacagcctctccaaaaccctcaggtttaaagcgatcccggtgggcaagacccaggagaacatcgacaacaagaggctcctggtggaagacgagaagcgcgccgaagactacaagggcgtgaagaagctgctcgataggtactacctcagctttattaacgacgtgctgcacagcatcaaactcaagaatctcaacaactacatctccctcttccgcaaaaagacccgcaccgagaaggagaacaaggagctggagaacctggagatcaacctccgcaaggaaatcgccaaagcgttcaagggcaatgaagggtacaagagcctcttcaagaaagacatcatcgaaactatcctcccagagtttctcgatgacaaggacgagatcgcgctggtgaactcctttaacgggttcacaaccgcgtttaccggcttctttgataacagggaaaatatgttctccgaggaggccaagtccaccagcatcgccttcaggtgtatcaacgagaacctcacccgctacatttccaatatggacattttcgagaaggtggatgcgatcttcgataagcacgaggtgcaggagatcaaagagaagattctcaattccgattatgacgtcgaggatttcttcgaaggggagttctttaattttgtgctcacacaagagggcattgacgtgtacaacgcgattatcgggggcttcgtcacagagtccggggagaagattaaggggctgaatgagtacatcaatctgtacaatcagaagaccaagcagaaactgccgaaattcaagccgctctacaagcaagtcctgtccgatagggaaagcctctccttctacggcgagggctataccagcgacgaggaggtgctggaagtcttccgcaacacactgaataagaatagcgagattttctcctccatcaagaagctcgagaagctctttaagaactttgacgagtacagctccgccgggattttcgtgaagaacgggccggcgatcagcaccatctccaaggacatctttggcgagtggaacgtcatcagggacaagtggaacgccgagtacgacgacatccacctgaagaagaaggcggtggtgaccgagaagtatgaggacgatcgcaggaagtccttcaaaaaaatcggctccttcagcctcgaacagctccaggagtatgccgatgcggatctgtccgtcgtcgagaagctgaaggaaatcatcattcagaaggtcgacgagatctataaagtgtacgggtccagcgagaagctgttcgacgccgactttgtgctcgagaagtccctcaaaaagaatgacgccgtggtggccattatgaaagacctgctcgactccgtgaagtccttcgaaaattacattaaagcgttctttggggaggggaaggaaactaacagggatgagtccttctatggcgactttgtcctcgcgtacgacatcctgctgaaggtcgaccacatttacgacgcgatccgcaactacgtgacacagaagccgtactcctcaggcggaagtggtggaagtggcggtagtaccaacctcagcgacattatcgagaaggaaaccggcaagcaactcgtgatccaggagagcatactgatgctccccgaggaggtcgaggaggtgattggcaataagcccgagtccgatatactggttcatactgcgtatgacgaaagcacagacgagaacgtcatgctacttaccagcgacgccccggagtacaagccctgggccctagtcatccaagacagcaacggtgagaacaagatcaagatgctt

SEQ ID NO: 669 - DNA, 4747 bp, synthetic construct
  source 1..4747: mol_type = other DNA
gaggcctcccccgcatcaggacctagacacctgatggatccccatattttcacatctaacttcaacaacggaatcggcagacacaagacctacctgtgctatgaggtggaaaggctggataacggaacctctgtgaagatggaccagcacaggtaagtatcaaggttacaagacaggtttaaggagaccaatagaaactgggcttgtcgagacagagaagactcttgcgtttctgataggcacctattggtcttactgacatccactttgcctttctctccacaggggcttcctgcataaccaggccaagaatctgctgtgcggtttctacgggagacatgcagaactgaggtttctggatctggtgccatccctgcagctggaccccgctcagatctacagagtgacttggttcatctcttggagcccttgcttttcatggggatgtgctggcgaggtgagggccttccttcaggaaaacacacacgtgagactgaggatttttgctgccagaatctacgattatgacccactgtacaaggaagctctgcagatgctgagggatgcaggcgctcaggtgagcattatgacctatgacgaattcaagcactgctgggatacttttgtggaccatcagggttgtccttttcagccatgggatgggctggacgagcattctcaggcactgagcggtagactgagggctatcctgcagaaccaggggaattctggtggttctaaagacaagttcaagctgtacttccagaacccgcaatttatggggggctgggacaaggataaagagacagactaccgcgcgacaattctccgctatggctccaaatactatctggccatcatggacaagaagtacgcgaagtgcctgcagaagatcgacaaagacgacgtcaatggcaactatgaaaagatcaactacaagctgctgccgggcccgaacaagatgctcccgaaggtgttcttcagcaagaagtggatggcctactacaatccaagcgaggatattcagaaaatctataaaaacgggaccttcaagaagggggacatgtttaacctcaacgactgccacaagctcattgatttcttcaaggatagcatttcccgctacccgaaatggtccaatgcgtacgattttaacttctccgagacagaaaagtacaaagacatcgcgggcttttacagggaggtggaggagcaagggtataaagtttcttttgaatccgcgagcaagaaggaagtcgacaagctcgtcgaggagggcaagctctacatgttccaaatttataacaaggacttttccgacaagagccatgggaccccaaacctccacaccatgtacttcaaactgctctttgacgagaacaaccacgggcaaatcaggctgagcggcggcgccgaattattcatgcgcagggcctccctcaagaaggaagagctggtcgtccatccagccaattccccgatcgcgaacaagaacccggacaatccgaaaaagaccaccaccctgtcctacgacgtctacaaggacaaacgcttcagcgaagaccagtacgaattacacatcccaattgcgattaataagtgcccaaagaatatcttcaaaattaatacagaggtcagggtgctgctcaaacacgacgacaatccgtatgtcatcggcattgacaggggcgagcgcaatctgctctatatcgtggtcgtggatgggaagggcaatattgtggagcagtactccctgaacgagattatcaacaacttcaatgggattaggattaagaccgactatcacagcctgctcgacaagaaagaaaaagagaggtttgaggcccgccaaaactggacctccattgagaatatcaaagaattaaaggccggctatatttcccaagtcgtccacaagatctgcgagctggtggagaaatatgacgccgtgattgcgctcgaagacttaaattctgggttcaagaactcccgcgtgaaggtggaaaaacaggtgtatcagaaattcgagaaaatgctgatcgacaaactcaattatatggtggataagaagtccaacccgtgtgccacagggggcgcgctgaagggctatcagatcaccaacaagttcgagagcttcaagagcatgagcacccagaacgggtttattttctacatcccggcgtggctcacctccaagattgacccgagcaccggcttcgtgaacctcctgaagacaaagtatacctccattgccgacagcaagaagtttatctcctccttcgaccgcattatgtatgtgccggaggaggacctcttcgagttcgccctcgactacaaaaacttcagccgcacagatgcggattacatcaagaagtggaagctgtactcctacgggaacaggatccgcatcttcaggaatccaaaaaaaaataacgtctttgactgggaggaagtgtgcctgacatccgcctacaaggaactgttcaataaatacggcatcaattaccagcagggcgacattcgcgccctcctctgtgagcagtccgacaaagcgttttactccagcttcatggccctcatgtccctgatgctccaaatggccaatagcatcacagggcgcaccgacgtcgacttcctcatcagcccggtgaagaactccgacgggatcttttacgactcccgcaactatgaggcgcaagagaatgcgatcctcccgaagaacgccgatgcgaacggggcctataatatcgccaggaaagtgctctgggccatcgggcagttcaaaaaggcggaggatgagaagctcgacaaggtgaaaattgccatttccaacaaggagtggctggagtacgcgcagacctccgtgaagcacggctcctctggcagctccggctctagcggctcctctggcagctccggctccaagctggagaagtttacaaactgttacagcctctccaaaaccctcaggtttaaagcgatcccggtgggcaagacccaggagaacatcgacaacaagaggctcctggtggaagacgagaagcgcgccgaagactacaagggcgtgaagaagctgctcgataggtactacctcagctttattaacgacgtgctgcacagcatcaaactcaagaatctcaacaactacatctccctcttccgcaaaaagacccgcaccgagaaggagaacaaggagctggagaacctggagatcaacctccgcaaggaaatcgccaaagcgttcaagggcaatgaagggtacaagagcctcttcaagaaagacatcatcgaaactatcctcccagagtttctcgatgacaaggacgagatcgcgctggtgaactcctttaacgggttcacaaccgcgtttaccggcttctttgataacagggaaaatatgttctccgaggaggccaagtccaccagcatcgccttcaggtgtatcaacgagaacctcacccgctacatttccaatatggacattttcgagaaggtggatgcgatcttcgataagcacgaggtgcaggagatcaaagagaagattctcaattccgattatgacgtcgaggatttcttcgaaggggagttctttaattttgtgctcacacaagagggcattgacgtgtacaacgcgattatcgggggcttcgtcacagagtccggggagaagattaaggggctgaatgagtacatcaatctgtacaatcagaagaccaagcagaaactgccgaaattcaagccgctctacaagcaagtcctgtccgatagggaaagcctctccttctacggcgagggctataccagcgacgaggaggtgctggaagtcttccgcaacacactgaataagaatagcgagattttctcctccatcaagaagctcgagaagctctttaagaactttgacgagtacagctccgccgggattttcgtgaagaacgggccggcgatcagcaccatctccaaggacatctttggcgagtggaacgtcatcagggacaagtggaacgccgagtacgacgacatccacctgaagaagaaggcggtggtgaccgagaagtatgaggacgatcgcaggaagtccttcaaaaaaatcggctccttcagcctcgaacagctccaggagtatgccgatgcggatctgtccgtcgtcgagaagctgaaggaaatcatcattcagaaggtcgacgagatctataaagtgtacgggtccagcgagaagctgttcgacgccgactttgtgctcgagaagtccctcaaaaagaatgacgccgtggtggccattatgaaagacctgctcgactccgtgaagtccttcgaaaattacattaaagcgttctttggggaggggaaggaaactaacagggatgagtccttctatggcgactttgtcctcgcgtacgacatcctgctgaaggtcgaccacatttacgacgcgatccgcaactacgtgacacagaagccgtactcctcaggcggaagtggtggaagtggcggtagtaccaacctcagcgacattatcgagaaggaaaccggcaagcaactcgtgatccaggagagcatactgatgctccccgaggaggtcgaggaggtgattggcaataagcccgagtccgatatactggttcatactgcgtatgacgaaagcacagacgagaacgtcatgctacttaccagcgacgccccggagtacaagccctgggccctagtcatccaagacagcaacggtgagaacaagatcaagatgctt

SEQ ID NO: 670 - DNA, 4831 bp, synthetic construct
  source 1..4831: mol_type = other DNA
gaggcctcccccgcatcaggacctagacacctgatggatccccatattttcacatctaacttcaacaacggaatcggcagacacaagacctacctgtgctatgaggtggaaaggctggataacggaacctctgtgaagatggaccagcacaggtaagtatcaaggttacaagacaggtttaaggagaccaatagaaactgggcttgtcgagacagagaagactcttgcgtttctgataggcacctattggtcttactgacatccactttgcctttctctccacaggggcttcctgcataaccaggccaagaatctgctgtgcggtttctacgggagacatgcagaactgaggtttctggatctggtgccatccctgcagctggaccccgctcagatctacagagtgacttggttcatctcttggagcccttgcttttcatggggatgtgctggcgaggtgagggccttccttcaggaaaacacacacgtgagactgaggatttttgctgccagaatctacgattatgacccactgtacaaggaagctctgcagatgctgagggatgcaggcgctcaggtgagcattatgacctatgacgaattcaagcactgctgggatacttttgtggaccatcagggttgtccttttcagccatgggatgggctggacgagcattctcaggcactgagcggtagactgagggctatcctgcagaaccaggggaattctggtggttcttctggtggttctagcggcagcgagactcccgggacctcagagtccgccacacccgaaagttctggtggttcttctggtggttctaaagacaagttcaagctgtacttccagaacccgcaatttatggggggctgggacaaggataaagagacagactaccgcgcgacaattctccgctatggctccaaatactatctggccatcatggacaagaagtacgcgaagtgcctgcagaagatcgacaaagacgacgtcaatggcaactatgaaaagatcaactacaagctgctgccgggcccgaacaagatgctcccgaaggtgttcttcagcaagaagtggatggcctactacaatccaagcgaggatattcagaaaatctataaaaacgggaccttcaagaagggggacatgtttaacctcaacgactgccacaagctcattgatttcttcaaggatagcatttcccgctacccgaaatggtccaatgcgtacgattttaacttctccgagacagaaaagtacaaagacatcgcgggcttttacagggaggtggaggagcaagggtataaagtttcttttgaatccgcgagcaagaaggaagtcgacaagctcgtcgaggagggcaagctctacatgttccaaatttataacaaggacttttccgacaagagccatgggaccccaaacctccacaccatgtacttcaaactgctctttgacgagaacaaccacgggcaaatcaggctgagcggcggcgccgaattattcatgcgcagggcctccctcaagaaggaagagctggtcgtccatccagccaattccccgatcgcgaacaagaacccggacaatccgaaaaagaccaccaccctgtcctacgacgtctacaaggacaaacgcttcagcgaagaccagtacgaattacacatcccaattgcgattaataagtgcccaaagaatatcttcaaaattaatacagaggtcagggtgctgctcaaacacgacgacaatccgtatgtcatcggcattgacaggggcgagcgcaatctgctctatatcgtggtcgtggatgggaagggcaatattgtggagcagtactccctgaacgagattatcaacaacttcaatgggattaggattaagaccgactatcacagcctgctcgacaagaaagaaaaagagaggtttgaggcccgccaaaactggacctccattgagaatatcaaagaattaaaggccggctatatttcccaagtcgtccacaagatctgcgagctggtggagaaatatgacgccgtgattgcgctcgaagacttaaattctgggttcaagaactcccgcgtgaaggtggaaaaacaggtgtatcagaaattcgagaaaatgctgatcgacaaactcaattatatggtggataagaagtccaacccgtgtgccacagggggcgcgctgaagggctatcagatcaccaacaagttcgagagcttcaagagcatgagcacccagaacgggtttattttctacatcccggcgtggctcacctccaagattgacccgagcaccggcttcgtgaacctcctgaagacaaagtatacctccattgccgacagcaagaagtttatctcctccttcgaccgcattatgtatgtgccggaggaggacctcttcgagttcgccctcgactacaaaaacttcagccgcacagatgcggattacatcaagaagtggaagctgtactcctacgggaacaggatccgcatcttcaggaatccaaaaaaaaataacgtctttgactgggaggaagtgtgcctgacatccgcctacaaggaactgttcaataaatacggcatcaattaccagcagggcgacattcgcgccctcctctgtgagcagtccgacaaagcgttttactccagcttcatggccctcatgtccctgatgctccaaatggccaatagcatcacagggcgcaccgacgtcgacttcctcatcagcccggtgaagaactccgacgggatcttttacgactcccgcaactatgaggcgcaagagaatgcgatcctcccgaagaacgccgatgcgaacggggcctataatatcgccaggaaagtgctctgggccatcgggcagttcaaaaaggcggaggatgagaagctcgacaaggtgaaaattgccatttccaacaaggagtggctggagtacgcgcagacctccgtgaagcacggctcctctggcagctccggctctagcggctcctctggcagctccggctccaagctggagaagtttacaaactgttacagcctctccaaaaccctcaggtttaaagcgatcccggtgggcaagacccaggagaacatcgacaacaagaggctcctggtggaagacgagaagcgcgccgaagactacaagggcgtgaagaagctgctcgataggtactacctcagctttattaacgacgtgctgcacagcatcaaactcaagaatctcaacaactacatctccctcttccgcaaaaagacccgcaccgagaaggagaacaaggagctggagaacctggagatcaacctccgcaaggaaatcgccaaagcgttcaagggcaatgaagggtacaagagcctcttcaagaaagacatcatcgaaactatcctcccagagtttctcgatgacaaggacgagatcgcgctggtgaactcctttaacgggttcacaaccgcgtttaccggcttctttgataacagggaaaatatgttctccgaggaggccaagtccaccagcatcgccttcaggtgtatcaacgagaacctcacccgctacatttccaatatggacattttcgagaaggtggatgcgatcttcgataagcacgaggtgcaggagatcaaagagaagattctcaattccgattatgacgtcgaggatttcttcgaaggggagttctttaattttgtgctcacacaagagggcattgacgtgtacaacgcgattatcgggggcttcgtcacagagtccggggagaagattaaggggctgaatgagtacatcaatctgtacaatcagaagaccaagcagaaactgccgaaattcaagccgctctacaagcaagtcctgtccgatagggaaagcctctccttctacggcgagggctataccagcgacgaggaggtgctggaagtcttccgcaacacactgaataagaatagcgagattttctcctccatcaagaagctcgagaagctctttaagaactttgacgagtacagctccgccgggattttcgtgaagaacgggccggcgatcagcaccatctccaaggacatctttggcgagtggaacgtcatcagggacaagtggaacgccgagtacgacgacatccacctgaagaagaaggcggtggtgaccgagaagtatgaggacgatcgcaggaagtccttcaaaaaaatcggctccttcagcctcgaacagctccaggagtatgccgatgcggatctgtccgtcgtcgagaagctgaaggaaatcatcattcagaaggtcgacgagatctataaagtgtacgggtccagcgagaagctgttcgacgccgactttgtgctcgagaagtccctcaaaaagaatgacgccgtggtggccattatgaaagacctgctcgactccgtgaagtccttcgaaaattacattaaagcgttctttggggaggggaaggaaactaacagggatgagtccttctatggcgactttgtcctcgcgtacgacatcctgctgaaggtcgaccacatttacgacgcgatccgcaactacgtgacacagaagccgtactcctcaggcggaagtggtggaagtggcggtagtaccaacctcagcgacattatcgagaaggaaaccggcaagcaactcgtgatccaggagagcatactgatgctccccgaggaggtcgaggaggtgattggcaataagcccgagtccgatatactggttcatactgcgtatgacgaaagcacagacgagaacgtcatgctacttaccagcgacgccccggagtacaagccctgggccctagtcatccaagacagcaacggtgagaacaagatcaagatgctt

SEQ ID NO: 671 - DNA, 8770 bp, synthetic construct
  source 1..8770: mol_type = other DNA
gacattgattattgactagttattaatagtaatcaattacggggtcattagttcatagcccatatatggagttccgcgttacataacttacggtaaatggcccgcctggctgaccgcccaacgacccccgcccattgacgtcaataatgacgtatgttcccatagtaacgccaatagggactttccattgacgtcaatgggtggagtatttacggtaaactgcccacttggcagtacatcaagtgtatcatatgccaagtacgccccctattgacgtcaatgacggtaaatggcccgcctggcattatgcccagtacatgaccttatgggactttcctacttggcagtacatctacgtattagtcatcgctattaccatggtgatgcggttttggcagtacatcaatgggcgtggatagcggtttgactcacggggatttccaagtctccaccccattgacgtcaatgggagtttgttttggcaccaaaatcaacgggactttccaaaatgtcgtaacaactccgccccattgacgcaaatgggcggtaggcgtgtacggtgggaggtctatataagcagagctggtttagtgaaccgtcagatccgctagagatccgcggccgctaatacgactcactatagggagagccgccaccatgaaacggacagccgacggaagcgagttcgagtcaccaaagaagaagcggaaagtctctgaggttgaattttcacatgagtattggatgagacacgctcttaccttggctaagagagcaagggatgagagagaagttccagtgggagcagttcttgtgttgaacaatagagttattggagagggttggaacaggtaagtatcaaggttacaagacaggtttaaggagaccaatagaaactgggcttgtcgagacagagaagactcttgcgtttctgataggcacctattggtcttactgacatccactttgcctttctctccacagggctattggacttcatgatcctactgctcacgcagaaattatggcacttagacaaggtggacttgttatgcagaactacaggcttatcgatgctactctttatgttacattcgagccatgtgtgatgtgcgctggagcaatgattcattctaggattggaagggttgtgttcggtgttagaaactctaagaggggagctgcaggttcacttatgaacgttttgaattatcctggtatgaaccacagagtggagattactgaaggtattttggcagatgaatgtgctgcacttttgtgcgatttttacagaatgcctagacaagtgttcaacgctcaaaagaaggcacaatcttctattaactctggtggttctagcggcagcgagactcccgggacctcagagtccgccacacccgaaagttctggtggttctcgcaccgagaaggagaacaaggagctggagaacctggagatcaacctccgcaaggaaatcgccaaagcgttcaagggcaatgaagggtacaagagcctcttcaagaaagacatcatcgaaactatcctcccagagtttctcgatgacaaggacgagatcgcgctggtgaactcctttaacgggttcacaaccgcgtttaccggcttctttgataacagggaaaatatgttctccgaggaggccaagtccaccagcatcgccttcaggtgtatcaacgagaacctcacccgctacatttccaatatggacattttcgagaaggtggatgcgatcttcgataagcacgaggtgcaggagatcaaagagaagattctcaattccgattatgacgtcgaggatttcttcgaaggggagttctttaattttgtgctcacacaagagggcattgacgtgtacaacgcgattatcgggggcttcgtcacagagtccggggagaagattaaggggctgaatgagtacatcaatctgtacaatcagaagaccaagcagaaactgccgaaattcaagccgctctacaagcaagtcctgtccgatagggaaagcctctccttctacggcgagggctataccagcgacgaggaggtgctggaagtcttccgcaacacactgaataagaatagcgagattttctcctccatcaagaagctcgagaagctctttaagaactttgacgagtacagctccgccgggattttcgtgaagaacgggccggcgatcagcaccatctccaaggacatctttggcgagtggaacgtcatcagggacaagtggaacgccgagtacgacgacatccacctgaagaagaaggcggtggtgaccgagaagtatgaggacgatcgcaggaagtccttcaaaaaaatcggctccttcagcctcgaacagctccaggagtatgccgatgcggatctgtccgtcgtcgagaagctgaaggaaatcatcattcagaaggtcgacgagatctataaagtgtacgggtccagcgagaagctgttcgacgccgactttgtgctcgagaagtccctcaaaaagaatgacgccgtggtggccattatgaaagacctgctcgactccgtgaagtccttcgaaaattacattaaagcgttctttggggaggggaaggaaactaacagggatgagtccttctatggcgactttgtcctcgcgtacgacatcctgctgaaggtcgaccacatttacgacgcgatccgcaactacgtgacacagaagccgtactccaaagacaagttcaagctgtacttccagaacccgcaatttatggggggctgggacaaggataaagagacagactaccgcgcgacaattctccgctatggctccaaatactatctggccatcatggacaagaagtacgcgaagtgcctgcagaagatcgacaaagacgacgtcaatggcaactatgaaaagatcaactacaagctgctgccgggcccgaacaagatgctcccgaaggtgttcttcagcaagaagtggatggcctactacaatccaagcgaggatattcagaaaatctataaaaacgggaccttcaagaagggggacatgtttaacctcaacgactgccacaagctcattgatttcttcaaggatagcatttcccgctacccgaaatggtccaatgcgtacgattttaacttctccgagacagaaaagtacaaagacatcgcgggcttttacagggaggtggaggagcaagggtataaagtttcttttgaatccgcgagcaagaaggaagtcgacaagctcgtcgaggagggcaagctctacatgttccaaatttataacaaggacttttccgacaagagccatgggaccccaaacctccacaccatgtacttcaaactgctctttgacgagaacaaccacgggcaaatcaggctgagcggcggcgccgaattattcatgcgcagggcctccctcaagaaggaagagctggtcgtccatccagccaattccccgatcgcgaacaagaacccggacaatccgaaaaagaccaccaccctgtcctacgacgtctacaaggacaaacgcttcagcgaagaccagtacgaattacacatcccaattgcgattaataagtgcccaaagaatatcttcaaaattaatacagaggtcagggtgctgctcaaacacgacgacaatccgtatgtcatcggcattgccaggggcgagcgcaatctgctctatatcgtggtcgtggatgggaagggcaatattgtggagcagtactccctgaacgagattatcaacaacttcaatgggattaggattaagaccgactatcacagcctgctcgacaagaaagaaaaagagaggtttgaggcccgccaaaactggacctccattgagaatatcaaagaattaaaggccggctatatttcccaagtcgtccacaagatctgcgagctggtggagaaatatgacgccgtgattgcgctcgaagacttaaattctgggttcaagaactcccgcgtgaaggtggaaaaacaggtgtatcagaaattcgagaaaatgctgatcgacaaactcaattatatggtggataagaagtccaacccgtgtgccacagggggcgcgctgaagggctatcagatcaccaacaagttcgagagcttcaagagcatgagcacccagaacgggtttattttctacatcccggcgtggctcacctccaagattgacccgagcaccggcttcgtgaacctcctgaagacaaagtatacctccattgccgacagcaagaagtttatctcctccttcgaccgcattatgtatgtgccggaggaggacctcttcgagttcgccctcgactacaaaaacttcagccgcacagatgcggattacatcaagaagtggaagctgtactcctacgggaacaggatccgcatcttcaggaatccaaaaaaaaataacgtctttgactgggaggaagtgtgcctgacatccgcctacaaggaactgttcaataaatacggcatcaattaccagcagggcgacattcgcgccctcctctgtgagcagtccgacaaagcgttttactccagcttcatggccctcatgtccctgatgctccaaatgaggaatagcatcacagggcgcaccgacgtcgacttcctcatcagcccggtgaagaactccgacgggatcttttacgactcccgcaactatgaggcgcaagagaatgcgatcctcccgaagaacgccgatgcgaacggggcctataatatcgccaggaaagtgctctgggccatcgggcagttcaaaaaggcggaggatgagaagctcgacaaggtgaaaattgccatttccaacaaggagtggctggagtacgcgcagacctccgtgaagcacggctcctctggcagctccggctctagcggctcctctggcagctccggctccaagctggagaagtttacaaactgttacagcctctccaaaaccctcaggtttaaagcgatcccggtgggcaagacccaggagaacatcgacaacaagaggctcctggtggaagacgagaagcgcgccgaagactacaagggcgtgaagaagctgctcgataggtactacctcagctttattaacgacgtgctgcacagcatcaaactcaagaatctcaacaactacatctccctcttccgcaaaaagacctctggcggctcaaaaagaaccgccgacggcagcgaattcgagcccaagaagaagaggaaagtcggaagcggagctactaacttcagcctgctgaagcaggctggagacgtggaggagaaccctggacctatggtgagcaagggcgaggagctgttcaccggggtggtgcccatcctggtcgagctggacggcgacgtaaacggccacaagttcagcgtgtccggcgagggcgagggcgatgccacctacggcaagctgaccctgaagttcatctgcaccaccggcaagctgcccgtgccctggcccaccctcgtgaccaccctgacctatggagtgcagtgcttcagccgctaccccgaccacatgaagcagcacgacttcttcaagtccgccatgcccgaaggctacgtccaggagcgcaccatcttcttcaaggacgacggcaactacaagacccgcgccgaggtgaagttcgagggcgacaccctggtgaaccgcatcgagctgaagggcatcgacttcaaggaggacggcaacatcctggggcacaagctggagtacaactacaacagccacaacgtctatatcatggccgacaagcagaagaacggcatcaaggtgaacttcaagatccgccacaacatcgaggacggcagcgtgcagctcgccgaccactaccagcagaacacccccatcggcgacggccccgtgctgctgcccgacaaccactacctgagcacccagtccgccctgagcaaagaccccaacgagaagcgcgatcacatggtcctgctggagttcgtgaccgccgccgggatcactctcggcatggacgagctgtacaagtctggtggttctcccaagaagaagaggaaagtctaaccggtcatcatcaccatcaccattgagtttaaacccgctgatcagcctcgactgtgccttctagttgccagccatctgttgtttgcccctcccccgtgccttccttgaccctggaaggtgccactcccactgtcctttcctaataaaatgaggaaattgcatcgcattgtctgagtaggtgtcattctattctggggggtggggtggggcaggacagcaagggggaggattgggaagacaatagcaggcatgctggggatgcggtgggctctatggcttctgaggcggaaagaaccagctggggctcgataccgtcgacctctagctagagcttggcgtaatcatggtcatagctgtttcctgtgtgaaattgttatccgctcacaattccacacaacatacgagccggaagcataaagtgtaaagcctagggtgcctaatgagtgagctaactcacattaattgcgttgcgctcactgcccgctttccagtcgggaaacctgtcgtgccagctgcattaatgaatcggccaacgcgcggggagaggcggtttgcgtattgggcgctcttccgcttcctcgctcactgactcgctgcgctcggtcgttcggctgcggcgagcggtatcagctcactcaaaggcggtaatacggttatccacagaatcaggggataacgcaggaaagaacatgtgagcaaaaggccagcaaaaggccaggaaccgtaaaaaggccgcgttgctggcgtttttccataggctccgcccccctgacgagcatcacaaaaatcgacgctcaagtcagaggtggcgaaacccgacaggactataaagataccaggcgtttccccctggaagctccctcgtgcgctctcctgttccgaccctgccgcttaccggatacctgtccgcctttctcccttcgggaagcgtggcgctttctcatagctcacgctgtaggtatctcagttcggtgtaggtcgttcgctccaagctgggctgtgtgcacgaaccccccgttcagcccgaccgctgcgccttatccggtaactatcgtcttgagtccaacccggtaagacacgacttatcgccactggcagcagccactggtaacaggattagcagagcgaggtatgtaggcggtgctacagagttcttgaagtggtggcctaactacggctacactagaagaacagtatttggtatctgcgctctgctgaagccagttaccttcggaaaaagagttggtagctcttgatccggcaaacaaaccaccgctggtagcggtggtttttttgtttgcaagcagcagattacgcgcagaaaaaaaggatctcaagaagatcctttgatcttttctacggggtctgacactcagtggaacgaaaactcacgttaagggattttggtcatgagattatcaaaaaggatcttcacctagatccttttaaattaaaaatgaagttttaaatcaatctaaagtatatatgagtaaacttggtctgacagttaccaatgcttaatcagtgaggcacctatctcagcgatctgtctatttcgttcatccatagttgcctgactccccgtcgtgtagataactacgatacgggagggcttaccatctggccccagtgctgcaatgataccgcgagacccacgctcaccggctccagatttatcagcaataaaccagccagccggaagggccgagcgcagaagtggtcctgcaactttatccgcctccatccagtctattaattgttgccgggaagctagagtaagtagttcgccagttaatagtttgcgcaacgttgttgccattgctacaggcatcgtggtgtcacgctcgtcgtttggtatggcttcattcagctccggttcccaacgatcaaggcgagttacatgatcccccatgttgtgcaaaaaagcggttagctccttcggtcctccgatcgttgtcagaagtaagttggccgcagtgttatcactcatggttatggcagcactgcataattctcttactgtcatgccatccgtaagatgcttttctgtgactggtgagtactcaaccaagtcattctgagaatagtgtatgcggcgaccgagttgctcttgcccggcgtcaatacgggataataccgcgccacatagcagaactttaaaagtgctcatcattggaaaacgttcttcggggcgaaaactctcaaggatcttaccgctgttgagatccagttcgatgtaacccactcgtgcacccaactgatcttcagcatcttttactttcaccagcgtttctgggtgagcaaaaacaggaaggcaaaatgccgcaaaaaagggaataagggcgacacggaaatgttgaatactcatactcttcctttttcaatattattgaagcatttatcagggttattgtctcatgagcggatacatatttgaatgtatttagaaaaataaacaaataggggttccgcgcacatttccccgaaaagtgccacctgacgtcgacggatcgggagatcgatctcccgatcccctagggtcgactctcagtacaatctgctctgatgccgcatagttaagccagtatctgctccctgcttgtgtgttggaggtcgctgagtagtgcgcgagcaaaatttaagctacaacaaggcaaggcttgaccgacaattgcatgaagaatctgcttagggttaggcgttttgcgctgcttcgcgatgtacgggccagatatacgcgtt

SEQ ID NO: 672 - DNA, 8746 bp, synthetic construct
  source 1..8746: mol_type = other DNA
gacattgattattgactagttattaatagtaatcaattacggggtcattagttcatagcccatatatggagttccgcgttacataacttacggtaaatggcccgcctggctgaccgcccaacgacccccgcccattgacgtcaataatgacgtatgttcccatagtaacgccaatagggactttccattgacgtcaatgggtggagtatttacggtaaactgcccacttggcagtacatcaagtgtatcatatgccaagtacgccccctattgacgtcaatgacggtaaatggcccgcctggcattatgcccagtacatgaccttatgggactttcctacttggcagtacatctacgtattagtcatcgctattaccatggtgatgcggttttggcagtacatcaatgggcgtggatagcggtttgactcacggggatttccaagtctccaccccattgacgtcaatgggagtttgttttggcaccaaaatcaacgggactttccaaaatgtcgtaacaactccgccccattgacgcaaatgggcggtaggcgtgtacggtgggaggtctatataagcagagctggtttagtgaaccgtcagatccgctagagatccgcggccgctaatacgactcactatagggagagccgccaccatgaaacggacagccgacggaagcgagttcgagtcaccaaagaagaagcggaaagtctctgaggttgaattttcacatgagtattggatgagacacgctcttaccttggctaagagagcaagggatgagagagaagttccagtgggagcagttcttgtgttgaacaatagagttattggagagggttggaacaggtaagtatcaaggttacaagacaggtttaaggagaccaatagaaactgggcttgtcgagacagagaagactcttgcgtttctgataggcacctattggtcttactgacatccactttgcctttctctccacagggctattggacttcatgatcctactgctcacgcagaaattatggcacttagacaaggtggacttgttatgcagaactacaggcttatcgatgctactctttatgttacattcgagccatgtgtgatgtgcgctggagcaatgattcattctaggattggaagggttgtgttcggtgttagaaactctaagaggggagctgcaggttcacttatgaacgttttgaattatcctggtatgaaccacagagtggagattactgaaggtattttggcagatgaatgtgctgcacttttgtgcgatttttacagaatgcctagacaagtgttcaacgctcaaaagaaggcacaatcttctattaacagcggcagcgagactcccgggacctcagagtccgccacacccgaaagtcgcaccgagaaggagaacaaggagctggagaacctggagatcaacctccgcaaggaaatcgccaaagcgttcaagggcaatgaagggtacaagagcctcttcaagaaagacatcatcgaaactatcctcccagagtttctcgatgacaaggacgagatcgcgctggtgaactcctttaacgggttcacaaccgcgtttaccggcttctttgataacagggaaaatatgttctccgaggaggccaagtccaccagcatcgccttcaggtgtatcaacgagaacctcacccgctacatttccaatatggacattttcgagaaggtggatgcgatcttcgataagcacgaggtgcaggagatcaaagagaagattctcaattccgattatgacgtcgaggatttcttcgaaggggagttctttaattttgtgctcacacaagagggcattgacgtgtacaacgcgattatcgggggcttcgtcacagagtccggggagaagattaaggggctgaatgagtacatcaatctgtacaatcagaagaccaagcagaaactgccgaaattcaagccgctctacaagcaagtcctgtccgatagggaaagcctctccttctacggcgagggctataccagcgacgaggaggtgctggaagtcttccgcaacacactgaataagaatagcgagattttctcctccatcaagaagctcgagaagctctttaagaactttgacgagtacagctccgccgggattttcgtgaagaacgggccggcgatcagcaccatctccaaggacatctttggcgagtggaacgtcatcagggacaagtggaacgccgagtacgacgacatccacctgaagaagaaggcggtggtgaccgagaagtatgaggacgatcgcaggaagtccttcaaaaaaatcggctccttcagcctcgaacagctccaggagtatgccgatgcggatctgtccgtcgtcgagaagctgaaggaaatcatcattcagaaggtcgacgagatctataaagtgtacgggtccagcgagaagctgttcgacgccgactttgtgctcgagaagtccctcaaaaagaatgacgccgtggtggccattatgaaagacctgctcgactccgtgaagtccttcgaaaattacattaaagcgttctttggggaggggaaggaaactaacagggatgagtccttctatggcgactttgtcctcgcgtacgacatcctgctgaaggtcgaccacatttacgacgcgatccgcaactacgtgacacagaagccgtactccaaagacaagttcaagctgtacttccagaacccgcaatttatggggggctgggacaaggataaagagacagactaccgcgcgacaattctccgctatggctccaaatactatctggccatcatggacaagaagtacgcgaagtgcctgcagaagatcgacaaagacgacgtcaatggcaactatgaaaagatcaactacaagctgctgccgggcccgaacaagatgctcccgaaggtgttcttcagcaagaagtggatggcctactacaatccaagcgaggatattcagaaaatctataaaaacgggaccttcaagaagggggacatgtttaacctcaacgactgccacaagctcattgatttcttcaaggatagcatttcccgctacccgaaatggtccaatgcgtacgattttaacttctccgagacagaaaagtacaaagacatcgcgggcttttacagggaggtggaggagcaagggtataaagtttcttttgaatccgcgagcaagaaggaagtcgacaagctcgtcgaggagggcaagctctacatgttccaaatttataacaaggacttttccgacaagagccatgggaccccaaacctccacaccatgtacttcaaactgctctttgacgagaacaaccacgggcaaatcaggctgagcggcggcgccgaattattcatgcgcagggcctccctcaagaaggaagagctggtcgtccatccagccaattccccgatcgcgaacaagaacccggacaatccgaaaaagaccaccaccctgtcctacgacgtctacaaggacaaacgcttcagcgaagaccagtacgaattacacatcccaattgcgattaataagtgcccaaagaatatcttcaaaattaatacagaggtcagggtgctgctcaaacacgacgacaatccgtatgtcatcggcattgccaggggcgagcgcaatctgctctatatcgtggtcgtggatgggaagggcaatattgtggagcagtactccctgaacgagattatcaacaacttcaatgggattaggattaagaccgactatcacagcctgctcgacaagaaagaaaaagagaggtttgaggcccgccaaaactggacctccattgagaatatcaaagaattaaaggccggctatatttcccaagtcgtccacaagatctgcgagctggtggagaaatatgacgccgtgattgcgctcgaagacttaaattctgggttcaagaactcccgcgtgaaggtggaaaaacaggtgtatcagaaattcgagaaaatgctgatcgacaaactcaattatatggtggataagaagtccaacccgtgtgccacagggggcgcgctgaagggctatcagatcaccaacaagttcgagagcttcaagagcatgagcacccagaacgggtttattttctacatcccggcgtggctcacctccaagattgacccgagcaccggcttcgtgaacctcctgaagacaaagtatacctccattgccgacagcaagaagtttatctcctccttcgaccgcattatgtatgtgccggaggaggacctcttcgagttcgccctcgactacaaaaacttcagccgcacagatgcggattacatcaagaagtggaagctgtactcctacgggaacaggatccgcatcttcaggaatccaaaaaaaaataacgtctttgactgggaggaagtgtgcctgacatccgcctacaaggaactgttcaataaatacggcatcaattaccagcagggcgacattcgcgccctcctctgtgagcagtccgacaaagcgttttactccagcttcatggccctcatgtccctgatgctccaaatgaggaatagcatcacagggcgcaccgacgtcgacttcctcatcagcccggtgaagaactccgacgggatcttttacgactcccgcaactatgaggcgcaagagaatgcgatcctcccgaagaacgccgatgcgaacggggcctataatatcgccaggaaagtgctctgggccatcgggcagttcaaaaaggcggaggatgagaagctcgacaaggtgaaaattgccatttccaacaaggagtggctggagtacgcgcagacctccgtgaagcacggctcctctggcagctccggctctagcggctcctctggcagctccggctccaagctggagaagtttacaaactgttacagcctctccaaaaccctcaggtttaaagcgatcccggtgggcaagacccaggagaacatcgacaacaagaggctcctggtggaagacgagaagcgcgccgaagactacaagggcgtgaagaagctgctcgataggtactacctcagctttattaacgacgtgctgcacagcatcaaactcaagaatctcaacaactacatctccctcttccgcaaaaagacctctggcggctcaaaaagaaccgccgacggcagcgaattcgagcccaagaagaagaggaaagtcggaagcggagctactaacttcagcctgctgaagcaggctggagacgtggaggagaaccctggacctatggtgagcaagggcgaggagctgttcaccggggtggtgcccatcctggtcgagctggacggcgacgtaaacggccacaagttcagcgtgtccggcgagggcgagggcgatgccacctacggcaagctgaccctgaagttcatctgcaccaccggcaagctgcccgtgccctggcccaccctcgtgaccaccctgacctatggagtgcagtgcttcagccgctaccccgaccacatgaagcagcacgacttcttcaagtccgccatgcccgaaggctacgtccaggagcgcaccatcttcttcaaggacgacggcaactacaagacccgcgccgaggtgaagttcgagggcgacaccctggtgaaccgcatcgagctgaagggcatcgacttcaaggaggacggcaacatcctggggcacaagctggagtacaactacaacagccacaacgtctatatcatggccgacaagcagaagaacggcatcaaggtgaacttcaagatccgccacaacatcgaggacggcagcgtgcagctcgccgaccactaccagcagaacacccccatcggcgacggccccgtgctgctgcccgacaaccactacctgagcacccagtccgccctgagcaaagaccccaacgagaagcgcgatcacatggtcctgctggagttcgtgaccgccgccgggatcactctcggcatggacgagctgtacaagtctggtggttctcccaagaagaagaggaaagtctaaccggtcatcatcaccatcaccattgagtttaaacccgctgatcagcctcgactgtgccttctagttgccagccatctgttgtttgcccctcccccgtgccttccttgaccctggaaggtgccactcccactgtcctttcctaataaaatgaggaaattgcatcgcattgtctgagtaggtgtcattctattctggggggtggggtggggcaggacagcaagggggaggattgggaagacaatagcaggcatgctggggatgcggtgggctctatggcttctgaggcggaaagaaccagctggggctcgataccgtcgacctctagctagagcttggcgtaatcatggtcatagctgtttcctgtgtgaaattgttatccgctcacaattccacacaacatacgagccggaagcataaagtgtaaagcctagggtgcctaatgagtgagctaactcacattaattgcgttgcgctcactgcccgctttccagtcgggaaacctgtcgtgccagctgcattaatgaatcggccaacgcgcggggagaggcggtttgcgtattgggcgctcttccgcttcctcgctcactgactcgctgcgctcggtcgttcggctgcggcgagcggtatcagctcactcaaaggcggtaatacggttatccacagaatcaggggataacgcaggaaagaacatgtgagcaaaaggccagcaaaaggccaggaaccgtaaaaaggccgcgttgctggcgtttttccataggctccgcccccctgacgagcatcacaaaaatcgacgctcaagtcagaggtggcgaaacccgacaggactataaagataccaggcgtttccccctggaagctccctcgtgcgctctcctgttccgaccctgccgcttaccggatacctgtccgcctttctcccttcgggaagcgtggcgctttctcatagctcacgctgtaggtatctcagttcggtgtaggtcgttcgctccaagctgggctgtgtgcacgaaccccccgttcagcccgaccgctgcgccttatccggtaactatcgtcttgagtccaacccggtaagacacgacttatcgccactggcagcagccactggtaacaggattagcagagcgaggtatgtaggcggtgctacagagttcttgaagtggtggcctaactacggctacactagaagaacagtatttggtatctgcgctctgctgaagccagttaccttcggaaaaagagttggtagctcttgatccggcaaacaaaccaccgctggtagcggtggtttttttgtttgcaagcagcagattacgcgcagaaaaaaaggatctcaagaagatcctttgatcttttctacggggtctgacactcagtggaacgaaaactcacgttaagggattttggtcatgagattatcaaaaaggatcttcacctagatccttttaaattaaaaatgaagttttaaatcaatctaaagtatatatgagtaaacttggtctgacagttaccaatgcttaatcagtgaggcacctatctcagcgatctgtctatttcgttcatccatagttgcctgactccccgtcgtgtagataactacgatacgggagggcttaccatctggccccagtgctgcaatgataccgcgagacccacgctcaccggctccagatttatcagcaataaaccagccagccggaagggccgagcgcagaagtggtcctgcaactttatccgcctccatccagtctattaattgttgccgggaagctagagtaagtagttcgccagttaatagtttgcgcaacgttgttgccattgctacaggcatcgtggtgtcacgctcgtcgtttggtatggcttcattcagctccggttcccaacgatcaaggcgagttacatgatcccccatgttgtgcaaaaaagcggttagctccttcggtcctccgatcgttgtcagaagtaagttggccgcagtgttatcactcatggttatggcagcactgcataattctcttactgtcatgccatccgtaagatgcttttctgtgactggtgagtactcaaccaagtcattctgagaatagtgtatgcggcgaccgagttgctcttgcccggcgtcaatacgggataataccgcgccacatagcagaactttaaaagtgctcatcattggaaaacgttcttcggggcgaaaactctcaaggatcttaccgctgttgagatccagttcgatgtaacccactcgtgcacccaactgatcttcagcatcttttactttcaccagcgtttctgggtgagcaaaaacaggaaggcaaaatgccgcaaaaaagggaataagggcgacacggaaatgttgaatactcatactcttcctttttcaatattattgaagcatttatcagggttattgtctcatgagcggatacatatttgaatgtatttagaaaaataaacaaataggggttccgcgcacatttccccgaaaagtgccacctgacgtcgacggatcgggagatcgatctcccgatcccctagggtcgactctcagtacaatctgctctgatgccgcatagttaagccagtatctgctccctgcttgtgtgttggaggtcgctgagtagtgcgcgagcaaaatttaagctacaacaaggcaaggcttgaccgacaattgcatgaagaatctgcttagggttaggcgttttgcgctgcttcgcgatgtacgggccagatatacgcgtt

SEQ ID NO: 673 - DNA, 8734 bp, synthetic construct
  source 1..8734: mol_type = other DNA
gacattgattattgactagttattaatagtaatcaattacggggtcattagttcatagcccatatatggagttccgcgttacataacttacggtaaatggcccgcctggctgaccgcccaacgacccccgcccattgacgtcaataatgacgtatgttcccatagtaacgccaatagggactttccattgacgtcaatgggtggagtatttacggtaaactgcccacttggcagtacatcaagtgtatcatatgccaagtacgccccctattgacgtcaatgacggtaaatggcccgcctggcattatgcccagtacatgaccttatgggactttcctacttggcagtacatctacgtattagtcatcgctattaccatggtgatgcggttttggcagtacatcaatgggcgtggatagcggtttgactcacggggatttccaagtctccaccccattgacgtcaatgggagtttgttttggcaccaaaatcaacgggactttccaaaatgtcgtaacaactccgccccattgacgcaaatgggcggtaggcgtgtacggtgggaggtctatataagcagagctggtttagtgaaccgtcagatccgctagagatccgcggccgctaatacgactcactatagggagagccgccaccatgaaacggacagccgacggaagcgagttcgagtcaccaaagaagaagcggaaagtctctgaggttgaattttcacatgagtattggatgagacacgctcttaccttggctaagagagcaagggatgagagagaagttccagtgggagcagttcttgtgttgaacaatagagttattggagagggttggaacaggtaagtatcaaggttacaagacaggtttaaggagaccaatagaaactgggcttgtcgagacagagaagactcttgcgtttctgataggcacctattggtcttactgacatccactttgcctttctctccacagggctattggacttcatgatcctactgctcacgcagaaattatggcacttagacaaggtggacttgttatgcagaactacaggcttatcgatgctactctttatgttacattcgagccatgtgtgatgtgcgctggagcaatgattcattctaggattggaagggttgtgttcggtgttagaaactctaagaggggagctgcaggttcacttatgaacgttttgaattatcctggtatgaaccacagagtggagattactgaaggtattttggcagatgaatgtgctgcacttttgtgcgatttttacagaatgcctagacaagtgttcaacgctcaaaagaaggcacaatcttctattaactctggtggttcttctggtggttcttctggtggttctcgcaccgagaaggagaacaaggagctggagaacctggagatcaacctccgcaaggaaatcgccaaagcgttcaagggcaatgaagggtacaagagcctcttcaagaaagacatcatcgaaactatcctcccagagtttctcgatgacaaggacgagatcgcgctggtgaactcctttaacgggttcacaaccgcgtttaccggcttctttgataacagggaaaatatgttctccgaggaggccaagtccaccagcatcgccttcaggtgtatcaacgagaacctcacccgctacatttccaatatggacattttcgagaaggtggatgcgatcttcgataagcacgaggtgcaggagatcaaagagaagattctcaattccgattatgacgtcgaggatttcttcgaaggggagttctttaattttgtgctcacacaagagggcattgacgtgtacaacgcgattatcgggggcttcgtcacagagtccggggagaagattaaggggctgaatgagtacatcaatctgtacaatcagaagaccaagcagaaactgccgaaattcaagccgctctacaagcaagtcctgtccgatagggaaagcctctccttctacggcgagggctataccagcgacgaggaggtgctggaagtcttccgcaacacactgaataagaatagcgagattttctcctccatcaagaagctcgagaagctctttaagaactttgacgagtacagctccgccgggattttcgtgaagaacgggccggcgatcagcaccatctccaaggacatctttggcgagtggaacgtcatcagggacaagtggaacgccgagtacgacgacatccacctgaagaagaaggcggtggtgaccgagaagtatgaggacgatcgcaggaagtccttcaaaaaaatcggctccttcagcctcgaacagctccaggagtatgccgatgcggatctgtccgtcgtcgagaagctgaaggaaatcatcattcagaaggtcgacgagatctataaagtgtacgggtccagcgagaagctgttcgacgccgactttgtgctcgagaagtccctcaaaaagaatgacgccgtggtggccattatgaaagacctgctcgactccgtgaagtccttcgaaaattacattaaagcgttctttggggaggggaaggaaactaacagggatgagtccttctatggcgactttgtcctcgcgtacgacatcctgctgaaggtcgaccacatttacgacgcgatccgcaactacgtgacacagaagccgtactccaaagacaagttcaagctgtacttccagaacccgcaatttatggggggctgggacaaggataaagagacagactaccgcgcgacaattctccgctatggctccaaatactatctggccatcatggacaagaagtacgcgaagtgcctgcagaagatcgacaaagacgacgtcaatggcaactatgaaaagatcaactacaagctgctgccgggcccgaacaagatgctcccgaaggtgttcttcagcaagaagtggatggcctactacaatccaagcgaggatattcagaaaatctataaaaacgggaccttcaagaagggggacatgtttaacctcaacgactgccacaagctcattgatttcttcaaggatagcatttcccgctacccgaaatggtccaatgcgtacgattttaacttctccgagacagaaaagtacaaagacatcgcgggcttttacagggaggtggaggagcaagggtataaagtttcttttgaatccgcgagcaagaaggaagtcgacaagctcgtcgaggagggcaagctctacatgttccaaatttataacaaggacttttccgacaagagccatgggaccccaaacctccacaccatgtacttcaaactgctctttgacgagaacaaccacgggcaaatcaggctgagcggcggcgccgaattattcatgcgcagggcctccctcaagaaggaagagctggtcgtccatccagccaattccccgatcgcgaacaagaacccggacaatccgaaaaagaccaccaccctgtcctacgacgtctacaaggacaaacgcttcagcgaagaccagtacgaattacacatcccaattgcgattaataagtgcccaaagaatatcttcaaaattaatacagaggtcagggtgctgctcaaacacgacgacaatccgtatgtcatcggcattgccaggggcgagcgcaatctgctctatatcgtggtcgtggatgggaagggcaatattgtggagcagtactccctgaacgagattatcaacaacttcaatgggattaggattaagaccgactatcacagcctgctcgacaagaaagaaaaagagaggtttgaggcccgccaaaactggacctccattgagaatatcaaagaattaaaggccggctatatttcccaagtcgtccacaagatctgcgagctggtggagaaatatgacgccgtgattgcgctcgaagacttaaattctgggttcaagaactcccgcgtgaaggtggaaaaacaggtgtatcagaaattcgagaaaatgctgatcgacaaactcaattatatggtggataagaagtccaacccgtgtgccacagggggcgcgctgaagggctatcagatcaccaacaagttcgagagcttcaagagcatgagcacccagaacgggtttattttctacatcccggcgtggctcacctccaagattgacccgagcaccggcttcgtgaacctcctgaagacaaagtatacctccattgccgacagcaagaagtttatctcctccttcgaccgcattatgtatgtgccggaggaggacctcttcgagttcgccctcgactacaaaaacttcagccgcacagatgcggattacatcaagaagtggaagctgtactcctacgggaacaggatccgcatcttcaggaatccaaaaaaaaataacgtctttgactgggaggaagtgtgcctgacatccgcctacaaggaactgttcaataaatacggcatcaattaccagcagggcgacattcgcgccctcctctgtgagcagtccgacaaagcgttttactccagcttcatggccctcatgtccctgatgctccaaatgaggaatagcatcacagggcgcaccgacgtcgacttcctcatcagcccggtgaagaactccgacgggatcttttacgactcccgcaactatgaggcgcaagagaatgcgatcctcccgaagaacgccgatgcgaacggggcctataatatcgccaggaaagtgctctgggccatcgggcagttcaaaaaggcggaggatgagaagctcgacaaggtgaaaattgccatttccaacaaggagtggctggagtacgcgcagacctccgtgaagcacggctcctctggcagctccggctctagcggctcctctggcagctccggctccaagctggagaagtttacaaactgttacagcctctccaaaaccctcaggtttaaagcgatcccggtgggcaagacccaggagaacatcgacaacaagaggctcctggtggaagacgagaagcgcgccgaagactacaagggcgtgaagaagctgctcgataggtactacctcagctttattaacgacgtgctgcacagcatcaaactcaagaatctcaacaactacatctccctcttccgcaaaaagacctctggcggctcaaaaagaaccgccgacggcagcgaattcgagcccaagaagaagaggaaagtcggaagcggagctactaacttcagcctgctgaagcaggctggagacgtggaggagaaccctggacctatggtgagcaagggcgaggagctgttcaccggggtggtgcccatcctggtcgagctggacggcgacgtaaacggccacaagttcagcgtgtccggcgagggcgagggcgatgccacctacggcaagctgaccctgaagttcatctgcaccaccggcaagctgcccgtgccctggcccaccctcgtgaccaccctgacctatggagtgcagtgcttcagccgctaccccgaccacatgaagcagcacgacttcttcaagtccgccatgcccgaaggctacgtccaggagcgcaccatcttcttcaaggacgacggcaactacaagacccgcgccgaggtgaagttcgagggcgacaccctggtgaaccgcatcgagctgaagggcatcgacttcaaggaggacggcaacatcctggggcacaagctggagtacaactacaacagccacaacgtctatatcatggccgacaagcagaagaacggcatcaaggtgaacttcaagatccgccacaacatcgaggacggcagcgtgcagctcgccgaccactaccagcagaacacccccatcggcgacggccccgtgctgctgcccgacaaccactacctgagcacccagtccgccctgagcaaagaccccaacgagaagcgcgatcacatggtcctgctggagttcgtgaccgccgccgggatcactctcggcatggacgagctgtacaagtctggtggttctcccaagaagaagaggaaagtctaaccggtcatcatcaccatcaccattgagtttaaacccgctgatcagcctcgactgtgccttctagttgccagccatctgttgtttgcccctcccccgtgccttccttgaccctggaaggtgccactcccactgtcctttcctaataaaatgaggaaattgcatcgcattgtctgagtaggtgtcattctattctggggggtggggtggggcaggacagcaagggggaggattgggaagacaatagcaggcatgctggggatgcggtgggctctatggcttctgaggcggaaagaaccagctggggctcgataccgtcgacctctagctagagcttggcgtaatcatggtcatagctgtttcctgtgtgaaattgttatccgctcacaattccacacaacatacgagccggaagcataaagtgtaaagcctagggtgcctaatgagtgagctaactcacattaattgcgttgcgctcactgcccgctttccagtcgggaaacctgtcgtgccagctgcattaatgaatcggccaacgcgcggggagaggcggtttgcgtattgggcgctcttccgcttcctcgctcactgactcgctgcgctcggtcgttcggctgcggcgagcggtatcagctcactcaaaggcggtaatacggttatccacagaatcaggggataacgcaggaaagaacatgtgagcaaaaggccagcaaaaggccaggaaccgtaaaaaggccgcgttgctggcgtttttccataggctccgcccccctgacgagcatcacaaaaatcgacgctcaagtcagaggtggcgaaacccgacaggactataaagataccaggcgtttccccctggaagctccctcgtgcgctctcctgttccgaccctgccgcttaccggatacctgtccgcctttctcccttcgggaagcgtggcgctttctcatagctcacgctgtaggtatctcagttcggtgtaggtcgttcgctccaagctgggctgtgtgcacgaaccccccgttcagcccgaccgctgcgccttatccggtaactatcgtcttgagtccaacccggtaagacacgacttatcgccactggcagcagccactggtaacaggattagcagagcgaggtatgtaggcggtgctacagagttcttgaagtggtggcctaactacggctacactagaagaacagtatttggtatctgcgctctgctgaagccagttaccttcggaaaaagagttggtagctcttgatccggcaaacaaaccaccgctggtagcggtggtttttttgtttgcaagcagcagattacgcgcagaaaaaaaggatctcaagaagatcctttgatcttttctacggggtctgacactcagtggaacgaaaactcacgttaagggattttggtcatgagattatcaaaaaggatcttcacctagatccttttaaattaaaaatgaagttttaaatcaatctaaagtatatatgagtaaacttggtctgacagttaccaatgcttaatcagtgaggcacctatctcagcgatctgtctatttcgttcatccatagttgcctgactccccgtcgtgtagataactacgatacgggagggcttaccatctggccccagtgctgcaatgataccgcgagacccacgctcaccggctccagatttatcagcaataaaccagccagccggaagggccgagcgcagaagtggtcctgcaactttatccgcctccatccagtctattaattgttgccgggaagctagagtaagtagttcgccagttaatagtttgcgcaacgttgttgccattgctacaggcatcgtggtgtcacgctcgtcgtttggtatggcttcattcagctccggttcccaacgatcaaggcgagttacatgatcccccatgttgtgcaaaaaagcggttagctccttcggtcctccgatcgttgtcagaagtaagttggccgcagtgttatcactcatggttatggcagcactgcataattctcttactgtcatgccatccgtaagatgcttttctgtgactggtgagtactcaaccaagtcattctgagaatagtgtatgcggcgaccgagttgctcttgcccggcgtcaatacgggataataccgcgccacatagcagaactttaaaagtgctcatcattggaaaacgttcttcggggcgaaaactctcaaggatcttaccgctgttgagatccagttcgatgtaacccactcgtgcacccaactgatcttcagcatcttttactttcaccagcgtttctgggtgagcaaaaacaggaaggcaaaatgccgcaaaaaagggaataagggcgacacggaaatgttgaatactcatactcttcctttttcaatattattgaagcatttatcagggttattgtctcatgagcggatacatatttgaatgtatttagaaaaataaacaaataggggttccgcgcacatttccccgaaaagtgccacctgacgtcgacggatcgggagatcgatctcccgatcccctagggtcgactctcagtacaatctgctctgatgccgcatagttaagccagtatctgctccctgcttgtgtgttggaggtcgctgagtagtgcgcgagcaaaatttaagctacaacaaggcaaggcttgaccgacaattgcatgaagaatctgcttagggttaggcgttttgcgctgcttcgcgatgtacgggccagatatacgcgtt

SEQ ID NO: 674 - DNA, 8722 bp, synthetic construct
  source 1..8722: mol_type = other DNA
gacattgattattgactagttattaatagtaatcaattacggggtcattagttcatagcccatatatggagttccgcgttacataacttacggtaaatggcccgcctggctgaccgcccaacgacccccgcccattgacgtcaataatgacgtatgttcccatagtaacgccaatagggactttccattgacgtcaatgggtggagtatttacggtaaactgcccacttggcagtacatcaagtgtatcatatgccaagtacgccccctattgacgtcaatgacggtaaatggcccgcctggcattatgcccagtacatgaccttatgggactttcctacttggcagtacatctacgtattagtcatcgctattaccatggtgatgcggttttggcagtacatcaatgggcgtggatagcggtttgactcacggggatttccaagtctccaccccattgacgtcaatgggagtttgttttggcaccaaaatcaacgggactttccaaaatgtcgtaacaactccgccccattgacgcaaatgggcggtaggcgtgtacggtgggaggtctatataagcagagctggtttagtgaaccgtcagatccgctagagatccgcggccgctaatacgactcactatagggagagccgccaccatgaaacggacagccgacggaagcgagttcgagtcaccaaagaagaagcggaaagtctctgaggttgaattttcacatgagtattggatgagacacgctcttaccttggctaagagagcaagggatgagagagaagttccagtgggagcagttcttgtgttgaacaatagagttattggagagggttggaacaggtaagtatcaaggttacaagacaggtttaaggagaccaatagaaactgggcttgtcgagacagagaagactcttgcgtttctgataggcacctattggtcttactgacatccactttgcctttctctccacagggctattggacttcatgatcctactgctcacgcagaaattatggcacttagacaaggtggacttgttatgcagaactacaggcttatcgatgctactctttatgttacattcgagccatgtgtgatgtgcgctggagcaatgattcattctaggattggaagggttgtgttcggtgttagaaactctaagaggggagctgcaggttcacttatgaacgttttgaattatcctggtatgaaccacagagtggagattactgaaggtattttggcagatgaatgtgctgcacttttgtgcgatttttacagaatgcctagacaagtgttcaacgctcaaaagaaggcacaatcttctattaactctggtggttcttctggtggttctcgcaccgagaaggagaacaaggagctggagaacctggagatcaacctccgcaaggaaatcgccaaagcgttcaagggcaatgaagggtacaagagcctcttcaagaaagacatcatcgaaactatcctcccagagtttctcgatgacaaggacgagatcgcgctggtgaactcctttaacgggttcacaaccgcgtttaccggcttctttgataacagggaaaatatgttctccgaggaggccaagtccaccagcatcgccttcaggtgtatcaacgagaacctcacccgctacatttccaatatggacattttcgagaaggtggatgcgatcttcgataagcacgaggtgcaggagatcaaagagaagattctcaattccgattatgacgtcgaggatttcttcgaaggggagttctttaattttgtgctcacacaagagggcattgacgtgtacaacgcgattatcgggggcttcgtcacagagtccggggagaagattaaggggctgaatgagtacatcaatctgtacaatcagaagaccaagcagaaactgccgaaattcaagccgctctacaagcaagtcctgtccgatagggaaagcctctccttctacggcgagggctataccagcgacgaggaggtgctggaagtcttccgcaacacactgaataagaatagcgagattttctcctccatcaagaagctcgagaagctctttaagaactttgacgagtacagctccgccgggattttcgtgaagaacgggccggcgatcagcaccatctccaaggacatctttggcgagtggaacgtcatcagggacaagtggaacgccgagtacgacgacatccacctgaagaagaaggcggtggtgaccgagaagtatgaggacgatcgcaggaagtccttcaaaaaaatcggctccttcagcctcgaacagctccaggagtatgccgatgcggatctgtccgtcgtcgagaagctgaaggaaatcatcattcagaaggtcgacgagatctataaagtgtacgggtccagcgagaagctgttcgacgccgactttgtgctcgagaagtccctcaaaaagaatgacgccgtggtggccattatgaaagacctgctcgactccgtgaagtccttcgaaaattacattaaagcgttctttggggaggggaaggaaactaacagggatgagtccttctatggcgactttgtcctcgcgtacgacatcctgctgaaggtcgaccacatttacgacgcgatccgcaactacgtgacacagaagccgtactccaaagacaagttcaagctgtacttccagaacccgcaatttatggggggctgggacaaggataaagagacagactaccgcgcgacaattctccgctatggctccaaatactatctggccatcatggacaagaagtacgcgaagtgcctgcagaagatcgacaaagacgacgtcaatggcaactatgaaaagatcaactacaagctgctgccgggcccgaacaagatgctcccgaaggtgttcttcagcaagaagtggatggcctactacaatccaagcgaggatattcagaaaatctataaaaacgggaccttcaagaagggggacatgtttaacctcaacgactgccacaagctcattgatttcttcaaggatagcatttcccgctacccgaaatggtccaatgcgtacgattttaacttctccgagacagaaaagtacaaagacatcgcgggcttttacagggaggtggaggagcaagggtataaagtttcttttgaatccgcgagcaagaaggaagtcgacaagctcgtcgaggagggcaagctctacatgttccaaatttataacaaggacttttccgacaagagccatgggaccccaaacctccacaccatgtacttcaaactgctctttgacgagaacaaccacgggcaaatcaggctgagcggcggcgccgaattattcatgcgcagggcctccctcaagaaggaagagctggtcgtccatccagccaattccccgatcgcgaacaagaacccggacaatccgaaaaagaccaccaccctgtcctacgacgtctacaaggacaaacgcttcagcgaagaccagtacgaattacacatcccaattgcgattaataagtgcccaaagaatatcttcaaaattaatacagaggtcagggtgctgctcaaacacgacgacaatccgtatgtcatcggcattgccaggggcgagcgcaatctgctctatatcgtggtcgtggatgggaagggcaatattgtggagcagtactccctgaacgagattatcaacaacttcaatgggattaggattaagaccgactatcacagcctgctcgacaagaaagaaaaagagaggtttgaggcccgccaaaactggacctccattgagaatatcaaagaattaaaggccggctatatttcccaagtcgtccacaagatctgcgagctggtggagaaatatgacgccgtgattgcgctcgaagacttaaattctgggttcaagaactcccgcgtgaaggtggaaaaacaggtgtatcagaaattcgagaaaatgctgatcgacaaactcaattatatggtggataagaagtccaacccgtgtgccacagggggcgcgctgaagggctatcagatcaccaacaagttcgagagcttcaagagcatgagcacccagaacgggtttattttctacatcccggcgtggctcacctccaagattgacccgagcaccggcttcgtgaacctcctgaagacaaagtatacctccattgccgacagcaagaagtttatctcctccttcgaccgcattatgtatgtgccggaggaggacctcttcgagttcgccctcgactacaaaaacttcagccgcacagatgcggattacatcaagaagtggaagctgtactcctacgggaacaggatccgcatcttcaggaatccaaaaaaaaataacgtctttgactgggaggaagtgtgcctgacatccgcctacaaggaactgttcaataaatacggcatcaattaccagcagggcgacattcgcgccctcctctgtgagcagtccgacaaagcgttttactccagcttcatggccctcatgtccctgatgctccaaatgaggaatagcatcacagggcgcaccgacgtcgacttcctcatcagcccggtgaagaactccgacgggatcttttacgactcccgcaactatgaggcgcaagagaatgcgatcctcccgaagaacgccgatgcgaacggggcctataatatcgccaggaaagtgctctgggccatcgggcagttcaaaaaggcggaggatgagaagctcgacaaggtgaaaattgccatttccaacaaggagtggctggagtacgcgcagacctccgtgaagcacggctcctctggcagctccggctctagcggctcctctggcagctccggctccaagctggagaagtttacaaactgttacagcctctccaaaaccctcaggtttaaagcgatcccggtgggcaagacccaggagaacatcgacaacaagaggctcctggtggaagacgagaagcgcgccgaagactacaagggcgtgaagaagctgctcgataggtactacctcagctttattaacgacgtgctgcacagcatcaaactcaagaatctcaacaactacatctccctcttccgcaaaaagacctctggcggctcaaaaagaaccgccgacggcagcgaattcgagcccaagaagaagaggaaagtcggaagcggagctactaacttcagcctgctgaagcaggctggagacgtggaggagaaccctggacctatggtgagcaagggcgaggagctgttcaccggggtggtgcccatcctggtcgagctggacggcgacgtaaacggccacaagttcagcgtgtccggcgagggcgagggcgatgccacctacggcaagctgaccctgaagttcatctgcaccaccggcaagctgcccgtgccctggcccaccctcgtgaccaccctgacctatggagtgcagtgcttcagccgctaccccgaccacatgaagcagcacgacttcttcaagtccgccatgcccgaaggctacgtccaggagcgcaccatcttcttcaaggacgacggcaactacaagacccgcgccgaggtgaagttcgagggcgacaccctggtgaaccgcatcgagctgaagggcatcgacttcaaggaggacggcaacatcctggggcacaagctggagtacaactacaacagccacaacgtctatatcatggccgacaagcagaagaacggcatcaaggtgaacttcaagatccgccacaacatcgaggacggcagcgtgcagctcgccgaccactaccagcagaacacccccatcggcgacggccccgtgctgctgcccgacaaccactacctgagcacccagtccgccctgagcaaagaccccaacgagaagcgcgatcacatggtcctgctggagttcgtgaccgccgccgggatcactctcggcatggacgagctgtacaagtctggtggttctcccaagaagaagaggaaagtctaaccggtcatcatcaccatcaccattgagtttaaacccgctgatcagcctcgactgtgccttctagttgccagccatctgttgtttgcccctcccccgtgccttccttgaccctggaaggtgccactcccactgtcctttcctaataaaatgaggaaattgcatcgcattgtctgagtaggtgtcattctattctggggggtggggtggggcaggacagcaagggggaggattgggaagacaatagcaggcatgctggggatgcggtgggctctatggcttctgaggcggaaagaaccagctggggctcgataccgtcgacctctagctagagcttggcgtaatcatggtcatagctgtttcctgtgtgaaattgttatccgctcacaattccacacaacatacgagccggaagcataaagtgtaaagcctagggtgcctaatgagtgagctaactcacattaattgcgttgcgctcactgcccgctttccagtcgggaaacctgtcgtgccagctgcattaatgaatcggccaacgcgcggggagaggcggtttgcgtattgggcgctcttccgcttcctcgctcactgactcgctgcgctcggtcgttcggctgcggcgagcggtatcagctcactcaaaggcggtaatacggttatccacagaatcaggggataacgcaggaaagaacatgtgagcaaaaggccagcaaaaggccaggaaccgtaaaaaggccgcgttgctggcgtttttccataggctccgcccccctgacgagcatcacaaaaatcgacgctcaagtcagaggtggcgaaacccgacaggactataaagataccaggcgtttccccctggaagctccctcgtgcgctctcctgttccgaccctgccgcttaccggatacctgtccgcctttctcccttcgggaagcgtggcgctttctcatagctcacgctgtaggtatctcagttcggtgtaggtcgttcgctccaagctgggctgtgtgcacgaaccccccgttcagcccgaccgctgcgccttatccggtaactatcgtcttgagtccaacccggtaagacacgacttatcgccactggcagcagccactggtaacaggattagcagagcgaggtatgtaggcggtgctacagagttcttgaagtggtggcctaactacggctacactagaagaacagtatttggtatctgcgctctgctgaagccagttaccttcggaaaaagagttggtagctcttgatccggcaaacaaaccaccgctggtagcggtggtttttttgtttgcaagcagcagattacgcgcagaaaaaaaggatctcaagaagatcctttgatcttttctacggggtctgacactcagtggaacgaaaactcacgttaagggattttggtcatgagattatcaaaaaggatcttcacctagatccttttaaattaaaaatgaagttttaaatcaatctaaagtatatatgagtaaacttggtctgacagttaccaatgcttaatcagtgaggcacctatctcagcgatctgtctatttcgttcatccatagttgcctgactccccgtcgtgtagataactacgatacgggagggcttaccatctggccccagtgctgcaatgataccgcgagacccacgctcaccggctccagatttatcagcaataaaccagccagccggaagggccgagcgcagaagtggtcctgcaactttatccgcctccatccagtctattaattgttgccgggaagctagagtaagtagttcgccagttaatagtttgcgcaacgttgttgccattgctacaggcatcgtggtgtcacgctcgtcgtttggtatggcttcattcagctccggttcccaacgatcaaggcgagttacatgatcccccatgttgtgcaaaaaagcggttagctccttcggtcctccgatcgttgtcagaagtaagttggccgcagtgttatcactcatggttatggcagcactgcataattctcttactgtcatgccatccgtaagatgcttttctgtgactggtgagtactcaaccaagtcattctgagaatagtgtatgcggcgaccgagttgctcttgcccggcgtcaatacgggataataccgcgccacatagcagaactttaaaagtgctcatcattggaaaacgttcttcggggcgaaaactctcaaggatcttaccgctgttgagatccagttcgatgtaacccactcgtgcacccaactgatcttcagcatcttttactttcaccagcgtttctgggtgagcaaaaacaggaaggcaaaatgccgcaaaaaagggaataagggcgacacggaaatgttgaatactcatactcttcctttttcaatattattgaagcatttatcagggttattgtctcatgagcggatacatatttgaatgtatttagaaaaataaacaaataggggttccgcgcacatttccccgaaaagtgccacctgacgtcgacggatcgggagatcgatctcccgatcccctagggtcgactctcagtacaatctgctctgatgccgcatagttaagccagtatctgctccctgcttgtgtgttggaggtcgctgagtagtgcgcgagcaaaatttaagctacaacaaggcaaggcttgaccgacaattgcatgaagaatctgcttagggttaggcgttttgcgctgcttcgcgatgtacgggccagatatacgcgtt

SEQ ID NO: 675 - DNA, 8716 bp, synthetic construct
  source 1..8716: mol_type = other DNA
gacattgattattgactagttattaatagtaatcaattacggggtcattagttcatagcccatatatggagttccgcgttacataacttacggtaaatggcccgcctggctgaccgcccaacgacccccgcccattgacgtcaataatgacgtatgttcccatagtaacgccaatagggactttccattgacgtcaatgggtggagtatttacggtaaactgcccacttggcagtacatcaagtgtatcatatgccaagtacgccccctattgacgtcaatgacggtaaatggcccgcctggcattatgcccagtacatgaccttatgggactttcctacttggcagtacatctacgtattagtcatcgctattaccatggtgatgcggttttggcagtacatcaatgggcgtggatagcggtttgactcacggggatttccaagtctccaccccattgacgtcaatgggagtttgttttggcaccaaaatcaacgggactttccaaaatgtcgtaacaactccgccccattgacgcaaatgggcggtaggcgtgtacggtgggaggtctatataagcagagctggtttagtgaaccgtcagatccgctagagatccgcggccgctaatacgactcactatagggagagccgccaccatgaaacggacagccgacggaagcgagttcgagtcaccaaagaagaagcggaaagtctctgaggttgaattttcacatgagtattggatgagacacgctcttaccttggctaagagagcaagggatgagagagaagttccagtgggagcagttcttgtgttgaacaatagagttattggagagggttggaacaggtaagtatcaaggttacaagacaggtttaaggagaccaatagaaactgggcttgtcgagacagagaagactcttgcgtttctgataggcacctattggtcttactgacatccactttgcctttctctccacagggctattggacttcatgatcctactgctcacgcagaaattatggcacttagacaaggtggacttgttatgcagaactacaggcttatcgatgctactctttatgttacattcgagccatgtgtgatgtgcgctggagcaatgattcattctaggattggaagggttgtgttcggtgttagaaactctaagaggggagctgcaggttcacttatgaacgttttgaattatcctggtatgaaccacagagtggagattactgaaggtattttggcagatgaatgtgctgcacttttgtgcgatttttacagaatgcctagacaagtgttcaacgctcaaaagaaggcacaatcttctattaactctggttcttctggttctcgcaccgagaaggagaacaaggagctggagaacctggagatcaacctccgcaaggaaatcgccaaagcgttcaagggcaatgaagggtacaagagcctcttcaagaaagacatcatcgaaactatcctcccagagtttctcgatgacaaggacgagatcgcgctggtgaactcctttaacgggttcacaaccgcgtttaccggcttctttgataacagggaaaatatgttctccgaggaggccaagtccaccagcatcgccttcaggtgtatcaacgagaacctcacccgctacatttccaatatggacattttcgagaaggtggatgcgatcttcgataagcacgaggtgcaggagatcaaagagaagattctcaattccgattatgacgtcgaggatttcttcgaaggggagttctttaattttgtgctcacacaagagggcattgacgtgtacaacgcgattatcgggggcttcgtcacagagtccggggagaagattaaggggctgaatgagtacatcaatctgtacaatcagaagaccaagcagaaactgccgaaattcaagccgctctacaagcaagtcctgtccgatagggaaagcctctccttctacggcgagggctataccagcgacgaggaggtgctggaagtcttccgcaacacactgaataagaatagcgagattttctcctccatcaagaagctcgagaagctctttaagaactttgacgagtacagctccgccgggattttcgtgaagaacgggccggcgatcagcaccatctccaaggacatctttggcgagtggaacgtcatcagggacaagtggaacgccgagtacgacgacatccacctgaagaagaaggcggtggtgaccgagaagtatgaggacgatcgcaggaagtccttcaaaaaaatcggctccttcagcctcgaacagctccaggagtatgccgatgcggatctgtccgtcgtcgagaagctgaaggaaatcatcattcagaaggtcgacgagatctataaagtgtacgggtccagcgagaagctgttcgacgccgactttgtgctcgagaagtccctcaaaaagaatgacgccgtggtggccattatgaaagacctgctcgactccgtgaagtccttcgaaaattacattaaagcgttctttggggaggggaaggaaactaacagggatgagtccttctatggcgactttgtcctcgcgtacgacatcctgctgaaggtcgaccacatttacgacgcgatccgcaactacgtgacacagaagccgtactccaaagacaagttcaagctgtacttccagaacccgcaatttatggggggctgggacaaggataaagagacagactaccgcgcgacaattctccgctatggctccaaatactatctggccatcatggacaagaagtacgcgaagtgcctgcagaagatcgacaaagacgacgtcaatggcaactatgaaaagatcaactacaagctgctgccgggcccgaacaagatgctcccgaaggtgttcttcagcaagaagtggatggcctactacaatccaagcgaggatattcagaaaatctataaaaacgggaccttcaagaagggggacatgtttaacctcaacgactgccacaagctcattgatttcttcaaggatagcatttcccgctacccgaaatggtccaatgcgtacgattttaacttctccgagacagaaaagtacaaagacatcgcgggcttttacagggaggtggaggagcaagggtataaagtttcttttgaatccgcgagcaagaaggaagtcgacaagctcgtcgaggagggcaagctctacatgttccaaatttataacaaggacttttccgacaagagccatgggaccccaaacctccacaccatgtacttcaaactgctctttgacgagaacaaccacgggcaaatcaggctgagcggcggcgccgaattattcatgcgcagggcctccctcaagaaggaagagctggtcgtccatccagccaattccccgatcgcgaacaagaacccggacaatccgaaaaagaccaccaccctgtcctacgacgtctacaaggacaaacgcttcagcgaagaccagtacgaattacacatcccaattgcgattaataagtgcccaaagaatatcttcaaaattaatacagaggtcagggtgctgctcaaacacgacgacaatccgtatgtcatcggcattgccaggggcgagcgcaatctgctctatatcgtggtcgtggatgggaagggcaatattgtggagcagtactccctgaacgagattatcaacaacttcaatgggattaggattaagaccgactatcacagcctgctcgacaagaaagaaaaagagaggtttgaggcccgccaaaactggacctccattgagaatatcaaagaattaaaggccggctatatttcccaagtcgtccacaagatctgcgagctggtggagaaatatgacgccgtgattgcgctcgaagacttaaattctgggttcaagaactcccgcgtgaaggtggaaaaacaggtgtatcagaaattcgagaaaatgctgatcgacaaactcaattatatggtggataagaagtccaacccgtgtgccacagggggcgcgctgaagggctatcagatcaccaacaagttcgagagcttcaagagcatgagcacccagaacgggtttattttctacatcccggcgtggctcacctccaagattgacccgagcaccggcttcgtgaacctcctgaagacaaagtatacctccattgccgacagcaagaagtttatctcctccttcgaccgcattatgtatgtgccggaggaggacctcttcgagttcgccctcgactacaaaaacttcagccgcacagatgcggattacatcaagaagtggaagctgtactcctacgggaacaggatccgcatcttcaggaatccaaaaaaaaataacgtctttgactgggaggaagtgtgcctgacatccgcctacaaggaactgttcaataaatacggcatcaattaccagcagggcgacattcgcgccctcctctgtgagcagtccgacaaagcgttttactccagcttcatggccctcatgtccctgatgctccaaatgaggaatagcatcacagggcgcaccgacgtcgacttcctcatcagcccggtgaagaactccgacgggatcttttacgactcccgcaactatgaggcgcaagagaatgcgatcctcccgaagaacgccgatgcgaacggggcctataatatcgccaggaaagtgctctgggccatcgggcagttcaaaaaggcggaggatgagaagctcgacaaggtgaaaattgccatttccaacaaggagtggctggagtacgcgcagacctccgtgaagcacggctcctctggcagctccggctctagcggctcctctggcagctccggctccaagctggagaagtttacaaactgttacagcctctccaaaaccctcaggtttaaagcgatcccggtgggcaagacccaggagaacatcgacaacaagaggctcctggtggaagacgagaagcgcgccgaagactacaagggcgtgaagaagctgctcgataggtactacctcagctttattaacgacgtgctgcacagcatcaaactcaagaatctcaacaactacatctccctcttccgcaaaaagacctctggcggctcaaaaagaaccgccgacggcagcgaattcgagcccaagaagaagaggaaagtcggaagcggagctactaacttcagcctgctgaagcaggctggagacgtggaggagaaccctggacctatggtgagcaagggcgaggagctgttcaccggggtggtgcccatcctggtcgagctggacggcgacgtaaacggccacaagttcagcgtgtccggcgagggcgagggcgatgccacctacggcaagctgaccctgaagttcatctgcaccaccggcaagctgcccgtgccctggcccaccctcgtgaccaccctgacctatggagtgcagtgcttcagccgctaccccgaccacatgaagcagcacgacttcttcaagtccgccatgcccgaaggctacgtccaggagcgcaccatcttcttcaaggacgacggcaactacaagacccgcgccgaggtgaagttcgagggcgacaccctggtgaaccgcatcgagctgaagggcatcgacttcaaggaggacggcaacatcctggggcacaagctggagtacaactacaacagccacaacgtctatatcatggccgacaagcagaagaacggcatcaaggtgaacttcaagatccgccacaacatcgaggacggcagcgtgcagctcgccgaccactaccagcagaacacccccatcggcgacggccccgtgctgctgcccgacaaccactacctgagcacccagtccgccctgagcaaagaccccaacgagaagcgcgatcacatggtcctgctggagttcgtgaccgccgccgggatcactctcggcatggacgagctgtacaagtctggtggttctcccaagaagaagaggaaagtctaaccggtcatcatcaccatcaccattgagtttaaacccgctgatcagcctcgactgtgccttctagttgccagccatctgttgtttgcccctcccccgtgccttccttgaccctggaaggtgccactcccactgtcctttcctaataaaatgaggaaattgcatcgcattgtctgagtaggtgtcattctattctggggggtggggtggggcaggacagcaagggggaggattgggaagacaatagcaggcatgctggggatgcggtgggctctatggcttctgaggcggaaagaaccagctggggctcgataccgtcgacctctagctagagcttggcgtaatcatggtcatagctgtttcctgtgtgaaattgttatccgctcacaattccacacaacatacgagccggaagcataaagtgtaaagcctagggtgcctaatgagtgagctaactcacattaattgcgttgcgctcactgcccgctttccagtcgggaaacctgtcgtgccagctgcattaatgaatcggccaacgcgcggggagaggcggtttgcgtattgggcgctcttccgcttcctcgctcactgactcgctgcgctcggtcgttcggctgcggcgagcggtatcagctcactcaaaggcggtaatacggttatccacagaatcaggggataacgcaggaaagaacatgtgagcaaaaggccagcaaaaggccaggaaccgtaaaaaggccgcgttgctggcgtttttccataggctccgcccccctgacgagcatcacaaaaatcgacgctcaagtcagaggtggcgaaacccgacaggactataaagataccaggcgtttccccctggaagctccctcgtgcgctctcctgttccgaccctgccgcttaccggatacctgtccgcctttctcccttcgggaagcgtggcgctttctcatagctcacgctgtaggtatctcagttcggtgtaggtcgttcgctccaagctgggctgtgtgcacgaaccccccgttcagcccgaccgctgcgccttatccggtaactatcgtcttgagtccaacccggtaagacacgacttatcgccactggcagcagccactggtaacaggattagcagagcgaggtatgtaggcggtgctacagagttcttgaagtggtggcctaactacggctacactagaagaacagtatttggtatctgcgctctgctgaagccagttaccttcggaaaaagagttggtagctcttgatccggcaaacaaaccaccgctggtagcggtggtttttttgtttgcaagcagcagattacgcgcagaaaaaaaggatctcaagaagatcctttgatcttttctacggggtctgacactcagtggaacgaaaactcacgttaagggattttggtcatgagattatcaaaaaggatcttcacctagatccttttaaattaaaaatgaagttttaaatcaatctaaagtatatatgagtaaacttggtctgacagttaccaatgcttaatcagtgaggcacctatctcagcgatctgtctatttcgttcatccatagttgcctgactccccgtcgtgtagataactacgatacgggagggcttaccatctggccccagtgctgcaatgataccgcgagacccacgctcaccggctccagatttatcagcaataaaccagccagccggaagggccgagcgcagaagtggtcctgcaactttatccgcctccatccagtctattaattgttgccgggaagctagagtaagtagttcgccagttaatagtttgcgcaacgttgttgccattgctacaggcatcgtggtgtcacgctcgtcgtttggtatggcttcattcagctccggttcccaacgatcaaggcgagttacatgatcccccatgttgtgcaaaaaagcggttagctccttcggtcctccgatcgttgtcagaagtaagttggccgcagtgttatcactcatggttatggcagcactgcataattctcttactgtcatgccatccgtaagatgcttttctgtgactggtgagtactcaaccaagtcattctgagaatagtgtatgcggcgaccgagttgctcttgcccggcgtcaatacgggataataccgcgccacatagcagaactttaaaagtgctcatcattggaaaacgttcttcggggcgaaaactctcaaggatcttaccgctgttgagatccagttcgatgtaacccactcgtgcacccaactgatcttcagcatcttttactttcaccagcgtttctgggtgagcaaaaacaggaaggcaaaatgccgcaaaaaagggaataagggcgacacggaaatgttgaatactcatactcttcctttttcaatattattgaagcatttatcagggttattgtctcatgagcggatacatatttgaatgtatttagaaaaataaacaaataggggttccgcgcacatttccccgaaaagtgccacctgacgtcgacggatcgggagatcgatctcccgatcccctagggtcgactctcagtacaatctgctctgatgccgcatagttaagccagtatctgctccctgcttgtgtgttggaggtcgctgagtagtgcgcgagcaaaatttaagctacaacaaggcaaggcttgaccgacaattgcatgaagaatctgcttagggttaggcgttttgcgctgcttcgcgatgtacgggccagatatacgcgtt

SEQ ID NO: 676 - DNA, 8770 bp, synthetic construct
  source 1..8770: mol_type = other DNA
gacattgattattgactagttattaatagtaatcaattacggggtcattagttcatagcccatatatggagttccgcgttacataacttacggtaaatggcccgcctggctgaccgcccaacgacccccgcccattgacgtcaataatgacgtatgttcccatagtaacgccaatagggactttccattgacgtcaatgggtggagtatttacggtaaactgcccacttggcagtacatcaagtgtatcatatgccaagtacgccccctattgacgtcaatgacggtaaatggcccgcctggcattatgcccagtacatgaccttatgggactttcctacttggcagtacatctacgtattagtcatcgctattaccatggtgatgcggttttggcagtacatcaatgggcgtggatagcggtttgactcacggggatttccaagtctccaccccattgacgtcaatgggagtttgttttggcaccaaaatcaacgggactttccaaaatgtcgtaacaactccgccccattgacgcaaatgggcggtaggcgtgtacggtgggaggtctatataagcagagctggtttagtgaaccgtcagatccgctagagatccgcggccgctaatacgactcactatagggagagccgccaccatgaaacggacagccgacggaagcgagttcgagtcaccaaagaagaagcggaaagtccgcaccgagaaggagaacaaggagctggagaacctggagatcaacctccgcaaggaaatcgccaaagcgttcaagggcaatgaagggtacaagagcctcttcaagaaagacatcatcgaaactatcctcccagagtttctcgatgacaaggacgagatcgcgctggtgaactcctttaacgggttcacaaccgcgtttaccggcttctttgataacagggaaaatatgttctccgaggaggccaagtccaccagcatcgccttcaggtgtatcaacgagaacctcacccgctacatttccaatatggacattttcgagaaggtggatgcgatcttcgataagcacgaggtgcaggagatcaaagagaagattctcaattccgattatgacgtcgaggatttcttcgaaggggagttctttaattttgtgctcacacaagagggcattgacgtgtacaacgcgattatcgggggcttcgtcacagagtccggggagaagattaaggggctgaatgagtacatcaatctgtacaatcagaagaccaagcagaaactgccgaaattcaagccgctctacaagcaagtcctgtccgatagggaaagcctctccttctacggcgagggctataccagcgacgaggaggtgctggaagtcttccgcaacacactgaataagaatagcgagattttctcctccatcaagaagctcgagaagctctttaagaactttgacgagtacagctccgccgggattttcgtgaagaacgggccggcgatcagcaccatctccaaggacatctttggcgagtggaacgtcatcagggacaagtggaacgccgagtacgacgacatccacctgaagaagaaggcggtggtgaccgagaagtatgaggacgatcgcaggaagtccttcaaaaaaatcggctccttcagcctcgaacagctccaggagtatgccgatgcggatctgtccgtcgtcgagaagctgaaggaaatcatcattcagaaggtcgacgagatctataaagtgtacgggtccagcgagaagctgttcgacgccgactttgtgctcgagaagtccctcaaaaagaatgacgccgtggtggccattatgaaagacctgctcgactccgtgaagtccttcgaaaattacattaaagcgttctttggggaggggaaggaaactaacagggatgagtccttctatggcgactttgtcctcgcgtacgacatcctgctgaaggtcgaccacatttacgacgcgatccgcaactacgtgacacagaagccgtactccaaagacaagttcaagctgtacttccagaacccgcaatttatggggggctgggacaaggataaagagacagactaccgcgcgacaattctccgctatggctccaaatactatctggccatcatggacaagaagtacgcgaagtgcctgcagaagatcgacaaagacgacgtcaatggcaactatgaaaagatcaactacaagctgctgccgggcccgaacaagatgctcccgaaggtgttcttcagcaagaagtggatggcctactacaatccaagcgaggatattcagaaaatctataaaaacgggaccttcaagaagggggacatgtttaacctcaacgactgccacaagctcattgatttcttcaaggatagcatttcccgctacccgaaatggtccaatgcgtacgattttaacttctccgagacagaaaagtacaaagacatcgcgggcttttacagggaggtggaggagcaagggtataaagtttcttttgaatccgcgagcaagaaggaagtcgacaagctcgtcgaggagggcaagctctacatgttccaaatttataacaaggacttttccgacaagagccatgggaccccaaacctccacaccatgtacttcaaactgctctttgacgagaacaaccacgggcaaatcaggctgagcggcggcgccgaattattcatgcgcagggcctccctcaagaaggaagagctggtcgtccatccagccaattccccgatcgcgaacaagaacccggacaatccgaaaaagaccaccaccctgtcctacgacgtctacaaggacaaacgcttcagcgaagaccagtacgaattacacatcccaattgcgattaataagtgcccaaagaatatcttcaaaattaatacagaggtcagggtgctgctcaaacacgacgacaatccgtatgtcatcggcattgccaggggcgagcgcaatctgctctatatcgtggtcgtggatgggaagggcaatattgtggagcagtactccctgaacgagattatcaacaacttcaatgggattaggattaagaccgactatcacagcctgctcgacaagaaagaaaaagagaggtttgaggcccgccaaaactggacctccattgagaatatcaaagaattaaaggccggctatatttcccaagtcgtccacaagatctgcgagctggtggagaaatatgacgccgtgattgcgctcgaagacttaaattctgggttcaagaactcccgcgtgaaggtggaaaaacaggtgtatcagaaattcgagaaaatgctgatcgacaaactcaattatatggtggataagaagtccaacccgtgtgccacagggggcgcgctgaagggctatcagatcaccaacaagttcgagagcttcaagagcatgagcacccagaacgggtttattttctacatcccggcgtggctcacctccaagattgacccgagcaccggcttcgtgaacctcctgaagacaaagtatacctccattgccgacagcaagaagtttatctcctccttcgaccgcattatgtatgtgccggaggaggacctcttcgagttcgccctcgactacaaaaacttcagccgcacagatgcggattacatcaagaagtggaagctgtactcctacgggaacaggatccgcatcttcaggaatccaaaaaaaaataacgtctttgactgggaggaagtgtgcctgacatccgcctacaaggaactgttcaataaatacggcatcaattaccagcagggcgacattcgcgccctcctctgtgagcagtccgacaaagcgttttactccagcttcatggccctcatgtccctgatgctccaaatgaggaatagcatcacagggcgcaccgacgtcgacttcctcatcagcccggtgaagaactccgacgggatcttttacgactcccgcaactatgaggcgcaagagaatgcgatcctcccgaagaacgccgatgcgaacggggcctataatatcgccaggaaagtgctctgggccatcgggcagttcaaaaaggcggaggatgagaagctcgacaaggtgaaaattgccatttccaacaaggagtggctggagtacgcgcagacctccgtgaagcacggctcctctggcagctccggctctagcggctcctctggcagctccggctccaagctggagaagtttacaaactgttacagcctctccaaaaccctcaggtttaaagcgatcccggtgggcaagacccaggagaacatcgacaacaagaggctcctggtggaagacgagaagcgcgccgaagactacaagggcgtgaagaagctgctcgataggtactacctcagctttattaacgacgtgctgcacagcatcaaactcaagaatctcaacaactacatctccctcttccgcaaaaagacctctggtggttctagcggcagcgagactcccgggacctcagagtccgccacacccgaaagttctggtggttcttctgaggttgaattttcacatgagtattggatgagacacgctcttaccttggctaagagagcaagggatgagagagaagttccagtgggagcagttcttgtgttgaacaatagagttattggagagggttggaacaggtaagtatcaaggttacaagacaggtttaaggagaccaatagaaactgggcttgtcgagacagagaagactcttgcgtttctgataggcacctattggtcttactgacatccactttgcctttctctccacagggctattggacttcatgatcctactgctcacgcagaaattatggcacttagacaaggtggacttgttatgcagaactacaggcttatcgatgctactctttatgttacattcgagccatgtgtgatgtgcgctggagcaatgattcattctaggattggaagggttgtgttcggtgttagaaactctaagaggggagctgcaggttcacttatgaacgttttgaattatcctggtatgaaccacagagtggagattactgaaggtattttggcagatgaatgtgctgcacttttgtgcgatttttacagaatgcctagacaagtgttcaacgctcaaaagaaggcacaatcttctattaactctggcggctcaaaaagaaccgccgacggcagcgaattcgagcccaagaagaagaggaaagtcggaagcggagctactaacttcagcctgctgaagcaggctggagacgtggaggagaaccctggacctatggtgagcaagggcgaggagctgttcaccggggtggtgcccatcctggtcgagctggacggcgacgtaaacggccacaagttcagcgtgtccggcgagggcgagggcgatgccacctacggcaagctgaccctgaagttcatctgcaccaccggcaagctgcccgtgccctggcccaccctcgtgaccaccctgacctatggagtgcagtgcttcagccgctaccccgaccacatgaagcagcacgacttcttcaagtccgccatgcccgaaggctacgtccaggagcgcaccatcttcttcaaggacgacggcaactacaagacccgcgccgaggtgaagttcgagggcgacaccctggtgaaccgcatcgagctgaagggcatcgacttcaaggaggacggcaacatcctggggcacaagctggagtacaactacaacagccacaacgtctatatcatggccgacaagcagaagaacggcatcaaggtgaacttcaagatccgccacaacatcgaggacggcagcgtgcagctcgccgaccactaccagcagaacacccccatcggcgacggccccgtgctgctgcccgacaaccactacctgagcacccagtccgccctgagcaaagaccccaacgagaagcgcgatcacatggtcctgctggagttcgtgaccgccgccgggatcactctcggcatggacgagctgtacaagtctggtggttctcccaagaagaagaggaaagtctaaccggtcatcatcaccatcaccattgagtttaaacccgctgatcagcctcgactgtgccttctagttgccagccatctgttgtttgcccctcccccgtgccttccttgaccctggaaggtgccactcccactgtcctttcctaataaaatgaggaaattgcatcgcattgtctgagtaggtgtcattctattctggggggtggggtggggcaggacagcaagggggaggattgggaagacaatagcaggcatgctggggatgcggtgggctctatggcttctgaggcggaaagaaccagctggggctcgataccgtcgacctctagctagagcttggcgtaatcatggtcatagctgtttcctgtgtgaaattgttatccgctcacaattccacacaacatacgagccggaagcataaagtgtaaagcctagggtgcctaatgagtgagctaactcacattaattgcgttgcgctcactgcccgctttccagtcgggaaacctgtcgtgccagctgcattaatgaatcggccaacgcgcggggagaggcggtttgcgtattgggcgctcttccgcttcctcgctcactgactcgctgcgctcggtcgttcggctgcggcgagcggtatcagctcactcaaaggcggtaatacggttatccacagaatcaggggataacgcaggaaagaacatgtgagcaaaaggccagcaaaaggccaggaaccgtaaaaaggccgcgttgctggcgtttttccataggctccgcccccctgacgagcatcacaaaaatcgacgctcaagtcagaggtggcgaaacccgacaggactataaagataccaggcgtttccccctggaagctccctcgtgcgctctcctgttccgaccctgccgcttaccggatacctgtccgcctttctcccttcgggaagcgtggcgctttctcatagctcacgctgtaggtatctcagttcggtgtaggtcgttcgctccaagctgggctgtgtgcacgaaccccccgttcagcccgaccgctgcgccttatccggtaactatcgtcttgagtccaacccggtaagacacgacttatcgccactggcagcagccactggtaacaggattagcagagcgaggtatgtaggcggtgctacagagttcttgaagtggtggcctaactacggctacactagaagaacagtatttggtatctgcgctctgctgaagccagttaccttcggaaaaagagttggtagctcttgatccggcaaacaaaccaccgctggtagcggtggtttttttgtttgcaagcagcagattacgcgcagaaaaaaaggatctcaagaagatcctttgatcttttctacggggtctgacactcagtggaacgaaaactcacgttaagggattttggtcatgagattatcaaaaaggatcttcacctagatccttttaaattaaaaatgaagttttaaatcaatctaaagtatatatgagtaaacttggtctgacagttaccaatgcttaatcagtgaggcacctatctcagcgatctgtctatttcgttcatccatagttgcctgactccccgtcgtgtagataactacgatacgggagggcttaccatctggccccagtgctgcaatgataccgcgagacccacgctcaccggctccagatttatcagcaataaaccagccagccggaagggccgagcgcagaagtggtcctgcaactttatccgcctccatccagtctattaattgttgccgggaagctagagtaagtagttcgccagttaatagtttgcgcaacgttgttgccattgctacaggcatcgtggtgtcacgctcgtcgtttggtatggcttcattcagctccggttcccaacgatcaaggcgagttacatgatcccccatgttgtgcaaaaaagcggttagctccttcggtcctccgatcgttgtcagaagtaagttggccgcagtgttatcactcatggttatggcagcactgcataattctcttactgtcatgccatccgtaagatgcttttctgtgactggtgagtactcaaccaagtcattctgagaatagtgtatgcggcgaccgagttgctcttgcccggcgtcaatacgggataataccgcgccacatagcagaactttaaaagtgctcatcattggaaaacgttcttcggggcgaaaactctcaaggatcttaccgctgttgagatccagttcgatgtaacccactcgtgcacccaactgatcttcagcatcttttactttcaccagcgtttctgggtgagcaaaaacaggaaggcaaaatgccgcaaaaaagggaataagggcgacacggaaatgttgaatactcatactcttcctttttcaatattattgaagcatttatcagggttattgtctcatgagcggatacatatttgaatgtatttagaaaaataaacaaataggggttccgcgcacatttccccgaaaagtgccacctgacgtcgacggatcgggagatcgatctcccgatcccctagggtcgactctcagtacaatctgctctgatgccgcatagttaagccagtatctgctccctgcttgtgtgttggaggtcgctgagtagtgcgcgagcaaaatttaagctacaacaaggcaaggcttgaccgacaattgcatgaagaatctgcttagggttaggcgttttgcgctgcttcgcgatgtacgggccagatatacgcgtt

SEQ ID NO: 677 - DNA, 8746 bp, synthetic construct
  source 1..8746: mol_type = other DNA
gacattgattattgactagttattaatagtaatcaattacggggtcattagttcatagcccatatatggagttccgcgttacataacttacggtaaatggcccgcctggctgaccgcccaacgacccccgcccattgacgtcaataatgacgtatgttcccatagtaacgccaatagggactttccattgacgtcaatgggtggagtatttacggtaaactgcccacttggcagtacatcaagtgtatcatatgccaagtacgccccctattgacgtcaatgacggtaaatggcccgcctggcattatgcccagtacatgaccttatgggactttcctacttggcagtacatctacgtattagtcatcgctattaccatggtgatgcggttttggcagtacatcaatgggcgtggatagcggtttgactcacggggatttccaagtctccaccccattgacgtcaatgggagtttgttttggcaccaaaatcaacgggactttccaaaatgtcgtaacaactccgccccattgacgcaaatgggcggtaggcgtgtacggtgggaggtctatataagcagagctggtttagtgaaccgtcagatccgctagagatccgcggccgctaatacgactcactatagggagagccgccaccatgaaacggacagccgacggaagcgagttcgagtcaccaaagaagaagcggaaagtccgcaccgagaaggagaacaaggagctggagaacctggagatcaacctccgcaaggaaatcgccaaagcgttcaagggcaatgaagggtacaagagcctcttcaagaaagacatcatcgaaactatcctcccagagtttctcgatgacaaggacgagatcgcgctggtgaactcctttaacgggttcacaaccgcgtttaccggcttctttgataacagggaaaatatgttctccgaggaggccaagtccaccagcatcgccttcaggtgtatcaacgagaacctcacccgctacatttccaatatggacattttcgagaaggtggatgcgatcttcgataagcacgaggtgcaggagatcaaagagaagattctcaattccgattatgacgtcgaggatttcttcgaaggggagttctttaattttgtgctcacacaagagggcattgacgtgtacaacgcgattatcgggggcttcgtcacagagtccggggagaagattaaggggctgaatgagtacatcaatctgtacaatcagaagaccaagcagaaactgccgaaattcaagccgctctacaagcaagtcctgtccgatagggaaagcctctccttctacggcgagggctataccagcgacgaggaggtgctggaagtcttccgcaacacactgaataagaatagcgagattttctcctccatcaagaagctcgagaagctctttaagaactttgacgagtacagctccgccgggattttcgtgaagaacgggccggcgatcagcaccatctccaaggacatctttggcgagtggaacgtcatcagggacaagtggaacgccgagtacgacgacatccacctgaagaagaaggcggtggtgaccgagaagtatgaggacgatcgcaggaagtccttcaaaaaaatcggctccttcagcctcgaacagctccaggagtatgccgatgcggatctgtccgtcgtcgagaagctgaaggaaatcatcattcagaaggtcgacgagatctataaagtgtacgggtccagcgagaagctgttcgacgccgactttgtgctcgagaagtccctcaaaaagaatgacgccgtggtggccattatgaaagacctgctcgactccgtgaagtccttcgaaaattacattaaagcgttctttggggaggggaaggaaactaacagggatgagtccttctatggcgactttgtcctcgcgtacgacatcctgctgaaggtcgaccacatttacgacgcgatccgcaactacgtgacacagaagccgtactccaaagacaagttcaagctgtacttccagaacccgcaatttatggggggctgggacaaggataaagagacagactaccgcgcgacaattctccgctatggctccaaatactatctggccatcatggacaagaagtacgcgaagtgcctgcagaagatcgacaaagacgacgtcaatggcaactatgaaaagatcaactacaagctgctgccgggcccgaacaagatgctcccgaaggtgttcttcagcaagaagtggatggcctactacaatccaagcgaggatattcagaaaatctataaaaacgggaccttcaagaagggggacatgtttaacctcaacgactgccacaagctcattgatttcttcaaggatagcatttcccgctacccgaaatggtccaatgcgtacgattttaacttctccgagacagaaaagtacaaagacatcgcgggcttttacagggaggtggaggagcaagggtataaagtttcttttgaatccgcgagcaagaaggaagtcgacaagctcgtcgaggagggcaagctctacatgttccaaatttataacaaggacttttccgacaagagccatgggaccccaaacctccacaccatgtacttcaaactgctctttgacgagaacaaccacgggcaaatcaggctgagcggcggcgccgaattattcatgcgcagggcctccctcaagaaggaagagctggtcgtccatccagccaattccccgatcgcgaacaagaacccggacaatccgaaaaagaccaccaccctgtcctacgacgtctacaaggacaaacgcttcagcgaagaccagtacgaattacacatcccaattgcgattaataagtgcccaaagaatatcttcaaaattaatacagaggtcagggtgctgctcaaacacgacgacaatccgtatgtcatcggcattgccaggggcgagcgcaatctgctctatatcgtggtcgtggatgggaagggcaatattgtggagcagtactccctgaacgagattatcaacaacttcaatgggattaggattaagaccgactatcacagcctgctcgacaagaaagaaaaagagaggtttgaggcccgccaaaactggacctccattgagaatatcaaagaattaaaggccggctatatttcccaagtcgtccacaagatctgcgagctggtggagaaatatgacgccgtgattgcgctcgaagacttaaattctgggttcaagaactcccgcgtgaaggtggaaaaacaggtgtatcagaaattcgagaaaatgctgatcgacaaactcaattatatggtggataagaagtccaacccgtgtgccacagggggcgcgctgaagggctatcagatcaccaacaagttcgagagcttcaagagcatgagcacccagaacgggtttattttctacatcccggcgtggctcacctccaagattgacccgagcaccggcttcgtgaacctcctgaagacaaagtatacctccattgccgacagcaagaagtttatctcctccttcgaccgcattatgtatgtgccggaggaggacctcttcgagttcgccctcgactacaaaaacttcagccgcacagatgcggattacatcaagaagtggaagctgtactcctacgggaacaggatccgcatcttcaggaatccaaaaaaaaataacgtctttgactgggaggaagtgtgcctgacatccgcctacaaggaactgttcaataaatacggcatcaattaccagcagggcgacattcgcgccctcctctgtgagcagtccgacaaagcgttttactccagcttcatggccctcatgtccctgatgctccaaatgaggaatagcatcacagggcgcaccgacgtcgacttcctcatcagcccggtgaagaactccgacgggatcttttacgactcccgcaactatgaggcgcaagagaatgcgatcctcccgaagaacgccgatgcgaacggggcctataatatcgccaggaaagtgctctgggccatcgggcagttcaaaaaggcggaggatgagaagctcgacaaggtgaaaattgccatttccaacaaggagtggctggagtacgcgcagacctccgtgaagcacggctcctctggcagctccggctctagcggctcctctggcagctccggctccaagctggagaagtttacaaactgttacagcctctccaaaaccctcaggtttaaagcgatcccggtgggcaagacccaggagaacatcgacaacaagaggctcctggtggaagacgagaagcgcgccgaagactacaagggcgtgaagaagctgctcgataggtactacctcagctttattaacgacgtgctgcacagcatcaaactcaagaatctcaacaactacatctccctcttccgcaaaaagaccagcggcagcgagactcccgggacctcagagtccgccacacccgaaagttctgaggttgaattttcacatgagtattggatgagacacgctcttaccttggctaagagagcaagggatgagagagaagttccagtgggagcagttcttgtgttgaacaatagagttattggagagggttggaacaggtaagtatcaaggttacaagacaggtttaaggagaccaatagaaactgggcttgtcgagacagagaagactcttgcgtttctgataggcacctattggtcttactgacatccactttgcctttctctccacagggctattggacttcatgatcctactgctcacgcagaaattatggcacttagacaaggtggacttgttatgcagaactacaggcttatcgatgctactctttatgttacattcgagccatgtgtgatgtgcgctggagcaatgattcattctaggattggaagggttgtgttcggtgttagaaactctaagaggggagctgcaggttcacttatgaacgttttgaattatcctggtatgaaccacagagtggagattactgaaggtattttggcagatgaatgtgctgcacttttgtgcgatttttacagaatgcctagacaagtgttcaacgctcaaaagaaggcacaatcttctattaactctggcggctcaaaaagaaccgccgacggcagcgaattcgagcccaagaagaagaggaaagtcggaagcggagctactaacttcagcctgctgaagcaggctggagacgtggaggagaaccctggacctatggtgagcaagggcgaggagctgttcaccggggtggtgcccatcctggtcgagctggacggcgacgtaaacggccacaagttcagcgtgtccggcgagggcgagggcgatgccacctacggcaagctgaccctgaagttcatctgcaccaccggcaagctgcccgtgccctggcccaccctcgtgaccaccctgacctatggagtgcagtgcttcagccgctaccccgaccacatgaagcagcacgacttcttcaagtccgccatgcccgaaggctacgtccaggagcgcaccatcttcttcaaggacgacggcaactacaagacccgcgccgaggtgaagttcgagggcgacaccctggtgaaccgcatcgagctgaagggcatcgacttcaaggaggacggcaacatcctggggcacaagctggagtacaactacaacagccacaacgtctatatcatggccgacaagcagaagaacggcatcaaggtgaacttcaagatccgccacaacatcgaggacggcagcgtgcagctcgccgaccactaccagcagaacacccccatcggcgacggccccgtgctgctgcccgacaaccactacctgagcacccagtccgccctgagcaaagaccccaacgagaagcgcgatcacatggtcctgctggagttcgtgaccgccgccgggatcactctcggcatggacgagctgtacaagtctggtggttctcccaagaagaagaggaaagtctaaccggtcatcatcaccatcaccattgagtttaaacccgctgatcagcctcgactgtgccttctagttgccagccatctgttgtttgcccctcccccgtgccttccttgaccctggaaggtgccactcccactgtcctttcctaataaaatgaggaaattgcatcgcattgtctgagtaggtgtcattctattctggggggtggggtggggcaggacagcaagggggaggattgggaagacaatagcaggcatgctggggatgcggtgggctctatggcttctgaggcggaaagaaccagctggggctcgataccgtcgacctctagctagagcttggcgtaatcatggtcatagctgtttcctgtgtgaaattgttatccgctcacaattccacacaacatacgagccggaagcataaagtgtaaagcctagggtgcctaatgagtgagctaactcacattaattgcgttgcgctcactgcccgctttccagtcgggaaacctgtcgtgccagctgcattaatgaatcggccaacgcgcggggagaggcggtttgcgtattgggcgctcttccgcttcctcgctcactgactcgctgcgctcggtcgttcggctgcggcgagcggtatcagctcactcaaaggcggtaatacggttatccacagaatcaggggataacgcaggaaagaacatgtgagcaaaaggccagcaaaaggccaggaaccgtaaaaaggccgcgttgctggcgtttttccataggctccgcccccctgacgagcatcacaaaaatcgacgctcaagtcagaggtggcgaaacccgacaggactataaagataccaggcgtttccccctggaagctccctcgtgcgctctcctgttccgaccctgccgcttaccggatacctgtccgcctttctcccttcgggaagcgtggcgctttctcatagctcacgctgtaggtatctcagttcggtgtaggtcgttcgctccaagctgggctgtgtgcacgaaccccccgttcagcccgaccgctgcgccttatccggtaactatcgtcttgagtccaacccggtaagacacgacttatcgccactggcagcagccactggtaacaggattagcagagcgaggtatgtaggcggtgctacagagttcttgaagtggtggcctaactacggctacactagaagaacagtatttggtatctgcgctctgctgaagccagttaccttcggaaaaagagttggtagctcttgatccggcaaacaaaccaccgctggtagcggtggtttttttgtttgcaagcagcagattacgcgcagaaaaaaaggatctcaagaagatcctttgatcttttctacggggtctgacactcagtggaacgaaaactcacgttaagggattttggtcatgagattatcaaaaaggatcttcacctagatccttttaaattaaaaatgaagttttaaatcaatctaaagtatatatgagtaaacttggtctgacagttaccaatgcttaatcagtgaggcacctatctcagcgatctgtctatttcgttcatccatagttgcctgactccccgtcgtgtagataactacgatacgggagggcttaccatctggccccagtgctgcaatgataccgcgagacccacgctcaccggctccagatttatcagcaataaaccagccagccggaagggccgagcgcagaagtggtcctgcaactttatccgcctccatccagtctattaattgttgccgggaagctagagtaagtagttcgccagttaatagtttgcgcaacgttgttgccattgctacaggcatcgtggtgtcacgctcgtcgtttggtatggcttcattcagctccggttcccaacgatcaaggcgagttacatgatcccccatgttgtgcaaaaaagcggttagctccttcggtcctccgatcgttgtcagaagtaagttggccgcagtgttatcactcatggttatggcagcactgcataattctcttactgtcatgccatccgtaagatgcttttctgtgactggtgagtactcaaccaagtcattctgagaatagtgtatgcggcgaccgagttgctcttgcccggcgtcaatacgggataataccgcgccacatagcagaactttaaaagtgctcatcattggaaaacgttcttcggggcgaaaactctcaaggatcttaccgctgttgagatccagttcgatgtaacccactcgtgcacccaactgatcttcagcatcttttactttcaccagcgtttctgggtgagcaaaaacaggaaggcaaaatgccgcaaaaaagggaataagggcgacacggaaatgttgaatactcatactcttcctttttcaatattattgaagcatttatcagggttattgtctcatgagcggatacatatttgaatgtatttagaaaaataaacaaataggggttccgcgcacatttccccgaaaagtgccacctgacgtcgacggatcgggagatcgatctcccgatcccctagggtcgactctcagtacaatctgctctgatgccgcatagttaagccagtatctgctccctgcttgtgtgttggaggtcgctgagtagtgcgcgagcaaaatttaagctacaacaaggcaaggcttgaccgacaattgcatgaagaatctgcttagggttaggcgttttgcgctgcttcgcgatgtacgggccagatatacgcgtt

SEQ ID NO: 678 - DNA, 8734 bp, synthetic construct
  source 1..8734: mol_type = other DNA
gacattgattattgactagttattaatagtaatcaattacggggtcattagttcatagcccatatatggagttccgcgttacataacttacggtaaatggcccgcctggctgaccgcccaacgacccccgcccattgacgtcaataatgacgtatgttcccatagtaacgccaatagggactttccattgacgtcaatgggtggagtatttacggtaaactgcccacttggcagtacatcaagtgtatcatatgccaagtacgccccctattgacgtcaatgacggtaaatggcccgcctggcattatgcccagtacatgaccttatgggactttcctacttggcagtacatctacgtattagtcatcgctattaccatggtgatgcggttttggcagtacatcaatgggcgtggatagcggtttgactcacggggatttccaagtctccaccccattgacgtcaatgggagtttgttttggcaccaaaatcaacgggactttccaaaatgtcgtaacaactccgccccattgacgcaaatgggcggtaggcgtgtacggtgggaggtctatataagcagagctggtttagtgaaccgtcagatccgctagagatccgcggccgctaatacgactcactatagggagagccgccaccatgaaacggacagccgacggaagcgagttcgagtcaccaaagaagaagcggaaagtccgcaccgagaaggagaacaaggagctggagaacctggagatcaacctccgcaaggaaatcgccaaagcgttcaagggcaatgaagggtacaagagcctcttcaagaaagacatcatcgaaactatcctcccagagtttctcgatgacaaggacgagatcgcgctggtgaactcctttaacgggttcacaaccgcgtttaccggcttctttgataacagggaaaatatgttctccgaggaggccaagtccaccagcatcgccttcaggtgtatcaacgagaacctcacccgctacatttccaatatggacattttcgagaaggtggatgcgatcttcgataagcacgaggtgcaggagatcaaagagaagattctcaattccgattatgacgtcgaggatttcttcgaaggggagttctttaattttgtgctcacacaagagggcattgacgtgtacaacgcgattatcgggggcttcgtcacagagtccggggagaagattaaggggctgaatgagtacatcaatctgtacaatcagaagaccaagcagaaactgccgaaattcaagccgctctacaagcaagtcctgtccgatagggaaagcctctccttctacggcgagggctataccagcgacgaggaggtgctggaagtcttccgcaacacactgaataagaatagcgagattttctcctccatcaagaagctcgagaagctctttaagaactttgacgagtacagctccgccgggattttcgtgaagaacgggccggcgatcagcaccatctccaaggacatctttggcgagtggaacgtcatcagggacaagtggaacgccgagtacgacgacatccacctgaagaagaaggcggtggtgaccgagaagtatgaggacgatcgcaggaagtccttcaaaaaaatcggctccttcagcctcgaacagctccaggagtatgccgatgcggatctgtccgtcgtcgagaagctgaaggaaatcatcattcagaaggtcgacgagatctataaagtgtacgggtccagcgagaagctgttcgacgccgactttgtgctcgagaagtccctcaaaaagaatgacgccgtggtggccattatgaaagacctgctcgactccgtgaagtccttcgaaaattacattaaagcgttctttggggaggggaaggaaactaacagggatgagtccttctatggcgactttgtcctcgcgtacgacatcctgctgaaggtcgaccacatttacgacgcgatccgcaactacgtgacacagaagccgtactccaaagacaagttcaagctgtacttccagaacccgcaatttatggggggctgggacaaggataaagagacagactaccgcgcgacaattctccgctatggctccaaatactatctggccatcatggacaagaagtacgcgaagtgcctgcagaagatcgacaaagacgacgtcaatggcaactatgaaaagatcaactacaagctgctgccgggcccgaacaagatgctcccgaaggtgttcttcagcaagaagtggatggcctactacaatccaagcgaggatattcagaaaatctataaaaacgggaccttcaagaagggggacatgtttaacctcaacgactgccacaagctcattgatttcttcaaggatagcatttcccgctacccgaaatggtccaatgcgtacgattttaacttctccgagacagaaaagtacaaagacatcgcgggcttttacagggaggtggaggagcaagggtataaagtttcttttgaatccgcgagcaagaaggaagtcgacaagctcgtcgaggagggcaagctctacatgttccaaatttataacaaggacttttccgacaagagccatgggaccccaaacctccacaccatgtacttcaaactgctctttgacgagaacaaccacgggcaaatcaggctgagcggcggcgccgaattattcatgcgcagggcctccctcaagaaggaagagctggtcgtccatccagccaattccccgatcgcgaacaagaacccggacaatccgaaaaagaccaccaccctgtcctacgacgtctacaaggacaaacgcttcagcgaagaccagtacgaattacacatcccaattgcgattaataagtgcccaaagaatatcttcaaaattaatacagaggtcagggtgctgctcaaacacgacgacaatccgtatgtcatcggcattgccaggggcgagcgcaatctgctctatatcgtggtcgtggatgggaagggcaatattgtggagcagtactccctgaacgagattatcaacaacttcaatgggattaggattaagaccgactatcacagcctgctcgacaagaaagaaaaagagaggtttgaggcccgccaaaactggacctccattgagaatatcaaagaattaaaggccggctatatttcccaagtcgtccacaagatctgcgagctggtggagaaatatgacgccgtgattgcgctcgaagacttaaattctgggttcaagaactcccgcgtgaaggtggaaaaacaggtgtatcagaaattcgagaaaatgctgatcgacaaactcaattatatggtggataagaagtccaacccgtgtgccacagggggcgcgctgaagggctatcagatcaccaacaagttcgagagcttcaagagcatgagcacccagaacgggtttattttctacatcccggcgtggctcacctccaagattgacccgagcaccggcttcgtgaacctcctgaagacaaagtatacctccattgccgacagcaagaagtttatctcctccttcgaccgcattatgtatgtgccggaggaggacctcttcgagttcgccctcgactacaaaaacttcagccgcacagatgcggattacatcaagaagtggaagctgtactcctacgggaacaggatccgcatcttcaggaatccaaaaaaaaataacgtctttgactgggaggaagtgtgcctgacatccgcctacaaggaactgttcaataaatacggcatcaattaccagcagggcgacattcgcgccctcctctgtgagcagtccgacaaagcgttttactccagcttcatggccctcatgtccctgatgctccaaatgaggaatagcatcacagggcgcaccgacgtcgacttcctcatcagcccggtgaagaactccgacgggatcttttacgactcccgcaactatgaggcgcaagagaatgcgatcctcccgaagaacgccgatgcgaacggggcctataatatcgccaggaaagtgctctgggccatcgggcagttcaaaaaggcggaggatgagaagctcgacaaggtgaaaattgccatttccaacaaggagtggctggagtacgcgcagacctccgtgaagcacggctcctctggcagctccggctctagcggctcctctggcagctccggctccaagctggagaagtttacaaactgttacagcctctccaaaaccctcaggtttaaagcgatcccggtgggcaagacccaggagaacatcgacaacaagaggctcctggtggaagacgagaagcgcgccgaagactacaagggcgtgaagaagctgctcgataggtactacctcagctttattaacgacgtgctgcacagcatcaaactcaagaatctcaacaactacatctccctcttccgcaaaaagacctctggtggttcttctggtggttcttctggtggttcttctgaggttgaattttcacatgagtattggatgagacacgctcttaccttggctaagagagcaagggatgagagagaagttccagtgggagcagttcttgtgttgaacaatagagttattggagagggttggaacaggtaagtatcaaggttacaagacaggtttaaggagaccaatagaaactgggcttgtcgagacagagaagactcttgcgtttctgataggcacctattggtcttactgacatccactttgcctttctctccacagggctattggacttcatgatcctactgctcacgcagaaattatggcacttagacaaggtggacttgttatgcagaactacaggcttatcgatgctactctttatgttacattcgagccatgtgtgatgtgcgctggagcaatgattcattctaggattggaagggttgtgttcggtgttagaaactctaagaggggagctgcaggttcacttatgaacgttttgaattatcctggtatgaaccacagagtggagattactgaaggtattttggcagatgaatgtgctgcacttttgtgcgatttttacagaatgcctagacaagtgttcaacgctcaaaagaaggcacaatcttctattaactctggcggctcaaaaagaaccgccgacggcagcgaattcgagcccaagaagaagaggaaagtcggaagcggagctactaacttcagcctgctgaagcaggctggagacgtggaggagaaccctggacctatggtgagcaagggcgaggagctgttcaccggggtggtgcccatcctggtcgagctggacggcgacgtaaacggccacaagttcagcgtgtccggcgagggcgagggcgatgccacctacggcaagctgaccctgaagttcatctgcaccaccggcaagctgcccgtgccctggcccaccctcgtgaccaccctgacctatggagtgcagtgcttcagccgctaccccgaccacatgaagcagcacgacttcttcaagtccgccatgcccgaaggctacgtccaggagcgcaccatcttcttcaaggacgacggcaactacaagacccgcgccgaggtgaagttcgagggcgacaccctggtgaaccgcatcgagctgaagggcatcgacttcaaggaggacggcaacatcctggggcacaagctggagtacaactacaacagccacaacgtctatatcatggccgacaagcagaagaacggcatcaaggtgaacttcaagatccgccacaacatcgaggacggcagcgtgcagctcgccgaccactaccagcagaacacccccatcggcgacggccccgtgctgctgcccgacaaccactacctgagcacccagtccgccctgagcaaagaccccaacgagaagcgcgatcacatggtcctgctggagttcgtgaccgccgccgggatcactctcggcatggacgagctgtacaagtctggtggttctcccaagaagaagaggaaagtctaaccggtcatcatcaccatcaccattgagtttaaacccgctgatcagcctcgactgtgccttctagttgccagccatctgttgtttgcccctcccccgtgccttccttgaccctggaaggtgccactcccactgtcctttcctaataaaatgaggaaattgcatcgcattgtctgagtaggtgtcattctattctggggggtggggtggggcaggacagcaagggggaggattgggaagacaatagcaggcatgctggggatgcggtgggctctatggcttctgaggcggaaagaaccagctggggctcgataccgtcgacctctagctagagcttggcgtaatcatggtcatagctgtttcctgtgtgaaattgttatccgctcacaattccacacaacatacgagccggaagcataaagtgtaaagcctagggtgcctaatgagtgagctaactcacattaattgcgttgcgctcactgcccgctttccagtcgggaaacctgtcgtgccagctgcattaatgaatcggccaacgcgcggggagaggcggtttgcgtattgggcgctcttccgcttcctcgctcactgactcgctgcgctcggtcgttcggctgcggcgagcggtatcagctcactcaaaggcggtaatacggttatccacagaatcaggggataacgcaggaaagaacatgtgagcaaaaggccagcaaaaggccaggaaccgtaaaaaggccgcgttgctggcgtttttccataggctccgcccccctgacgagcatcacaaaaatcgacgctcaagtcagaggtggcgaaacccgacaggactataaagataccaggcgtttccccctggaagctccctcgtgcgctctcctgttccgaccctgccgcttaccggatacctgtccgcctttctcccttcgggaagcgtggcgctttctcatagctcacgctgtaggtatctcagttcggtgtaggtcgttcgctccaagctgggctgtgtgcacgaaccccccgttcagcccgaccgctgcgccttatccggtaactatcgtcttgagtccaacccggtaagacacgacttatcgccactggcagcagccactggtaacaggattagcagagcgaggtatgtaggcggtgctacagagttcttgaagtggtggcctaactacggctacactagaagaacagtatttggtatctgcgctctgctgaagccagttaccttcggaaaaagagttggtagctcttgatccggcaaacaaaccaccgctggtagcggtggtttttttgtttgcaagcagcagattacgcgcagaaaaaaaggatctcaagaagatcctttgatcttttctacggggtctgacactcagtggaacgaaaactcacgttaagggattttggtcatgagattatcaaaaaggatcttcacctagatccttttaaattaaaaatgaagttttaaatcaatctaaagtatatatgagtaaacttggtctgacagttaccaatgcttaatcagtgaggcacctatctcagcgatctgtctatttcgttcatccatagttgcctgactccccgtcgtgtagataactacgatacgggagggcttaccatctggccccagtgctgcaatgataccgcgagacccacgctcaccggctccagatttatcagcaataaaccagccagccggaagggccgagcgcagaagtggtcctgcaactttatccgcctccatccagtctattaattgttgccgggaagctagagtaagtagttcgccagttaatagtttgcgcaacgttgttgccattgctacaggcatcgtggtgtcacgctcgtcgtttggtatggcttcattcagctccggttcccaacgatcaaggcgagttacatgatcccccatgttgtgcaaaaaagcggttagctccttcggtcctccgatcgttgtcagaagtaagttggccgcagtgttatcactcatggttatggcagcactgcataattctcttactgtcatgccatccgtaagatgcttttctgtgactggtgagtactcaaccaagtcattctgagaatagtgtatgcggcgaccgagttgctcttgcccggcgtcaatacgggataataccgcgccacatagcagaactttaaaagtgctcatcattggaaaacgttcttcggggcgaaaactctcaaggatcttaccgctgttgagatccagttcgatgtaacccactcgtgcacccaactgatcttcagcatcttttactttcaccagcgtttctgggtgagcaaaaacaggaaggcaaaatgccgcaaaaaagggaataagggcgacacggaaatgttgaatactcatactcttcctttttcaatattattgaagcatttatcagggttattgtctcatgagcggatacatatttgaatgtatttagaaaaataaacaaataggggttccgcgcacatttccccgaaaagtgccacctgacgtcgacggatcgggagatcgatctcccgatcccctagggtcgactctcagtacaatctgctctgatgccgcatagttaagccagtatctgctccctgcttgtgtgttggaggtcgctgagtagtgcgcgagcaaaatttaagctacaacaaggcaaggcttgaccgacaattgcatgaagaatctgcttagggttaggcgttttgcgctgcttcgcgatgtacgggccagatatacgcgtt

SEQ ID NO: 679 - DNA, 8722 bp, synthetic construct
  source 1..8722: mol_type = other DNA
gacattgattattgactagttattaatagtaatcaattacggggtcattagttcatagcccatatatggagttccgcgttacataacttacggtaaatggcccgcctggctgaccgcccaacgacccccgcccattgacgtcaataatgacgtatgttcccatagtaacgccaatagggactttccattgacgtcaatgggtggagtatttacggtaaactgcccacttggcagtacatcaagtgtatcatatgccaagtacgccccctattgacgtcaatgacggtaaatggcccgcctggcattatgcccagtacatgaccttatgggactttcctacttggcagtacatctacgtattagtcatcgctattaccatggtgatgcggttttggcagtacatcaatgggcgtggatagcggtttgactcacggggatttccaagtctccaccccattgacgtcaatgggagtttgttttggcaccaaaatcaacgggactttccaaaatgtcgtaacaactccgccccattgacgcaaatgggcggtaggcgtgtacggtgggaggtctatataagcagagctggtttagtgaaccgtcagatccgctagagatccgcggccgctaatacgactcactatagggagagccgccaccatgaaacggacagccgacggaagcgagttcgagtcaccaaagaagaagcggaaagtccgcaccgagaaggagaacaaggagctggagaacctggagatcaacctccgcaaggaaatcgccaaagcgttcaagggcaatgaagggtacaagagcctcttcaagaaagacatcatcgaaactatcctcccagagtttctcgatgacaaggacgagatcgcgctggtgaactcctttaacgggttcacaaccgcgtttaccggcttctttgataacagggaaaatatgttctccgaggaggccaagtccaccagcatcgccttcaggtgtatcaacgagaacctcacccgctacatttccaatatggacattttcgagaaggtggatgcgatcttcgataagcacgaggtgcaggagatcaaagagaagattctcaattccgattatgacgtcgaggatttcttcgaaggggagttctttaattttgtgctcacacaagagggcattgacgtgtacaacgcgattatcgggggcttcgtcacagagtccggggagaagattaaggggctgaatgagtacatcaatctgtacaatcagaagaccaagcagaaactgccgaaattcaagccgctctacaagcaagtcctgtccgatagggaaagcctctccttctacggcgagggctataccagcgacgaggaggtgctggaagtcttccgcaacacactgaataagaatagcgagattttctcctccatcaagaagctcgagaagctctttaagaactttgacgagtacagctccgccgggattttcgtgaagaacgggccggcgatcagcaccatctccaaggacatctttggcgagtggaacgtcatcagggacaagtggaacgccgagtacgacgacatccacctgaagaagaaggcggtggtgaccgagaagtatgaggacgatcgcaggaagtccttcaaaaaaatcggctccttcagcctcgaacagctccaggagtatgccgatgcggatctgtccgtcgtcgagaagctgaaggaaatcatcattcagaaggtcgacgagatctataaagtgtacgggtccagcgagaagctgttcgacgccgactttgtgctcgagaagtccctcaaaaagaatgacgccgtggtggccattatgaaagacctgctcgactccgtgaagtccttcgaaaattacattaaagcgttctttggggaggggaaggaaactaacagggatgagtccttctatggcgactttgtcctcgcgtacgacatcctgctgaaggtcgaccacatttacgacgcgatccgcaactacgtgacacagaagccgtactccaaagacaagttcaagctgtacttccagaacccgcaatttatggggggctgggacaaggataaagagacagactaccgcgcgacaattctccgctatggctccaaatactatctggccatcatggacaagaagtacgcgaagtgcctgcagaagatcgacaaagacgacgtcaatggcaactatgaaaagatcaactacaagctgctgccgggcccgaacaagatgctcccgaaggtgttcttcagcaagaagtggatggcctactacaatccaagcgaggatattcagaaaatctataaaaacgggaccttcaagaagggggacatgtttaacctcaacgactgccacaagctcattgatttcttcaaggatagcatttcccgctacccgaaatggtccaatgcgtacgattttaacttctccgagacagaaaagtacaaagacatcgcgggcttttacagggaggtggaggagcaagggtataaagtttcttttgaatccgcgagcaagaaggaagtcgacaagctcgtcgaggagggcaagctctacatgttccaaatttataacaaggacttttccgacaagagccatgggaccccaaacctccacaccatgtacttcaaactgctctttgacgagaacaaccacgggcaaatcaggctgagcggcggcgccgaattattcatgcgcagggcctccctcaagaaggaagagctggtcgtccatccagccaattccccgatcgcgaacaagaacccggacaatccgaaaaagaccaccaccctgtcctacgacgtctacaaggacaaacgcttcagcgaagaccagtacgaattacacatcccaattgcgattaataagtgcccaaagaatatcttcaaaattaatacagaggtcagggtgctgctcaaacacgacgacaatccgtatgtcatcggcattgccaggggcgagcgcaatctgctctatatcgtggtcgtggatgggaagggcaatattgtggagcagtactccctgaacgagattatcaacaacttcaatgggattaggattaagaccgactatcacagcctgctcgacaagaaagaaaaagagaggtttgaggcccgccaaaactggacctccattgagaatatcaaagaattaaaggccggctatatttcccaagtcgtccacaagatctgcgagctggtggagaaatatgacgccgtgattgcgctcgaagacttaaattctgggttcaagaactcccgcgtgaaggtggaaaaacaggtgtatcagaaattcgagaaaatgctgatcgacaaactcaattatatggtggataagaagtccaacccgtgtgccacagggggcgcgctgaagggctatcagatcaccaacaagttcgagagcttcaagagcatgagcacccagaacgggtttattttctacatcccggcgtggctcacctccaagattgacccgagcaccggcttcgtgaacctcctgaagacaaagtatacctccattgccgacagcaagaagtttatctcctccttcgaccgcattatgtatgtgccggaggaggacctcttcgagttcgccctcgactacaaaaacttcagccgcacagatgcggattacatcaagaagtggaagctgtactcctacgggaacaggatccgcatcttcaggaatccaaaaaaaaataacgtctttgactgggaggaagtgtgcctgacatccgcctacaaggaactgttcaataaatacggcatcaattaccagcagggcgacattcgcgccctcctctgtgagcagtccgacaaagcgttttactccagcttcatggccctcatgtccctgatgctccaaatgaggaatagcatcacagggcgcaccgacgtcgacttcctcatcagcccggtgaagaactccgacgggatcttttacgactcccgcaactatgaggcgcaagagaatgcgatcctcccgaagaacgccgatgcgaacggggcctataatatcgccaggaaagtgctctgggccatcgggcagttcaaaaaggcggaggatgagaagctcgacaaggtgaaaattgccatttccaacaaggagtggctggagtacgcgcagacctccgtgaagcacggctcctctggcagctccggctctagcggctcctctggcagctccggctccaagctggagaagtttacaaactgttacagcctctccaaaaccctcaggtttaaagcgatcccggtgggcaagacccaggagaacatcgacaacaagaggctcctggtggaagacgagaagcgcgccgaagactacaagggcgtgaagaagctgctcgataggtactacctcagctttattaacgacgtgctgcacagcatcaaactcaagaatctcaacaactacatctccctcttccgcaaaaagacctctggtggttcttctggtggttcttctgaggttgaattttcacatgagtattggatgagacacgctcttaccttggctaagagagcaagggatgagagagaagttccagtgggagcagttcttgtgttgaacaatagagttattggagagggttggaacaggtaagtatcaaggttacaagacaggtttaaggagaccaatagaaactgggcttgtcgagacagagaagactcttgcgtttctgataggcacctattggtcttactgacatccactttgcctttctctccacagggctattggacttcatgatcctactgctcacgcagaaattatggcacttagacaaggtggacttgttatgcagaactacaggcttatcgatgctactctttatgttacattcgagccatgtgtgatgtgcgctggagcaatgattcattctaggattggaagggttgtgttcggtgttagaaactctaagaggggagctgcaggttcacttatgaacgttttgaattatcctggtatgaaccacagagtggagattactgaaggtattttggcagatgaatgtgctgcacttttgtgcgatttttacagaatgcctagacaagtgttcaacgctcaaaagaaggcacaatcttctattaactctggcggctcaaaaagaaccgccgacggcagcgaattcgagcccaagaagaagaggaaagtcggaagcggagctactaacttcagcctgctgaagcaggctggagacgtggaggagaaccctggacctatggtgagcaagggcgaggagctgttcaccggggtggtgcccatcctggtcgagctggacggcgacgtaaacggccacaagttcagcgtgtccggcgagggcgagggcgatgccacctacggcaagctgaccctgaagttcatctgcaccaccggcaagctgcccgtgccctggcccaccctcgtgaccaccctgacctatggagtgcagtgcttcagccgctaccccgaccacatgaagcagcacgacttcttcaagtccgccatgcccgaaggctacgtccaggagcgcaccatcttcttcaaggacgacggcaactacaagacccgcgccgaggtgaagttcgagggcgacaccctggtgaaccgcatcgagctgaagggcatcgacttcaaggaggacggcaacatcctggggcacaagctggagtacaactacaacagccacaacgtctatatcatggccgacaagcagaagaacggcatcaaggtgaacttcaagatccgccacaacatcgaggacggcagcgtgcagctcgccgaccactaccagcagaacacccccatcggcgacggccccgtgctgctgcccgacaaccactacctgagcacccagtccgccctgagcaaagaccccaacgagaagcgcgatcacatggtcctgctggagttcgtgaccgccgccgggatcactctcggcatggacgagctgtacaagtctggtggttctcccaagaagaagaggaaagtctaaccggtcatcatcaccatcaccattgagtttaaacccgctgatcagcctcgactgtgccttctagttgccagccatctgttgtttgcccctcccccgtgccttccttgaccctggaaggtgccactcccactgtcctttcctaataaaatgaggaaattgcatcgcattgtctgagtaggtgtcattctattctggggggtggggtggggcaggacagcaagggggaggattgggaagacaatagcaggcatgctggggatgcggtgggctctatggcttctgaggcggaaagaaccagctggggctcgataccgtcgacctctagctagagcttggcgtaatcatggtcatagctgtttcctgtgtgaaattgttatccgctcacaattccacacaacatacgagccggaagcataaagtgtaaagcctagggtgcctaatgagtgagctaactcacattaattgcgttgcgctcactgcccgctttccagtcgggaaacctgtcgtgccagctgcattaatgaatcggccaacgcgcggggagaggcggtttgcgtattgggcgctcttccgcttcctcgctcactgactcgctgcgctcggtcgttcggctgcggcgagcggtatcagctcactcaaaggcggtaatacggttatccacagaatcaggggataacgcaggaaagaacatgtgagcaaaaggccagcaaaaggccaggaaccgtaaaaaggccgcgttgctggcgtttttccataggctccgcccccctgacgagcatcacaaaaatcgacgctcaagtcagaggtggcgaaacccgacaggactataaagataccaggcgtttccccctggaagctccctcgtgcgctctcctgttccgaccctgccgcttaccggatacctgtccgcctttctcccttcgggaagcgtggcgctttctcatagctcacgctgtaggtatctcagttcggtgtaggtcgttcgctccaagctgggctgtgtgcacgaaccccccgttcagcccgaccgctgcgccttatccggtaactatcgtcttgagtccaacccggtaagacacgacttatcgccactggcagcagccactggtaacaggattagcagagcgaggtatgtaggcggtgctacagagttcttgaagtggtggcctaactacggctacactagaagaacagtatttggtatctgcgctctgctgaagccagttaccttcggaaaaagagttggtagctcttgatccggcaaacaaaccaccgctggtagcggtggtttttttgtttgcaagcagcagattacgcgcagaaaaaaaggatctcaagaagatcctttgatcttttctacggggtctgacactcagtggaacgaaaactcacgttaagggattttggtcatgagattatcaaaaaggatcttcacctagatccttttaaattaaaaatgaagttttaaatcaatctaaagtatatatgagtaaacttggtctgacagttaccaatgcttaatcagtgaggcacctatctcagcgatctgtctatttcgttcatccatagttgcctgactccccgtcgtgtagataactacgatacgggagggcttaccatctggccccagtgctgcaatgataccgcgagacccacgctcaccggctccagatttatcagcaataaaccagccagccggaagggccgagcgcagaagtggtcctgcaactttatccgcctccatccagtctattaattgttgccgggaagctagagtaagtagttcgccagttaatagtttgcgcaacgttgttgccattgctacaggcatcgtggtgtcacgctcgtcgtttggtatggcttcattcagctccggttcccaacgatcaaggcgagttacatgatcccccatgttgtgcaaaaaagcggttagctccttcggtcctccgatcgttgtcagaagtaagttggccgcagtgttatcactcatggttatggcagcactgcataattctcttactgtcatgccatccgtaagatgcttttctgtgactggtgagtactcaaccaagtcattctgagaatagtgtatgcggcgaccgagttgctcttgcccggcgtcaatacgggataataccgcgccacatagcagaactttaaaagtgctcatcattggaaaacgttcttcggggcgaaaactctcaaggatcttaccgctgttgagatccagttcgatgtaacccactcgtgcacccaactgatcttcagcatcttttactttcaccagcgtttctgggtgagcaaaaacaggaaggcaaaatgccgcaaaaaagggaataagggcgacacggaaatgttgaatactcatactcttcctttttcaatattattgaagcatttatcagggttattgtctcatgagcggatacatatttgaatgtatttagaaaaataaacaaataggggttccgcgcacatttccccgaaaagtgccacctgacgtcgacggatcgggagatcgatctcccgatcccctagggtcgactctcagtacaatctgctctgatgccgcatagttaagccagtatctgctccctgcttgtgtgttggaggtcgctgagtagtgcgcgagcaaaatttaagctacaacaaggcaaggcttgaccgacaattgcatgaagaatctgcttagggttaggcgttttgcgctgcttcgcgatgtacgggccagatatacgcgtt

SEQ ID NO: 680 - DNA, 8716 bp, synthetic construct
  source 1..8716: mol_type = other DNA
gacattgattattgactagttattaatagtaatcaattacggggtcattagttcatagcccatatatggagttccgcgttacataacttacggtaaatggcccgcctggctgaccgcccaacgacccccgcccattgacgtcaataatgacgtatgttcccatagtaacgccaatagggactttccattgacgtcaatgggtggagtatttacggtaaactgcccacttggcagtacatcaagtgtatcatatgccaagtacgccccctattgacgtcaatgacggtaaatggcccgcctggcattatgcccagtacatgaccttatgggactttcctacttggcagtacatctacgtattagtcatcgctattaccatggtgatgcggttttggcagtacatcaatgggcgtggatagcggtttgactcacggggatttccaagtctccaccccattgacgtcaatgggagtttgttttggcaccaaaatcaacgggactttccaaaatgtcgtaacaactccgccccattgacgcaaatgggcggtaggcgtgtacggtgggaggtctatataagcagagctggtttagtgaaccgtcagatccgctagagatccgcggccgctaatacgactcactatagggagagccgccaccatgaaacggacagccgacggaagcgagttcgagtcaccaaagaagaagcggaaagtccgcaccgagaaggagaacaaggagctggagaacctggagatcaacctccgcaaggaaatcgccaaagcgttcaagggcaatgaagggtacaagagcctcttcaagaaagacatcatcgaaactatcctcccagagtttctcgatgacaaggacgagatcgcgctggtgaactcctttaacgggttcacaaccgcgtttaccggcttctttgataacagggaaaatatgttctccgaggaggccaagtccaccagcatcgccttcaggtgtatcaacgagaacctcacccgctacatttccaatatggacattttcgagaaggtggatgcgatcttcgataagcacgaggtgcaggagatcaaagagaagattctcaattccgattatgacgtcgaggatttcttcgaaggggagttctttaattttgtgctcacacaagagggcattgacgtgtacaacgcgattatcgggggcttcgtcacagagtccggggagaagattaaggggctgaatgagtacatcaatctgtacaatcagaagaccaagcagaaactgccgaaattcaagccgctctacaagcaagtcctgtccgatagggaaagcctctccttctacggcgagggctataccagcgacgaggaggtgctggaagtcttccgcaacacactgaataagaatagcgagattttctcctccatcaagaagctcgagaagctctttaagaactttgacgagtacagctccgccgggattttcgtgaagaacgggccggcgatcagcaccatctccaaggacatctttggcgagtggaacgtcatcagggacaagtggaacgccgagtacgacgacatccacctgaagaagaaggcggtggtgaccgagaagtatgaggacgatcgcaggaagtccttcaaaaaaatcggctccttcagcctcgaacagctccaggagtatgccgatgcggatctgtccgtcgtcgagaagctgaaggaaatcatcattcagaaggtcgacgagatctataaagtgtacgggtccagcgagaagctgttcgacgccgactttgtgctcgagaagtccctcaaaaagaatgacgccgtggtggccattatgaaagacctgctcgactccgtgaagtccttcgaaaattacattaaagcgttctttggggaggggaaggaaactaacagggatgagtccttctatggcgactttgtcctcgcgtacgacatcctgctgaaggtcgaccacatttacgacgcgatccgcaactacgtgacacagaagccgtactccaaagacaagttcaagctgtacttccagaacccgcaatttatggggggctgggacaaggataaagagacagactaccgcgcgacaattctccgctatggctccaaatactatctggccatcatggacaagaagtacgcgaagtgcctgcagaagatcgacaaagacgacgtcaatggcaactatgaaaagatcaactacaagctgctgccgggcccgaacaagatgctcccgaaggtgttcttcagcaagaagtggatggcctactacaatccaagcgaggatattcagaaaatctataaaaacgggaccttcaagaagggggacatgtttaacctcaacgactgccacaagctcattgatttcttcaaggatagcatttcccgctacccgaaatggtccaatgcgtacgattttaacttctccgagacagaaaagtacaaagacatcgcgggcttttacagggaggtggaggagcaagggtataaagtttcttttgaatccgcgagcaagaaggaagtcgacaagctcgtcgaggagggcaagctctacatgttccaaatttataacaaggacttttccgacaagagccatgggaccccaaacctccacaccatgtacttcaaactgctctttgacgagaacaaccacgggcaaatcaggctgagcggcggcgccgaattattcatgcgcagggcctccctcaagaaggaagagctggtcgtccatccagccaattccccgatcgcgaacaagaacccggacaatccgaaaaagaccaccaccctgtcctacgacgtctacaaggacaaacgcttcagcgaagaccagtacgaattacacatcccaattgcgattaataagtgcccaaagaatatcttcaaaattaatacagaggtcagggtgctgctcaaacacgacgacaatccgtatgtcatcggcattgccaggggcgagcgcaatctgctctatatcgtggtcgtggatgggaagggcaatattgtggagcagtactccctgaacgagattatcaacaacttcaatgggattaggattaagaccgactatcacagcctgctcgacaagaaagaaaaagagaggtttgaggcccgccaaaactggacctccattgagaatatcaaagaattaaaggccggctatatttcccaagtcgtccacaagatctgcgagctggtggagaaatatgacgccgtgattgcgctcgaagacttaaattctgggttcaagaactcccgcgtgaaggtggaaaaacaggtgtatcagaaattcgagaaaatgctgatcgacaaactcaattatatggtggataagaagtccaacccgtgtgccacagggggcgcgctgaagggctatcagatcaccaacaagttcgagagcttcaagagcatgagcacccagaacgggtttattttctacatcccggcgtggctcacctccaagattgacccgagcaccggcttcgtgaacctcctgaagacaaagtatacctccattgccgacagcaagaagtttatctcctccttcgaccgcattatgtatgtgccggaggaggacctcttcgagttcgccctcgactacaaaaacttcagccgcacagatgcggattacatcaagaagtggaagctgtactcctacgggaacaggatccgcatcttcaggaatccaaaaaaaaataacgtctttgactgggaggaagtgtgcctgacatccgcctacaaggaactgttcaataaatacggcatcaattaccagcagggcgacattcgcgccctcctctgtgagcagtccgacaaagcgttttactccagcttcatggccctcatgtccctgatgctccaaatgaggaatagcatcacagggcgcaccgacgtcgacttcctcatcagcccggtgaagaactccgacgggatcttttacgactcccgcaactatgaggcgcaagagaatgcgatcctcccgaagaacgccgatgcgaacggggcctataatatcgccaggaaagtgctctgggccatcgggcagttcaaaaaggcggaggatgagaagctcgacaaggtgaaaattgccatttccaacaaggagtggctggagtacgcgcagacctccgtgaagcacggctcctctggcagctccggctctagcggctcctctggcagctccggctccaagctggagaagtttacaaactgttacagcctctccaaaaccctcaggtttaaagcgatcccggtgggcaagacccaggagaacatcgacaacaagaggctcctggtggaagacgagaagcgcgccgaagactacaagggcgtgaagaagctgctcgataggtactacctcagctttattaacgacgtgctgcacagcatcaaactcaagaatctcaacaactacatctccctcttccgcaaaaagacctctggttcttctggttcttctgaggttgaattttcacatgagtattggatgagacacgctcttaccttggctaagagagcaagggatgagagagaagttccagtgggagcagttcttgtgttgaacaatagagttattggagagggttggaacaggtaagtatcaaggttacaagacaggtttaaggagaccaatagaaactgggcttgtcgagacagagaagactcttgcgtttctgataggcacctattggtcttactgacatccactttgcctttctctccacagggctattggacttcatgatcctactgctcacgcagaaattatggcacttagacaaggtggacttgttatgcagaactacaggcttatcgatgctactctttatgttacattcgagccatgtgtgatgtgcgctggagcaatgattcattctaggattggaagggttgtgttcggtgttagaaactctaagaggggagctgcaggttcacttatgaacgttttgaattatcctggtatgaaccacagagtggagattactgaaggtattttggcagatgaatgtgctgcacttttgtgcgatttttacagaatgcctagacaagtgttcaacgctcaaaagaaggcacaatcttctattaactctggcggctcaaaaagaaccgccgacggcagcgaattcgagcccaagaagaagaggaaagtcggaagcggagctactaacttcagcctgctgaagcaggctggagacgtggaggagaaccctggacctatggtgagcaagggcgaggagctgttcaccggggtggtgcccatcctggtcgagctggacggcgacgtaaacggccacaagttcagcgtgtccggcgagggcgagggcgatgccacctacggcaagctgaccctgaagttcatctgcaccaccggcaagctgcccgtgccctggcccaccctcgtgaccaccctgacctatggagtgcagtgcttcagccgctaccccgaccacatgaagcagcacgacttcttcaagtccgccatgcccgaaggctacgtccaggagcgcaccatcttcttcaaggacgacggcaactacaagacccgcgccgaggtgaagttcgagggcgacaccctggtgaaccgcatcgagctgaagggcatcgacttcaaggaggacggcaacatcctggggcacaagctggagtacaactacaacagccacaacgtctatatcatggccgacaagcagaagaacggcatcaaggtgaacttcaagatccgccacaacatcgaggacggcagcgtgcagctcgccgaccactaccagcagaacacccccatcggcgacggccccgtgctgctgcccgacaaccactacctgagcacccagtccgccctgagcaaagaccccaacgagaagcgcgatcacatggtcctgctggagttcgtgaccgccgccgggatcactctcggcatggacgagctgtacaagtctggtggttctcccaagaagaagaggaaagtctaaccggtcatcatcaccatcaccattgagtttaaacccgctgatcagcctcgactgtgccttctagttgccagccatctgttgtttgcccctcccccgtgccttccttgaccctggaaggtgccactcccactgtcctttcctaataaaatgaggaaattgcatcgcattgtctgagtaggtgtcattctattctggggggtggggtggggcaggacagcaagggggaggattgggaagacaatagcaggcatgctggggatgcggtgggctctatggcttctgaggcggaaagaaccagctggggctcgataccgtcgacctctagctagagcttggcgtaatcatggtcatagctgtttcctgtgtgaaattgttatccgctcacaattccacacaacatacgagccggaagcataaagtgtaaagcctagggtgcctaatgagtgagctaactcacattaattgcgttgcgctcactgcccgctttccagtcgggaaacctgtcgtgccagctgcattaatgaatcggccaacgcgcggggagaggcggtttgcgtattgggcgctcttccgcttcctcgctcactgactcgctgcgctcggtcgttcggctgcggcgagcggtatcagctcactcaaaggcggtaatacggttatccacagaatcaggggataacgcaggaaagaacatgtgagcaaaaggccagcaaaaggccaggaaccgtaaaaaggccgcgttgctggcgtttttccataggctccgcccccctgacgagcatcacaaaaatcgacgctcaagtcagaggtggcgaaacccgacaggactataaagataccaggcgtttccccctggaagctccctcgtgcgctctcctgttccgaccctgccgcttaccggatacctgtccgcctttctcccttcgggaagcgtggcgctttctcatagctcacgctgtaggtatctcagttcggtgtaggtcgttcgctccaagctgggctgtgtgcacgaaccccccgttcagcccgaccgctgcgccttatccggtaactatcgtcttgagtccaacccggtaagacacgacttatcgccactggcagcagccactggtaacaggattagcagagcgaggtatgtaggcggtgctacagagttcttgaagtggtggcctaactacggctacactagaagaacagtatttggtatctgcgctctgctgaagccagttaccttcggaaaaagagttggtagctcttgatccggcaaacaaaccaccgctggtagcggtggtttttttgtttgcaagcagcagattacgcgcagaaaaaaaggatctcaagaagatcctttgatcttttctacggggtctgacactcagtggaacgaaaactcacgttaagggattttggtcatgagattatcaaaaaggatcttcacctagatccttttaaattaaaaatgaagttttaaatcaatctaaagtatatatgagtaaacttggtctgacagttaccaatgcttaatcagtgaggcacctatctcagcgatctgtctatttcgttcatccatagttgcctgactccccgtcgtgtagataactacgatacgggagggcttaccatctggccccagtgctgcaatgataccgcgagacccacgctcaccggctccagatttatcagcaataaaccagccagccggaagggccgagcgcagaagtggtcctgcaactttatccgcctccatccagtctattaattgttgccgggaagctagagtaagtagttcgccagttaatagtttgcgcaacgttgttgccattgctacaggcatcgtggtgtcacgctcgtcgtttggtatggcttcattcagctccggttcccaacgatcaaggcgagttacatgatcccccatgttgtgcaaaaaagcggttagctccttcggtcctccgatcgttgtcagaagtaagttggccgcagtgttatcactcatggttatggcagcactgcataattctcttactgtcatgccatccgtaagatgcttttctgtgactggtgagtactcaaccaagtcattctgagaatagtgtatgcggcgaccgagttgctcttgcccggcgtcaatacgggataataccgcgccacatagcagaactttaaaagtgctcatcattggaaaacgttcttcggggcgaaaactctcaaggatcttaccgctgttgagatccagttcgatgtaacccactcgtgcacccaactgatcttcagcatcttttactttcaccagcgtttctgggtgagcaaaaacaggaaggcaaaatgccgcaaaaaagggaataagggcgacacggaaatgttgaatactcatactcttcctttttcaatattattgaagcatttatcagggttattgtctcatgagcggatacatatttgaatgtatttagaaaaataaacaaataggggttccgcgcacatttccccgaaaagtgccacctgacgtcgacggatcgggagatcgatctcccgatcccctagggtcgactctcagtacaatctgctctgatgccgcatagttaagccagtatctgctccctgcttgtgtgttggaggtcgctgagtagtgcgcgagcaaaatttaagctacaacaaggcaaggcttgaccgacaattgcatgaagaatctgcttagggttaggcgttttgcgctgcttcgcgatgtacgggccagatatacgcgtt

SEQ ID NO: 681 - DNA, 8746 bp, synthetic construct
  source 1..8746: mol_type = other DNA
gacattgattattgactagttattaatagtaatcaattacggggtcattagttcatagcccatatatggagttccgcgttacataacttacggtaaatggcccgcctggctgaccgcccaacgacccccgcccattgacgtcaataatgacgtatgttcccatagtaacgccaatagggactttccattgacgtcaatgggtggagtatttacggtaaactgcccacttggcagtacatcaagtgtatcatatgccaagtacgccccctattgacgtcaatgacggtaaatggcccgcctggcattatgcccagtacatgaccttatgggactttcctacttggcagtacatctacgtattagtcatcgctattaccatggtgatgcggttttggcagtacatcaatgggcgtggatagcggtttgactcacggggatttccaagtctccaccccattgacgtcaatgggagtttgttttggcaccaaaatcaacgggactttccaaaatgtcgtaacaactccgccccattgacgcaaatgggcggtaggcgtgtacggtgggaggtctatataagcagagctggtttagtgaaccgtcagatccgctagagatccgcggccgctaatacgactcactatagggagagccgccaccatgaaacggacagccgacggaagcgagttcgagtcaccaaagaagaagcggaaagtctccgacgggatcttttacgactcccgcaactatgaggcgcaagagaatgcgatcctcccgaagaacgccgatgcgaacggggcctataatatcgccaggaaagtgctctgggccatcgggcagttcaaaaaggcggaggatgagaagctcgacaaggtgaaaattgccatttccaacaaggagtggctggagtacgcgcagacctccgtgaagcacggctcctctggcagctccggctctagcggctcctctggcagctccggctccaagctggagaagtttacaaactgttacagcctctccaaaaccctcaggtttaaagcgatcccggtgggcaagacccaggagaacatcgacaacaagaggctcctggtggaagacgagaagcgcgccgaagactacaagggcgtgaagaagctgctcgataggtactacctcagctttattaacgacgtgctgcacagcatcaaactcaagaatctcaacaactacatctccctcttccgcaaaaagacccgcaccgagaaggagaacaaggagctggagaacctggagatcaacctccgcaaggaaatcgccaaagcgttcaagggcaatgaagggtacaagagcctcttcaagaaagacatcatcgaaactatcctcccagagtttctcgatgacaaggacgagatcgcgctggtgaactcctttaacgggttcacaaccgcgtttaccggcttctttgataacagggaaaatatgttctccgaggaggccaagtccaccagcatcgccttcaggtgtatcaacgagaacctcacccgctacatttccaatatggacattttcgagaaggtggatgcgatcttcgataagcacgaggtgcaggagatcaaagagaagattctcaattccgattatgacgtcgaggatttcttcgaaggggagttctttaattttgtgctcacacaagagggcattgacgtgtacaacgcgattatcgggggcttcgtcacagagtccggggagaagattaaggggctgaatgagtacatcaatctgtacaatcagaagaccaagcagaaactgccgaaattcaagccgctctacaagcaagtcctgtccgatagggaaagcctctccttctacggcgagggctataccagcgacgaggaggtgctggaagtcttccgcaacacactgaataagaatagcgagattttctcctccatcaagaagctcgagaagctctttaagaactttgacgagtacagctccgccgggattttcgtgaagaacgggccggcgatcagcaccatctccaaggacatctttggcgagtggaacgtcatcagggacaagtggaacgccgagtacgacgacatccacctgaagaagaaggcggtggtgaccgagaagtatgaggacgatcgcaggaagtccttcaaaaaaatcggctccttcagcctcgaacagctccaggagtatgccgatgcggatctgtccgtcgtcgagaagctgaaggaaatcatcattcagaaggtcgacgagatctataaagtgtacgggtccagcgagaagctgttcgacgccgactttgtgctcgagaagtccctcaaaaagaatgacgccgtggtggccattatgaaagacctgctcgactccgtgaagtccttcgaaaattacattaaagcgttctttggggaggggaaggaaactaacagggatgagtccttctatggcgactttgtcctcgcgtacgacatcctgctgaaggtcgaccacatttacgacgcgatccgcaactacgtgacacagaagccgtactccaaagacaagttcaagctgtacttccagaacccgcaatttatggggggctgggacaaggataaagagacagactaccgcgcgacaattctccgctatggctccaaatactatctggccatcatggacaagaagtacgcgaagtgcctgcagaagatcgacaaagacgacgtcaatggcaactatgaaaagatcaactacaagctgctgccgggcccgaacaagatgctcccgaaggtgttcttcagcaagaagtggatggcctactacaatccaagcgaggatattcagaaaatctataaaaacgggaccttcaagaagggggacatgtttaacctcaacgactgccacaagctcattgatttcttcaaggatagcatttcccgctacccgaaatggtccaatgcgtacgattttaacttctccgagacagaaaagtacaaagacatcgcgggcttttacagggaggtggaggagcaagggtataaagtttcttttgaatccgcgagcaagaaggaagtcgacaagctcgtcgaggagggcaagctctacatgttccaaatttataacaaggacttttccgacaagagccatgggaccccaaacctccacaccatgtacttcaaactgctctttgacgagaacaaccacgggcaaatcaggctgagcggcggcgccgaattattcatgcgcagggcctccctcaagaaggaagagctggtcgtccatccagccaattccccgatcgcgaacaagaacccggacaatccgaaaaagaccaccaccctgtcctacgacgtctacaaggacaaacgcttcagcgaagaccagtacgaattacacatcccaattgcgattaataagtgcccaaagaatatcttcaaaattaatacagaggtcagggtgctgctcaaacacgacgacaatccgtatgtcatcggcattgccaggggcgagcgcaatctgctctatatcgtggtcgtggatgggaagggcaatattgtggagcagtactccctgaacgagattatcaacaacttcaatgggattaggattaagaccgactatcacagcctgctcgacaagaaagaaaaagagaggtttgaggcccgccaaaactggacctccattgagaatatcaaagaattaaaggccggctatatttcccaagtcgtccacaagatctgcgagctggtggagaaatatgacgccgtgattgcgctcgaagacttaaattctgggttcaagaactcccgcgtgaaggtggaaaaacaggtgtatcagaaattcgagaaaatgctgatcgacaaactcaattatatggtggataagaagtccaacccgtgtgccacagggggcgcgctgaagggctatcagatcaccaacaagttcgagagcttcaagagcatgagcacccagaacgggtttattttctacatcccggcgtggctcacctccaagattgacccgagcaccggcttcgtgaacctcctgaagacaaagtatacctccattgccgacagcaagaagtttatctcctccttcgaccgcattatgtatgtgccggaggaggacctcttcgagttcgccctcgactacaaaaacttcagccgcacagatgcggattacatcaagaagtggaagctgtactcctacgggaacaggatccgcatcttcaggaatccaaaaaaaaataacgtctttgactgggaggaagtgtgcctgacatccgcctacaaggaactgttcaataaatacggcatcaattaccagcagggcgacattcgcgccctcctctgtgagcagtccgacaaagcgttttactccagcttcatggccctcatgtccctgatgctccaaatgaggaatagcatcacagggcgcaccgacgtcgacttcctcatcagcccggtgaagaacagcggcagcgagactcccgggacctcagagtccgccacacccgaaagttctgaggttgaattttcacatgagtattggatgagacacgctcttaccttggctaagagagcaagggatgagagagaagttccagtgggagcagttcttgtgttgaacaatagagttattggagagggttggaacaggtaagtatcaaggttacaagacaggtttaaggagaccaatagaaactgggcttgtcgagacagagaagactcttgcgtttctgataggcacctattggtcttactgacatccactttgcctttctctccacagggctattggacttcatgatcctactgctcacgcagaaattatggcacttagacaaggtggacttgttatgcagaactacaggcttatcgatgctactctttatgttacattcgagccatgtgtgatgtgcgctggagcaatgattcattctaggattggaagggttgtgttcggtgttagaaactctaagaggggagctgcaggttcacttatgaacgttttgaattatcctggtatgaaccacagagtggagattactgaaggtattttggcagatgaatgtgctgcacttttgtgcgatttttacagaatgcctagacaagtgttcaacgctcaaaagaaggcacaatcttctattaactctggcggctcaaaaagaaccgccgacggcagcgaattcgagcccaagaagaagaggaaagtcggaagcggagctactaacttcagcctgctgaagcaggctggagacgtggaggagaaccctggacctatggtgagcaagggcgaggagctgttcaccggggtggtgcccatcctggtcgagctggacggcgacgtaaacggccacaagttcagcgtgtccggcgagggcgagggcgatgccacctacggcaagctgaccctgaagttcatctgcaccaccggcaagctgcccgtgccctggcccaccctcgtgaccaccctgacctatggagtgcagtgcttcagccgctaccccgaccacatgaagcagcacgacttcttcaagtccgccatgcccgaaggctacgtccaggagcgcaccatcttcttcaaggacgacggcaactacaagacccgcgccgaggtgaagttcgagggcgacaccctggtgaaccgcatcgagctgaagggcatcgacttcaaggaggacggcaacatcctggggcacaagctggagtacaactacaacagccacaacgtctatatcatggccgacaagcagaagaacggcatcaaggtgaacttcaagatccgccacaacatcgaggacggcagcgtgcagctcgccgaccactaccagcagaacacccccatcggcgacggccccgtgctgctgcccgacaaccactacctgagcacccagtccgccctgagcaaagaccccaacgagaagcgcgatcacatggtcctgctggagttcgtgaccgccgccgggatcactctcggcatggacgagctgtacaagtctggtggttctcccaagaagaagaggaaagtctaaccggtcatcatcaccatcaccattgagtttaaacccgctgatcagcctcgactgtgccttctagttgccagccatctgttgtttgcccctcccccgtgccttccttgaccctggaaggtgccactcccactgtcctttcctaataaaatgaggaaattgcatcgcattgtctgagtaggtgtcattctattctggggggtggggtggggcaggacagcaagggggaggattgggaagacaatagcaggcatgctggggatgcggtgggctctatggcttctgaggcggaaagaaccagctggggctcgataccgtcgacctctagctagagcttggcgtaatcatggtcatagctgtttcctgtgtgaaattgttatccgctcacaattccacacaacatacgagccggaagcataaagtgtaaagcctagggtgcctaatgagtgagctaactcacattaattgcgttgcgctcactgcccgctttccagtcgggaaacctgtcgtgccagctgcattaatgaatcggccaacgcgcggggagaggcggtttgcgtattgggcgctcttccgcttcctcgctcactgactcgctgcgctcggtcgttcggctgcggcgagcggtatcagctcactcaaaggcggtaatacggttatccacagaatcaggggataacgcaggaaagaacatgtgagcaaaaggccagcaaaaggccaggaaccgtaaaaaggccgcgttgctggcgtttttccataggctccgcccccctgacgagcatcacaaaaatcgacgctcaagtcagaggtggcgaaacccgacaggactataaagataccaggcgtttccccctggaagctccctcgtgcgctctcctgttccgaccctgccgcttaccggatacctgtccgcctttctcccttcgggaagcgtggcgctttctcatagctcacgctgtaggtatctcagttcggtgtaggtcgttcgctccaagctgggctgtgtgcacgaaccccccgttcagcccgaccgctgcgccttatccggtaactatcgtcttgagtccaacccggtaagacacgacttatcgccactggcagcagccactggtaacaggattagcagagcgaggtatgtaggcggtgctacagagttcttgaagtggtggcctaactacggctacactagaagaacagtatttggtatctgcgctctgctgaagccagttaccttcggaaaaagagttggtagctcttgatccggcaaacaaaccaccgctggtagcggtggtttttttgtttgcaagcagcagattacgcgcagaaaaaaaggatctcaagaagatcctttgatcttttctacggggtctgacactcagtggaacgaaaactcacgttaagggattttggtcatgagattatcaaaaaggatcttcacctagatccttttaaattaaaaatgaagttttaaatcaatctaaagtatatatgagtaaacttggtctgacagttaccaatgcttaatcagtgaggcacctatctcagcgatctgtctatttcgttcatccatagttgcctgactccccgtcgtgtagataactacgatacgggagggcttaccatctggccccagtgctgcaatgataccgcgagacccacgctcaccggctccagatttatcagcaataaaccagccagccggaagggccgagcgcagaagtggtcctgcaactttatccgcctccatccagtctattaattgttgccgggaagctagagtaagtagttcgccagttaatagtttgcgcaacgttgttgccattgctacaggcatcgtggtgtcacgctcgtcgtttggtatggcttcattcagctccggttcccaacgatcaaggcgagttacatgatcccccatgttgtgcaaaaaagcggttagctccttcggtcctccgatcgttgtcagaagtaagttggccgcagtgttatcactcatggttatggcagcactgcataattctcttactgtcatgccatccgtaagatgcttttctgtgactggtgagtactcaaccaagtcattctgagaatagtgtatgcggcgaccgagttgctcttgcccggcgtcaatacgggataataccgcgccacatagcagaactttaaaagtgctcatcattggaaaacgttcttcggggcgaaaactctcaaggatcttaccgctgttgagatccagttcgatgtaacccactcgtgcacccaactgatcttcagcatcttttactttcaccagcgtttctgggtgagcaaaaacaggaaggcaaaatgccgcaaaaaagggaataagggcgacacggaaatgttgaatactcatactcttcctttttcaatattattgaagcatttatcagggttattgtctcatgagcggatacatatttgaatgtatttagaaaaataaacaaataggggttccgcgcacatttccccgaaaagtgccacctgacgtcgacggatcgggagatcgatctcccgatcccctagggtcgactctcagtacaatctgctctgatgccgcatagttaagccagtatctgctccctgcttgtgtgttggaggtcgctgagtagtgcgcgagcaaaatttaagctacaacaaggcaaggcttgaccgacaattgcatgaagaatctgcttagggttaggcgttttgcgctgcttcgcgatgtacgggccagatatacgcgtt

SEQ ID NO: 682 - DNA, 8734 bp, synthetic construct
  source 1..8734: mol_type = other DNA
gacattgattattgactagttattaatagtaatcaattacggggtcattagttcatagcccatatatggagttccgcgttacataacttacggtaaatggcccgcctggctgaccgcccaacgacccccgcccattgacgtcaataatgacgtatgttcccatagtaacgccaatagggactttccattgacgtcaatgggtggagtatttacggtaaactgcccacttggcagtacatcaagtgtatcatatgccaagtacgccccctattgacgtcaatgacggtaaatggcccgcctggcattatgcccagtacatgaccttatgggactttcctacttggcagtacatctacgtattagtcatcgctattaccatggtgatgcggttttggcagtacatcaatgggcgtggatagcggtttgactcacggggatttccaagtctccaccccattgacgtcaatgggagtttgttttggcaccaaaatcaacgggactttccaaaatgtcgtaacaactccgccccattgacgcaaatgggcggtaggcgtgtacggtgggaggtctatataagcagagctggtttagtgaaccgtcagatccgctagagatccgcggccgctaatacgactcactatagggagagccgccaccatgaaacggacagccgacggaagcgagttcgagtcaccaaagaagaagcggaaagtctccgacgggatcttttacgactcccgcaactatgaggcgcaagagaatgcgatcctcccgaagaacgccgatgcgaacggggcctataatatcgccaggaaagtgctctgggccatcgggcagttcaaaaaggcggaggatgagaagctcgacaaggtgaaaattgccatttccaacaaggagtggctggagtacgcgcagacctccgtgaagcacggctcctctggcagctccggctctagcggctcctctggcagctccggctccaagctggagaagtttacaaactgttacagcctctccaaaaccctcaggtttaaagcgatcccggtgggcaagacccaggagaacatcgacaacaagaggctcctggtggaagacgagaagcgcgccgaagactacaagggcgtgaagaagctgctcgataggtactacctcagctttattaacgacgtgctgcacagcatcaaactcaagaatctcaacaactacatctccctcttccgcaaaaagacccgcaccgagaaggagaacaaggagctggagaacctggagatcaacctccgcaaggaaatcgccaaagcgttcaagggcaatgaagggtacaagagcctcttcaagaaagacatcatcgaaactatcctcccagagtttctcgatgacaaggacgagatcgcgctggtgaactcctttaacgggttcacaaccgcgtttaccggcttctttgataacagggaaaatatgttctccgaggaggccaagtccaccagcatcgccttcaggtgtatcaacgagaacctcacccgctacatttccaatatggacattttcgagaaggtggatgcgatcttcgataagcacgaggtgcaggagatcaaagagaagattctcaattccgattatgacgtcgaggatttcttcgaaggggagttctttaattttgtgctcacacaagagggcattgacgtgtacaacgcgattatcgggggcttcgtcacagagtccggggagaagattaaggggctgaatgagtacatcaatctgtacaatcagaagaccaagcagaaactgccgaaattcaagccgctctacaagcaagtcctgtccgatagggaaagcctctccttctacggcgagggctataccagcgacgaggaggtgctggaagtcttccgcaacacactgaataagaatagcgagattttctcctccatcaagaagctcgagaagctctttaagaactttgacgagtacagctccgccgggattttcgtgaagaacgggccggcgatcagcaccatctccaaggacatctttggcgagtggaacgtcatcagggacaagtggaacgccgagtacgacgacatccacctgaagaagaaggcggtggtgaccgagaagtatgaggacgatcgcaggaagtccttcaaaaaaatcggctccttcagcctcgaacagctccaggagtatgccgatgcggatctgtccgtcgtcgagaagctgaaggaaatcatcattcagaaggtcgacgagatctataaagtgtacgggtccagcgagaagctgttcgacgccgactttgtgctcgagaagtccctcaaaaagaatgacgccgtggtggccattatgaaagacctgctcgactccgtgaagtccttcgaaaattacattaaagcgttctttggggaggggaaggaaactaacagggatgagtccttctatggcgactttgtcctcgcgtacgacatcctgctgaaggtcgaccacatttacgacgcgatccgcaactacgtgacacagaagccgtactccaaagacaagttcaagctgtacttccagaacccgcaatttatggggggctgggacaaggataaagagacagactaccgcgcgacaattctccgctatggctccaaatactatctggccatcatggacaagaagtacgcgaagtgcctgcagaagatcgacaaagacgacgtcaatggcaactatgaaaagatcaactacaagctgctgccgggcccgaacaagatgctcccgaaggtgttcttcagcaagaagtggatggcctactacaatccaagcgaggatattcagaaaatctataaaaacgggaccttcaagaagggggacatgtttaacctcaacgactgccacaagctcattgatttcttcaaggatagcatttcccgctacccgaaatggtccaatgcgtacgattttaacttctccgagacagaaaagtacaaagacatcgcgggcttttacagggaggtggaggagcaagggtataaagtttcttttgaatccgcgagcaagaaggaagtcgacaagctcgtcgaggagggcaagctctacatgttccaaatttataacaaggacttttccgacaagagccatgggaccccaaacctccacaccatgtacttcaaactgctctttgacgagaacaaccacgggcaaatcaggctgagcggcggcgccgaattattcatgcgcagggcctccctcaagaaggaagagctggtcgtccatccagccaattccccgatcgcgaacaagaacccggacaatccgaaaaagaccaccaccctgtcctacgacgtctacaaggacaaacgcttcagcgaagaccagtacgaattacacatcccaattgcgattaataagtgcccaaagaatatcttcaaaattaatacagaggtcagggtgctgctcaaacacgacgacaatccgtatgtcatcggcattgccaggggcgagcgcaatctgctctatatcgtggtcgtggatgggaagggcaatattgtggagcagtactccctgaacgagattatcaacaacttcaatgggattaggattaagaccgactatcacagcctgctcgacaagaaagaaaaagagaggtttgaggcccgccaaaactggacctccattgagaatatcaaagaattaaaggccggctatatttcccaagtcgtccacaagatctgcgagctggtggagaaatatgacgccgtgattgcgctcgaagacttaaattctgggttcaagaactcccgcgtgaaggtggaaaaacaggtgtatcagaaattcgagaaaatgctgatcgacaaactcaattatatggtggataagaagtccaacccgtgtgccacagggggcgcgctgaagggctatcagatcaccaacaagttcgagagcttcaagagcatgagcacccagaacgggtttattttctacatcccggcgtggctcacctccaagattgacccgagcaccggcttcgtgaacctcctgaagacaaagtatacctccattgccgacagcaagaagtttatctcctccttcgaccgcattatgtatgtgccggaggaggacctcttcgagttcgccctcgactacaaaaacttcagccgcacagatgcggattacatcaagaagtggaagctgtactcctacgggaacaggatccgcatcttcaggaatccaaaaaaaaataacgtctttgactgggaggaagtgtgcctgacatccgcctacaaggaactgttcaataaatacggcatcaattaccagcagggcgacattcgcgccctcctctgtgagcagtccgacaaagcgttttactccagcttcatggccctcatgtccctgatgctccaaatgaggaatagcatcacagggcgcaccgacgtcgacttcctcatcagcccggtgaagaactctggtggttcttctggtggttcttctggtggttcttctgaggttgaattttcacatgagtattggatgagacacgctcttaccttggctaagagagcaagggatgagagagaagttccagtgggagcagttcttgtgttgaacaatagagttattggagagggttggaacaggtaagtatcaaggttacaagacaggtttaaggagaccaatagaaactgggcttgtcgagacagagaagactcttgcgtttctgataggcacctattggtcttactgacatccactttgcctttctctccacagggctattggacttcatgatcctactgctcacgcagaaattatggcacttagacaaggtggacttgttatgcagaactacaggcttatcgatgctactctttatgttacattcgagccatgtgtgatgtgcgctggagcaatgattcattctaggattggaagggttgtgttcggtgttagaaactctaagaggggagctgcaggttcacttatgaacgttttgaattatcctggtatgaaccacagagtggagattactgaaggtattttggcagatgaatgtgctgcacttttgtgcgatttttacagaatgcctagacaagtgttcaacgctcaaaagaaggcacaatcttctattaactctggcggctcaaaaagaaccgccgacggcagcgaattcgagcccaagaagaagaggaaagtcggaagcggagctactaacttcagcctgctgaagcaggctggagacgtggaggagaaccctggacctatggtgagcaagggcgaggagctgttcaccggggtggtgcccatcctggtcgagctggacggcgacgtaaacggccacaagttcagcgtgtccggcgagggcgagggcgatgccacctacggcaagctgaccctgaagttcatctgcaccaccggcaagctgcccgtgccctggcccaccctcgtgaccaccctgacctatggagtgcagtgcttcagccgctaccccgaccacatgaagcagcacgacttcttcaagtccgccatgcccgaaggctacgtccaggagcgcaccatcttcttcaaggacgacggcaactacaagacccgcgccgaggtgaagttcgagggcgacaccctggtgaaccgcatcgagctgaagggcatcgacttcaaggaggacggcaacatcctggggcacaagctggagtacaactacaacagccacaacgtctatatcatggccgacaagcagaagaacggcatcaaggtgaacttcaagatccgccacaacatcgaggacggcagcgtgcagctcgccgaccactaccagcagaacacccccatcggcgacggccccgtgctgctgcccgacaaccactacctgagcacccagtccgccctgagcaaagaccccaacgagaagcgcgatcacatggtcctgctggagttcgtgaccgccgccgggatcactctcggcatggacgagctgtacaagtctggtggttctcccaagaagaagaggaaagtctaaccggtcatcatcaccatcaccattgagtttaaacccgctgatcagcctcgactgtgccttctagttgccagccatctgttgtttgcccctcccccgtgccttccttgaccctggaaggtgccactcccactgtcctttcctaataaaatgaggaaattgcatcgcattgtctgagtaggtgtcattctattctggggggtggggtggggcaggacagcaagggggaggattgggaagacaatagcaggcatgctggggatgcggtgggctctatggcttctgaggcggaaagaaccagctggggctcgataccgtcgacctctagctagagcttggcgtaatcatggtcatagctgtttcctgtgtgaaattgttatccgctcacaattccacacaacatacgagccggaagcataaagtgtaaagcctagggtgcctaatgagtgagctaactcacattaattgcgttgcgctcactgcccgctttccagtcgggaaacctgtcgtgccagctgcattaatgaatcggccaacgcgcggggagaggcggtttgcgtattgggcgctcttccgcttcctcgctcactgactcgctgcgctcggtcgttcggctgcggcgagcggtatcagctcactcaaaggcggtaatacggttatccacagaatcaggggataacgcaggaaagaacatgtgagcaaaaggccagcaaaaggccaggaaccgtaaaaaggccgcgttgctggcgtttttccataggctccgcccccctgacgagcatcacaaaaatcgacgctcaagtcagaggtggcgaaacccgacaggactataaagataccaggcgtttccccctggaagctccctcgtgcgctctcctgttccgaccctgccgcttaccggatacctgtccgcctttctcccttcgggaagcgtggcgctttctcatagctcacgctgtaggtatctcagttcggtgtaggtcgttcgctccaagctgggctgtgtgcacgaaccccccgttcagcccgaccgctgcgccttatccggtaactatcgtcttgagtccaacccggtaagacacgacttatcgccactggcagcagccactggtaacaggattagcagagcgaggtatgtaggcggtgctacagagttcttgaagtggtggcctaactacggctacactagaagaacagtatttggtatctgcgctctgctgaagccagttaccttcggaaaaagagttggtagctcttgatccggcaaacaaaccaccgctggtagcggtggtttttttgtttgcaagcagcagattacgcgcagaaaaaaaggatctcaagaagatcctttgatcttttctacggggtctgacactcagtggaacgaaaactcacgttaagggattttggtcatgagattatcaaaaaggatcttcacctagatccttttaaattaaaaatgaagttttaaatcaatctaaagtatatatgagtaaacttggtctgacagttaccaatgcttaatcagtgaggcacctatctcagcgatctgtctatttcgttcatccatagttgcctgactccccgtcgtgtagataactacgatacgggagggcttaccatctggccccagtgctgcaatgataccgcgagacccacgctcaccggctccagatttatcagcaataaaccagccagccggaagggccgagcgcagaagtggtcctgcaactttatccgcctccatccagtctattaattgttgccgggaagctagagtaagtagttcgccagttaatagtttgcgcaacgttgttgccattgctacaggcatcgtggtgtcacgctcgtcgtttggtatggcttcattcagctccggttcccaacgatcaaggcgagttacatgatcccccatgttgtgcaaaaaagcggttagctccttcggtcctccgatcgttgtcagaagtaagttggccgcagtgttatcactcatggttatggcagcactgcataattctcttactgtcatgccatccgtaagatgcttttctgtgactggtgagtactcaaccaagtcattctgagaatagtgtatgcggcgaccgagttgctcttgcccggcgtcaatacgggataataccgcgccacatagcagaactttaaaagtgctcatcattggaaaacgttcttcggggcgaaaactctcaaggatcttaccgctgttgagatccagttcgatgtaacccactcgtgcacccaactgatcttcagcatcttttactttcaccagcgtttctgggtgagcaaaaacaggaaggcaaaatgccgcaaaaaagggaataagggcgacacggaaatgttgaatactcatactcttcctttttcaatattattgaagcatttatcagggttattgtctcatgagcggatacatatttgaatgtatttagaaaaataaacaaataggggttccgcgcacatttccccgaaaagtgccacctgacgtcgacggatcgggagatcgatctcccgatcccctagggtcgactctcagtacaatctgctctgatgccgcatagttaagccagtatctgctccctgcttgtgtgttggaggtcgctgagtagtgcgcgagcaaaatttaagctacaacaaggcaaggcttgaccgacaattgcatgaagaatctgcttagggttaggcgttttgcgctgcttcgcgatgtacgggccagatatacgcgtt

SEQ ID NO: 683 - DNA, 8722 bp, synthetic construct
  source 1..8722: mol_type = other DNA
gacattgattattgactagttattaatagtaatcaattacggggtcattagttcatagcccatatatggagttccgcgttacataacttacggtaaatggcccgcctggctgaccgcccaacgacccccgcccattgacgtcaataatgacgtatgttcccatagtaacgccaatagggactttccattgacgtcaatgggtggagtatttacggtaaactgcccacttggcagtacatcaagtgtatcatatgccaagtacgccccctattgacgtcaatgacggtaaatggcccgcctggcattatgcccagtacatgaccttatgggactttcctacttggcagtacatctacgtattagtcatcgctattaccatggtgatgcggttttggcagtacatcaatgggcgtggatagcggtttgactcacggggatttccaagtctccaccccattgacgtcaatgggagtttgttttggcaccaaaatcaacgggactttccaaaatgtcgtaacaactccgccccattgacgcaaatgggcggtaggcgtgtacggtgggaggtctatataagcagagctggtttagtgaaccgtcagatccgctagagatccgcggccgctaatacgactcactatagggagagccgccaccatgaaacggacagccgacggaagcgagttcgagtcaccaaagaagaagcggaaagtctccgacgggatcttttacgactcccgcaactatgaggcgcaagagaatgcgatcctcccgaagaacgccgatgcgaacggggcctataatatcgccaggaaagtgctctgggccatcgggcagttcaaaaaggcggaggatgagaagctcgacaaggtgaaaattgccatttccaacaaggagtggctggagtacgcgcagacctccgtgaagcacggctcctctggcagctccggctctagcggctcctctggcagctccggctccaagctggagaagtttacaaactgttacagcctctccaaaaccctcaggtttaaagcgatcccggtgggcaagacccaggagaacatcgacaacaagaggctcctggtggaagacgagaagcgcgccgaagactacaagggcgtgaagaagctgctcgataggtactacctcagctttattaacgacgtgctgcacagcatcaaactcaagaatctcaacaactacatctccctcttccgcaaaaagacccgcaccgagaaggagaacaaggagctggagaacctggagatcaacctccgcaaggaaatcgccaaagcgttcaagggcaatgaagggtacaagagcctcttcaagaaagacatcatcgaaactatcctcccagagtttctcgatgacaaggacgagatcgcgctggtgaactcctttaacgggttcacaaccgcgtttaccggcttctttgataacagggaaaatatgttctccgaggaggccaagtccaccagcatcgccttcaggtgtatcaacgagaacctcacccgctacatttccaatatggacattttcgagaaggtggatgcgatcttcgataagcacgaggtgcaggagatcaaagagaagattctcaattccgattatgacgtcgaggatttcttcgaaggggagttctttaattttgtgctcacacaagagggcattgacgtgtacaacgcgattatcgggggcttcgtcacagagtccggggagaagattaaggggctgaatgagtacatcaatctgtacaatcagaagaccaagcagaaactgccgaaattcaagccgctctacaagcaagtcctgtccgatagggaaagcctctccttctacggcgagggctataccagcgacgaggaggtgctggaagtcttccgcaacacactgaataagaatagcgagattttctcctccatcaagaagctcgagaagctctttaagaactttgacgagtacagctccgccgggattttcgtgaagaacgggccggcgatcagcaccatctccaaggacatctttggcgagtggaacgtcatcagggacaagtggaacgccgagtacgacgacatccacctgaagaagaaggcggtggtgaccgagaagtatgaggacgatcgcaggaagtccttcaaaaaaatcggctccttcagcctcgaacagctccaggagtatgccgatgcggatctgtccgtcgtcgagaagctgaaggaaatcatcattcagaaggtcgacgagatctataaagtgtacgggtccagcgagaagctgttcgacgccgactttgtgctcgagaagtccctcaaaaagaatgacgccgtggtggccattatgaaagacctgctcgactccgtgaagtccttcgaaaattacattaaagcgttctttggggaggggaaggaaactaacagggatgagtccttctatggcgactttgtcctcgcgtacgacatcctgctgaaggtcgaccacatttacgacgcgatccgcaactacgtgacacagaagccgtactccaaagacaagttcaagctgtacttccagaacccgcaatttatggggggctgggacaaggataaagagacagactaccgcgcgacaattctccgctatggctccaaatactatctggccatcatggacaagaagtacgcgaagtgcctgcagaagatcgacaaagacgacgtcaatggcaactatgaaaagatcaactacaagctgctgccgggcccgaacaagatgctcccgaaggtgttcttcagcaagaagtggatggcctactacaatccaagcgaggatattcagaaaatctataaaaacgggaccttcaagaagggggacatgtttaacctcaacgactgccacaagctcattgatttcttcaaggatagcatttcccgctacccgaaatggtccaatgcgtacgattttaacttctccgagacagaaaagtacaaagacatcgcgggcttttacagggaggtggaggagcaagggtataaagtttcttttgaatccgcgagcaagaaggaagtcgacaagctcgtcgaggagggcaagctctacatgttccaaatttataacaaggacttttccgacaagagccatgggaccccaaacctccacaccatgtacttcaaactgctctttgacgagaacaaccacgggcaaatcaggctgagcggcggcgccgaattattcatgcgcagggcctccctcaagaaggaagagctggtcgtccatccagccaattccccgatcgcgaacaagaacccggacaatccgaaaaagaccaccaccctgtcctacgacgtctacaaggacaaacgcttcagcgaagaccagtacgaattacacatcccaattgcgattaataagtgcccaaagaatatcttcaaaattaatacagaggtcagggtgctgctcaaacacgacgacaatccgtatgtcatcggcattgccaggggcgagcgcaatctgctctatatcgtggtcgtggatgggaagggcaatattgtggagcagtactccctgaacgagattatcaacaacttcaatgggattaggattaagaccgactatcacagcctgctcgacaagaaagaaaaagagaggtttgaggcccgccaaaactggacctccattgagaatatcaaagaattaaaggccggctatatttcccaagtcgtccacaagatctgcgagctggtggagaaatatgacgccgtgattgcgctcgaagacttaaattctgggttcaagaactcccgcgtgaaggtggaaaaacaggtgtatcagaaattcgagaaaatgctgatcgacaaactcaattatatggtggataagaagtccaacccgtgtgccacagggggcgcgctgaagggctatcagatcaccaacaagttcgagagcttcaagagcatgagcacccagaacgggtttattttctacatcccggcgtggctcacctccaagattgacccgagcaccggcttcgtgaacctcctgaagacaaagtatacctccattgccgacagcaagaagtttatctcctccttcgaccgcattatgtatgtgccggaggaggacctcttcgagttcgccctcgactacaaaaacttcagccgcacagatgcggattacatcaagaagtggaagctgtactcctacgggaacaggatccgcatcttcaggaatccaaaaaaaaataacgtctttgactgggaggaagtgtgcctgacatccgcctacaaggaactgttcaataaatacggcatcaattaccagcagggcgacattcgcgccctcctctgtgagcagtccgacaaagcgttttactccagcttcatggccctcatgtccctgatgctccaaatgaggaatagcatcacagggcgcaccgacgtcgacttcctcatcagcccggtgaagaactctggtggttcttctggtggttcttctgaggttgaattttcacatgagtattggatgagacacgctcttaccttggctaagagagcaagggatgagagagaagttccagtgggagcagttcttgtgttgaacaatagagttattggagagggttggaacaggtaagtatcaaggttacaagacaggtttaaggagaccaatagaaactgggcttgtcgagacagagaagactcttgcgtttctgataggcacctattggtcttactgacatccactttgcctttctctccacagggctattggacttcatgatcctactgctcacgcagaaattatggcacttagacaaggtggacttgttatgcagaactacaggcttatcgatgctactctttatgttacattcgagccatgtgtgatgtgcgctggagcaatgattcattctaggattggaagggttgtgttcggtgttagaaactctaagaggggagctgcaggttcacttatgaacgttttgaattatcctggtatgaaccacagagtggagattactgaaggtattttggcagatgaatgtgctgcacttttgtgcgatttttacagaatgcctagacaagtgttcaacgctcaaaagaaggcacaatcttctattaactctggcggctcaaaaagaaccgccgacggcagcgaattcgagcccaagaagaagaggaaagtcggaagcggagctactaacttcagcctgctgaagcaggctggagacgtggaggagaaccctggacctatggtgagcaagggcgaggagctgttcaccggggtggtgcccatcctggtcgagctggacggcgacgtaaacggccacaagttcagcgtgtccggcgagggcgagggcgatgccacctacggcaagctgaccctgaagttcatctgcaccaccggcaagctgcccgtgccctggcccaccctcgtgaccaccctgacctatggagtgcagtgcttcagccgctaccccgaccacatgaagcagcacgacttcttcaagtccgccatgcccgaaggctacgtccaggagcgcaccatcttcttcaaggacgacggcaactacaagacccgcgccgaggtgaagttcgagggcgacaccctggtgaaccgcatcgagctgaagggcatcgacttcaaggaggacggcaacatcctggggcacaagctggagtacaactacaacagccacaacgtctatatcatggccgacaagcagaagaacggcatcaaggtgaacttcaagatccgccacaacatcgaggacggcagcgtgcagctcgccgaccactaccagcagaacacccccatcggcgacggccccgtgctgctgcccgacaaccactacctgagcacccagtccgccctgagcaaagaccccaacgagaagcgcgatcacatggtcctgctggagttcgtgaccgccgccgggatcactctcggcatggacgagctgtacaagtctggtggttctcccaagaagaagaggaaagtctaaccggtcatcatcaccatcaccattgagtttaaacccgctgatcagcctcgactgtgccttctagttgccagccatctgttgtttgcccctcccccgtgccttccttgaccctggaaggtgccactcccactgtcctttcctaataaaatgaggaaattgcatcgcattgtctgagtaggtgtcattctattctggggggtggggtggggcaggacagcaagggggaggattgggaagacaatagcaggcatgctggggatgcggtgggctctatggcttctgaggcggaaagaaccagctggggctcgataccgtcgacctctagctagagcttggcgtaatcatggtcatagctgtttcctgtgtgaaattgttatccgctcacaattccacacaacatacgagccggaagcataaagtgtaaagcctagggtgcctaatgagtgagctaactcacattaattgcgttgcgctcactgcccgctttccagtcgggaaacctgtcgtgccagctgcattaatgaatcggccaacgcgcggggagaggcggtttgcgtattgggcgctcttccgcttcctcgctcactgactcgctgcgctcggtcgttcggctgcggcgagcggtatcagctcactcaaaggcggtaatacggttatccacagaatcaggggataacgcaggaaagaacatgtgagcaaaaggccagcaaaaggccaggaaccgtaaaaaggccgcgttgctggcgtttttccataggctccgcccccctgacgagcatcacaaaaatcgacgctcaagtcagaggtggcgaaacccgacaggactataaagataccaggcgtttccccctggaagctccctcgtgcgctctcctgttccgaccctgccgcttaccggatacctgtccgcctttctcccttcgggaagcgtggcgctttctcatagctcacgctgtaggtatctcagttcggtgtaggtcgttcgctccaagctgggctgtgtgcacgaaccccccgttcagcccgaccgctgcgccttatccggtaactatcgtcttgagtccaacccggtaagacacgacttatcgccactggcagcagccactggtaacaggattagcagagcgaggtatgtaggcggtgctacagagttcttgaagtggtggcctaactacggctacactagaagaacagtatttggtatctgcgctctgctgaagccagttaccttcggaaaaagagttggtagctcttgatccggcaaacaaaccaccgctggtagcggtggtttttttgtttgcaagcagcagattacgcgcagaaaaaaaggatctcaagaagatcctttgatcttttctacggggtctgacactcagtggaacgaaaactcacgttaagggattttggtcatgagattatcaaaaaggatcttcacctagatccttttaaattaaaaatgaagttttaaatcaatctaaagtatatatgagtaaacttggtctgacagttaccaatgcttaatcagtgaggcacctatctcagcgatctgtctatttcgttcatccatagttgcctgactccccgtcgtgtagataactacgatacgggagggcttaccatctggccccagtgctgcaatgataccgcgagacccacgctcaccggctccagatttatcagcaataaaccagccagccggaagggccgagcgcagaagtggtcctgcaactttatccgcctccatccagtctattaattgttgccgggaagctagagtaagtagttcgccagttaatagtttgcgcaacgttgttgccattgctacaggcatcgtggtgtcacgctcgtcgtttggtatggcttcattcagctccggttcccaacgatcaaggcgagttacatgatcccccatgttgtgcaaaaaagcggttagctccttcggtcctccgatcgttgtcagaagtaagttggccgcagtgttatcactcatggttatggcagcactgcataattctcttactgtcatgccatccgtaagatgcttttctgtgactggtgagtactcaaccaagtcattctgagaatagtgtatgcggcgaccgagttgctcttgcccggcgtcaatacgggataataccgcgccacatagcagaactttaaaagtgctcatcattggaaaacgttcttcggggcgaaaactctcaaggatcttaccgctgttgagatccagttcgatgtaacccactcgtgcacccaactgatcttcagcatcttttactttcaccagcgtttctgggtgagcaaaaacaggaaggcaaaatgccgcaaaaaagggaataagggcgacacggaaatgttgaatactcatactcttcctttttcaatattattgaagcatttatcagggttattgtctcatgagcggatacatatttgaatgtatttagaaaaataaacaaataggggttccgcgcacatttccccgaaaagtgccacctgacgtcgacggatcgggagatcgatctcccgatcccctagggtcgactctcagtacaatctgctctgatgccgcatagttaagccagtatctgctccctgcttgtgtgttggaggtcgctgagtagtgcgcgagcaaaatttaagctacaacaaggcaaggcttgaccgacaattgcatgaagaatctgcttagggttaggcgttttgcgctgcttcgcgatgtacgggccagatatacgcgtt

SEQ ID NO: 684 - DNA, 8716 bp, synthetic construct
  source 1..8716: mol_type = other DNA
gacattgattattgactagttattaatagtaatcaattacggggtcattagttcatagcccatatatggagttccgcgttacataacttacggtaaatggcccgcctggctgaccgcccaacgacccccgcccattgacgtcaataatgacgtatgttcccatagtaacgccaatagggactttccattgacgtcaatgggtggagtatttacggtaaactgcccacttggcagtacatcaagtgtatcatatgccaagtacgccccctattgacgtcaatgacggtaaatggcccgcctggcattatgcccagtacatgaccttatgggactttcctacttggcagtacatctacgtattagtcatcgctattaccatggtgatgcggttttggcagtacatcaatgggcgtggatagcggtttgactcacggggatttccaagtctccaccccattgacgtcaatgggagtttgttttggcaccaaaatcaacgggactttccaaaatgtcgtaacaactccgccccattgacgcaaatgggcggtaggcgtgtacggtgggaggtctatataagcagagctggtttagtgaaccgtcagatccgctagagatccgcggccgctaatacgactcactatagggagagccgccaccatgaaacggacagccgacggaagcgagttcgagtcaccaaagaagaagcggaaagtctccgacgggatcttttacgactcccgcaactatgaggcgcaagagaatgcgatcctcccgaagaacgccgatgcgaacggggcctataatatcgccaggaaagtgctctgggccatcgggcagttcaaaaaggcggaggatgagaagctcgacaaggtgaaaattgccatttccaacaaggagtggctggagtacgcgcagacctccgtgaagcacggctcctctggcagctccggctctagcggctcctctggcagctccggctccaagctggagaagtttacaaactgttacagcctctccaaaaccctcaggtttaaagcgatcccggtgggcaagacccaggagaacatcgacaacaagaggctcctggtggaagacgagaagcgcgccgaagactacaagggcgtgaagaagctgctcgataggtactacctcagctttattaacgacgtgctgcacagcatcaaactcaagaatctcaacaactacatctccctcttccgcaaaaagacccgcaccgagaaggagaacaaggagctggagaacctggagatcaacctccgcaaggaaatcgccaaagcgttcaagggcaatgaagggtacaagagcctcttcaagaaagacatcatcgaaactatcctcccagagtttctcgatgacaaggacgagatcgcgctggtgaactcctttaacgggttcacaaccgcgtttaccggcttctttgataacagggaaaatatgttctccgaggaggccaagtccaccagcatcgccttcaggtgtatcaacgagaacctcacccgctacatttccaatatggacattttcgagaaggtggatgcgatcttcgataagcacgaggtgcaggagatcaaagagaagattctcaattccgattatgacgtcgaggatttcttcgaaggggagttctttaattttgtgctcacacaagagggcattgacgtgtacaacgcgattatcgggggcttcgtcacagagtccggggagaagattaaggggctgaatgagtacatcaatctgtacaatcagaagaccaagcagaaactgccgaaattcaagccgctctacaagcaagtcctgtccgatagggaaagcctctccttctacggcgagggctataccagcgacgaggaggtgctggaagtcttccgcaacacactgaataagaatagcgagattttctcctccatcaagaagctcgagaagctctttaagaactttgacgagtacagctccgccgggattttcgtgaagaacgggccggcgatcagcaccatctccaaggacatctttggcgagtggaacgtcatcagggacaagtggaacgccgagtacgacgacatccacctgaagaagaaggcggtggtgaccgagaagtatgaggacgatcgcaggaagtccttcaaaaaaatcggctccttcagcctcgaacagctccaggagtatgccgatgcggatctgtccgtcgtcgagaagctgaaggaaatcatcattcagaaggtcgacgagatctataaagtgtacgggtccagcgagaagctgttcgacgccgactttgtgctcgagaagtccctcaaaaagaatgacgccgtggtggccattatgaaagacctgctcgactccgtgaagtccttcgaaaattacattaaagcgttctttggggaggggaaggaaactaacagggatgagtccttctatggcgactttgtcctcgcgtacgacatcctgctgaaggtcgaccacatttacgacgcgatccgcaactacgtgacacagaagccgtactccaaagacaagttcaagctgtacttccagaacccgcaatttatggggggctgggacaaggataaagagacagactaccgcgcgacaattctccgctatggctccaaatactatctggccatcatggacaagaagtacgcgaagtgcctgcagaagatcgacaaagacgacgtcaatggcaactatgaaaagatcaactacaagctgctgccgggcccgaacaagatgctcccgaaggtgttcttcagcaagaagtggatggcctactacaatccaagcgaggatattcagaaaatctataaaaacgggaccttcaagaagggggacatgtttaacctcaacgactgccacaagctcattgatttcttcaaggatagcatttcccgctacccgaaatggtccaatgcgtacgattttaacttctccgagacagaaaagtacaaagacatcgcgggcttttacagggaggtggaggagcaagggtataaagtttcttttgaatccgcgagcaagaaggaagtcgacaagctcgtcgaggagggcaagctctacatgttccaaatttataacaaggacttttccgacaagagccatgggaccccaaacctccacaccatgtacttcaaactgctctttgacgagaacaaccacgggcaaatcaggctgagcggcggcgccgaattattcatgcgcagggcctccctcaagaaggaagagctggtcgtccatccagccaattccccgatcgcgaacaagaacccggacaatccgaaaaagaccaccaccctgtcctacgacgtctacaaggacaaacgcttcagcgaagaccagtacgaattacacatcccaattgcgattaataagtgcccaaagaatatcttcaaaattaatacagaggtcagggtgctgctcaaacacgacgacaatccgtatgtcatcggcattgccaggggcgagcgcaatctgctctatatcgtggtcgtggatgggaagggcaatattgtggagcagtactccctgaacgagattatcaacaacttcaatgggattaggattaagaccgactatcacagcctgctcgacaagaaagaaaaagagaggtttgaggcccgccaaaactggacctccattgagaatatcaaagaattaaaggccggctatatttcccaagtcgtccacaagatctgcgagctggtggagaaatatgacgccgtgattgcgctcgaagacttaaattctgggttcaagaactcccgcgtgaaggtggaaaaacaggtgtatcagaaattcgagaaaatgctgatcgacaaactcaattatatggtggataagaagtccaacccgtgtgccacagggggcgcgctgaagggctatcagatcaccaacaagttcgagagcttcaagagcatgagcacccagaacgggtttattttctacatcccggcgtggctcacctccaagattgacccgagcaccggcttcgtgaacctcctgaagacaaagtatacctccattgccgacagcaagaagtttatctcctccttcgaccgcattatgtatgtgccggaggaggacctcttcgagttcgccctcgactacaaaaacttcagccgcacagatgcggattacatcaagaagtggaagctgtactcctacgggaacaggatccgcatcttcaggaatccaaaaaaaaataacgtctttgactgggaggaagtgtgcctgacatccgcctacaaggaactgttcaataaatacggcatcaattaccagcagggcgacattcgcgccctcctctgtgagcagtccgacaaagcgttttactccagcttcatggccctcatgtccctgatgctccaaatgaggaatagcatcacagggcgcaccgacgtcgacttcctcatcagcccggtgaagaactctggttcttctggttcttctgaggttgaattttcacatgagtattggatgagacacgctcttaccttggctaagagagcaagggatgagagagaagttccagtgggagcagttcttgtgttgaacaatagagttattggagagggttggaacaggtaagtatcaaggttacaagacaggtttaaggagaccaatagaaactgggcttgtcgagacagagaagactcttgcgtttctgataggcacctattggtcttactgacatccactttgcctttctctccacagggctattggacttcatgatcctactgctcacgcagaaattatggcacttagacaaggtggacttgttatgcagaactacaggcttatcgatgctactctttatgttacattcgagccatgtgtgatgtgcgctggagcaatgattcattctaggattggaagggttgtgttcggtgttagaaactctaagaggggagctgcaggttcacttatgaacgttttgaattatcctggtatgaaccacagagtggagattactgaaggtattttggcagatgaatgtgctgcacttttgtgcgatttttacagaatgcctagacaagtgttcaacgctcaaaagaaggcacaatcttctattaactctggcggctcaaaaagaaccgccgacggcagcgaattcgagcccaagaagaagaggaaagtcggaagcggagctactaacttcagcctgctgaagcaggctggagacgtggaggagaaccctggacctatggtgagcaagggcgaggagctgttcaccggggtggtgcccatcctggtcgagctggacggcgacgtaaacggccacaagttcagcgtgtccggcgagggcgagggcgatgccacctacggcaagctgaccctgaagttcatctgcaccaccggcaagctgcccgtgccctggcccaccctcgtgaccaccctgacctatggagtgcagtgcttcagccgctaccccgaccacatgaagcagcacgacttcttcaagtccgccatgcccgaaggctacgtccaggagcgcaccatcttcttcaaggacgacggcaactacaagacccgcgccgaggtgaagttcgagggcgacaccctggtgaaccgcatcgagctgaagggcatcgacttcaaggaggacggcaacatcctggggcacaagctggagtacaactacaacagccacaacgtctatatcatggccgacaagcagaagaacggcatcaaggtgaacttcaagatccgccacaacatcgaggacggcagcgtgcagctcgccgaccactaccagcagaacacccccatcggcgacggccccgtgctgctgcccgacaaccactacctgagcacccagtccgccctgagcaaagaccccaacgagaagcgcgatcacatggtcctgctggagttcgtgaccgccgccgggatcactctcggcatggacgagctgtacaagtctggtggttctcccaagaagaagaggaaagtctaaccggtcatcatcaccatcaccattgagtttaaacccgctgatcagcctcgactgtgccttctagttgccagccatctgttgtttgcccctcccccgtgccttccttgaccctggaaggtgccactcccactgtcctttcctaataaaatgaggaaattgcatcgcattgtctgagtaggtgtcattctattctggggggtggggtggggcaggacagcaagggggaggattgggaagacaatagcaggcatgctggggatgcggtgggctctatggcttctgaggcggaaagaaccagctggggctcgataccgtcgacctctagctagagcttggcgtaatcatggtcatagctgtttcctgtgtgaaattgttatccgctcacaattccacacaacatacgagccggaagcataaagtgtaaagcctagggtgcctaatgagtgagctaactcacattaattgcgttgcgctcactgcccgctttccagtcgggaaacctgtcgtgccagctgcattaatgaatcggccaacgcgcggggagaggcggtttgcgtattgggcgctcttccgcttcctcgctcactgactcgctgcgctcggtcgttcggctgcggcgagcggtatcagctcactcaaaggcggtaatacggttatccacagaatcaggggataacgcaggaaagaacatgtgagcaaaaggccagcaaaaggccaggaaccgtaaaaaggccgcgttgctggcgtttttccataggctccgcccccctgacgagcatcacaaaaatcgacgctcaagtcagaggtggcgaaacccgacaggactataaagataccaggcgtttccccctggaagctccctcgtgcgctctcctgttccgaccctgccgcttaccggatacctgtccgcctttctcccttcgggaagcgtggcgctttctcatagctcacgctgtaggtatctcagttcggtgtaggtcgttcgctccaagctgggctgtgtgcacgaaccccccgttcagcccgaccgctgcgccttatccggtaactatcgtcttgagtccaacccggtaagacacgacttatcgccactggcagcagccactggtaacaggattagcagagcgaggtatgtaggcggtgctacagagttcttgaagtggtggcctaactacggctacactagaagaacagtatttggtatctgcgctctgctgaagccagttaccttcggaaaaagagttggtagctcttgatccggcaaacaaaccaccgctggtagcggtggtttttttgtttgcaagcagcagattacgcgcagaaaaaaaggatctcaagaagatcctttgatcttttctacggggtctgacactcagtggaacgaaaactcacgttaagggattttggtcatgagattatcaaaaaggatcttcacctagatccttttaaattaaaaatgaagttttaaatcaatctaaagtatatatgagtaaacttggtctgacagttaccaatgcttaatcagtgaggcacctatctcagcgatctgtctatttcgttcatccatagttgcctgactccccgtcgtgtagataactacgatacgggagggcttaccatctggccccagtgctgcaatgataccgcgagacccacgctcaccggctccagatttatcagcaataaaccagccagccggaagggccgagcgcagaagtggtcctgcaactttatccgcctccatccagtctattaattgttgccgggaagctagagtaagtagttcgccagttaatagtttgcgcaacgttgttgccattgctacaggcatcgtggtgtcacgctcgtcgtttggtatggcttcattcagctccggttcccaacgatcaaggcgagttacatgatcccccatgttgtgcaaaaaagcggttagctccttcggtcctccgatcgttgtcagaagtaagttggccgcagtgttatcactcatggttatggcagcactgcataattctcttactgtcatgccatccgtaagatgcttttctgtgactggtgagtactcaaccaagtcattctgagaatagtgtatgcggcgaccgagttgctcttgcccggcgtcaatacgggataataccgcgccacatagcagaactttaaaagtgctcatcattggaaaacgttcttcggggcgaaaactctcaaggatcttaccgctgttgagatccagttcgatgtaacccactcgtgcacccaactgatcttcagcatcttttactttcaccagcgtttctgggtgagcaaaaacaggaaggcaaaatgccgcaaaaaagggaataagggcgacacggaaatgttgaatactcatactcttcctttttcaatattattgaagcatttatcagggttattgtctcatgagcggatacatatttgaatgtatttagaaaaataaacaaataggggttccgcgcacatttccccgaaaagtgccacctgacgtcgacggatcgggagatcgatctcccgatcccctagggtcgactctcagtacaatctgctctgatgccgcatagttaagccagtatctgctccctgcttgtgtgttggaggtcgctgagtagtgcgcgagcaaaatttaagctacaacaaggcaaggcttgaccgacaattgcatgaagaatctgcttagggttaggcgttttgcgctgcttcgcgatgtacgggccagatatacgcgtt

SEQ ID NO: 685 - DNA, 8710 bp, synthetic construct
  source 1..8710: mol_type = other DNA
gacattgattattgactagttattaatagtaatcaattacggggtcattagttcatagcccatatatggagttccgcgttacataacttacggtaaatggcccgcctggctgaccgcccaacgacccccgcccattgacgtcaataatgacgtatgttcccatagtaacgccaatagggactttccattgacgtcaatgggtggagtatttacggtaaactgcccacttggcagtacatcaagtgtatcatatgccaagtacgccccctattgacgtcaatgacggtaaatggcccgcctggcattatgcccagtacatgaccttatgggactttcctacttggcagtacatctacgtattagtcatcgctattaccatggtgatgcggttttggcagtacatcaatgggcgtggatagcggtttgactcacggggatttccaagtctccaccccattgacgtcaatgggagtttgttttggcaccaaaatcaacgggactttccaaaatgtcgtaacaactccgccccattgacgcaaatgggcggtaggcgtgtacggtgggaggtctatataagcagagctggtttagtgaaccgtcagatccgctagagatccgcggccgctaatacgactcactatagggagagccgccaccatgaaacggacagccgacggaagcgagttcgagtcaccaaagaagaagcggaaagtctccgacgggatcttttacgactcccgcaactatgaggcgcaagagaatgcgatcctcccgaagaacgccgatgcgaacggggcctataatatcgccaggaaagtgctctgggccatcgggcagttcaaaaaggcggaggatgagaagctcgacaaggtgaaaattgccatttccaacaaggagtggctggagtacgcgcagacctccgtgaagcacggctcctctggcagctccggctctagcggctcctctggcagctccggctccaagctggagaagtttacaaactgttacagcctctccaaaaccctcaggtttaaagcgatcccggtgggcaagacccaggagaacatcgacaacaagaggctcctggtggaagacgagaagcgcgccgaagactacaagggcgtgaagaagctgctcgataggtactacctcagctttattaacgacgtgctgcacagcatcaaactcaagaatctcaacaactacatctccctcttccgcaaaaagacccgcaccgagaaggagaacaaggagctggagaacctggagatcaacctccgcaaggaaatcgccaaagcgttcaagggcaatgaagggtacaagagcctcttcaagaaagacatcatcgaaactatcctcccagagtttctcgatgacaaggacgagatcgcgctggtgaactcctttaacgggttcacaaccgcgtttaccggcttctttgataacagggaaaatatgttctccgaggaggccaagtccaccagcatcgccttcaggtgtatcaacgagaacctcacccgctacatttccaatatggacattttcgagaaggtggatgcgatcttcgataagcacgaggtgcaggagatcaaagagaagattctcaattccgattatgacgtcgaggatttcttcgaaggggagttctttaattttgtgctcacacaagagggcattgacgtgtacaacgcgattatcgggggcttcgtcacagagtccggggagaagattaaggggctgaatgagtacatcaatctgtacaatcagaagaccaagcagaaactgccgaaattcaagccgctctacaagcaagtcctgtccgatagggaaagcctctccttctacggcgagggctataccagcgacgaggaggtgctggaagtcttccgcaacacactgaataagaatagcgagattttctcctccatcaagaagctcgagaagctctttaagaactttgacgagtacagctccgccgggattttcgtgaagaacgggccggcgatcagcaccatctccaaggacatctttggcgagtggaacgtcatcagggacaagtggaacgccgagtacgacgacatccacctgaagaagaaggcggtggtgaccgagaagtatgaggacgatcgcaggaagtccttcaaaaaaatcggctccttcagcctcgaacagctccaggagtatgccgatgcggatctgtccgtcgtcgagaagctgaaggaaatcatcattcagaaggtcgacgagatctataaagtgtacgggtccagcgagaagctgttcgacgccgactttgtgctcgagaagtccctcaaaaagaatgacgccgtggtggccattatgaaagacctgctcgactccgtgaagtccttcgaaaattacattaaagcgttctttggggaggggaaggaaactaacagggatgagtccttctatggcgactttgtcctcgcgtacgacatcctgctgaaggtcgaccacatttacgacgcgatccgcaactacgtgacacagaagccgtactccaaagacaagttcaagctgtacttccagaacccgcaatttatggggggctgggacaaggataaagagacagactaccgcgcgacaattctccgctatggctccaaatactatctggccatcatggacaagaagtacgcgaagtgcctgcagaagatcgacaaagacgacgtcaatggcaactatgaaaagatcaactacaagctgctgccgggcccgaacaagatgctcccgaaggtgttcttcagcaagaagtggatggcctactacaatccaagcgaggatattcagaaaatctataaaaacgggaccttcaagaagggggacatgtttaacctcaacgactgccacaagctcattgatttcttcaaggatagcatttcccgctacccgaaatggtccaatgcgtacgattttaacttctccgagacagaaaagtacaaagacatcgcgggcttttacagggaggtggaggagcaagggtataaagtttcttttgaatccgcgagcaagaaggaagtcgacaagctcgtcgaggagggcaagctctacatgttccaaatttataacaaggacttttccgacaagagccatgggaccccaaacctccacaccatgtacttcaaactgctctttgacgagaacaaccacgggcaaatcaggctgagcggcggcgccgaattattcatgcgcagggcctccctcaagaaggaagagctggtcgtccatccagccaattccccgatcgcgaacaagaacccggacaatccgaaaaagaccaccaccctgtcctacgacgtctacaaggacaaacgcttcagcgaagaccagtacgaattacacatcccaattgcgattaataagtgcccaaagaatatcttcaaaattaatacagaggtcagggtgctgctcaaacacgacgacaatccgtatgtcatcggcattgccaggggcgagcgcaatctgctctatatcgtggtcgtggatgggaagggcaatattgtggagcagtactccctgaacgagattatcaacaacttcaatgggattaggattaagaccgactatcacagcctgctcgacaagaaagaaaaagagaggtttgaggcccgccaaaactggacctccattgagaatatcaaagaattaaaggccggctatatttcccaagtcgtccacaagatctgcgagctggtggagaaatatgacgccgtgattgcgctcgaagacttaaattctgggttcaagaactcccgcgtgaaggtggaaaaacaggtgtatcagaaattcgagaaaatgctgatcgacaaactcaattatatggtggataagaagtccaacccgtgtgccacagggggcgcgctgaagggctatcagatcaccaacaagttcgagagcttcaagagcatgagcacccagaacgggtttattttctacatcccggcgtggctcacctccaagattgacccgagcaccggcttcgtgaacctcctgaagacaaagtatacctccattgccgacagcaagaagtttatctcctccttcgaccgcattatgtatgtgccggaggaggacctcttcgagttcgccctcgactacaaaaacttcagccgcacagatgcggattacatcaagaagtggaagctgtactcctacgggaacaggatccgcatcttcaggaatccaaaaaaaaataacgtctttgactgggaggaagtgtgcctgacatccgcctacaaggaactgttcaataaatacggcatcaattaccagcagggcgacattcgcgccctcctctgtgagcagtccgacaaagcgttttactccagcttcatggccctcatgtccctgatgctccaaatgaggaatagcatcacagggcgcaccgacgtcgacttcctcatcagcccggtgaagaactctggtggttcttctgaggttgaattttcacatgagtattggatgagacacgctcttaccttggctaagagagcaagggatgagagagaagttccagtgggagcagttcttgtgttgaacaatagagttattggagagggttggaacaggtaagtatcaaggttacaagacaggtttaaggagaccaatagaaactgggcttgtcgagacagagaagactcttgcgtttctgataggcacctattggtcttactgacatccactttgcctttctctccacagggctattggacttcatgatcctactgctcacgcagaaattatggcacttagacaaggtggacttgttatgcagaactacaggcttatcgatgctactctttatgttacattcgagccatgtgtgatgtgcgctggagcaatgattcattctaggattggaagggttgtgttcggtgttagaaactctaagaggggagctgcaggttcacttatgaacgttttgaattatcctggtatgaaccacagagtggagattactgaaggtattttggcagatgaatgtgctgcacttttgtgcgatttttacagaatgcctagacaagtgttcaacgctcaaaagaaggcacaatcttctattaactctggcggctcaaaaagaaccgccgacggcagcgaattcgagcccaagaagaagaggaaagtcggaagcggagctactaacttcagcctgctgaagcaggctggagacgtggaggagaaccctggacctatggtgagcaagggcgaggagctgttcaccggggtggtgcccatcctggtcgagctggacggcgacgtaaacggccacaagttcagcgtgtccggcgagggcgagggcgatgccacctacggcaagctgaccctgaagttcatctgcaccaccggcaagctgcccgtgccctggcccaccctcgtgaccaccctgacctatggagtgcagtgcttcagccgctaccccgaccacatgaagcagcacgacttcttcaagtccgccatgcccgaaggctacgtccaggagcgcaccatcttcttcaaggacgacggcaactacaagacccgcgccgaggtgaagttcgagggcgacaccctggtgaaccgcatcgagctgaagggcatcgacttcaaggaggacggcaacatcctggggcacaagctggagtacaactacaacagccacaacgtctatatcatggccgacaagcagaagaacggcatcaaggtgaacttcaagatccgccacaacatcgaggacggcagcgtgcagctcgccgaccactaccagcagaacacccccatcggcgacggccccgtgctgctgcccgacaaccactacctgagcacccagtccgccctgagcaaagaccccaacgagaagcgcgatcacatggtcctgctggagttcgtgaccgccgccgggatcactctcggcatggacgagctgtacaagtctggtggttctcccaagaagaagaggaaagtctaaccggtcatcatcaccatcaccattgagtttaaacccgctgatcagcctcgactgtgccttctagttgccagccatctgttgtttgcccctcccccgtgccttccttgaccctggaaggtgccactcccactgtcctttcctaataaaatgaggaaattgcatcgcattgtctgagtaggtgtcattctattctggggggtggggtggggcaggacagcaagggggaggattgggaagacaatagcaggcatgctggggatgcggtgggctctatggcttctgaggcggaaagaaccagctggggctcgataccgtcgacctctagctagagcttggcgtaatcatggtcatagctgtttcctgtgtgaaattgttatccgctcacaattccacacaacatacgagccggaagcataaagtgtaaagcctagggtgcctaatgagtgagctaactcacattaattgcgttgcgctcactgcccgctttccagtcgggaaacctgtcgtgccagctgcattaatgaatcggccaacgcgcggggagaggcggtttgcgtattgggcgctcttccgcttcctcgctcactgactcgctgcgctcggtcgttcggctgcggcgagcggtatcagctcactcaaaggcggtaatacggttatccacagaatcaggggataacgcaggaaagaacatgtgagcaaaaggccagcaaaaggccaggaaccgtaaaaaggccgcgttgctggcgtttttccataggctccgcccccctgacgagcatcacaaaaatcgacgctcaagtcagaggtggcgaaacccgacaggactataaagataccaggcgtttccccctggaagctccctcgtgcgctctcctgttccgaccctgccgcttaccggatacctgtccgcctttctcccttcgggaagcgtggcgctttctcatagctcacgctgtaggtatctcagttcggtgtaggtcgttcgctccaagctgggctgtgtgcacgaaccccccgttcagcccgaccgctgcgccttatccggtaactatcgtcttgagtccaacccggtaagacacgacttatcgccactggcagcagccactggtaacaggattagcagagcgaggtatgtaggcggtgctacagagttcttgaagtggtggcctaactacggctacactagaagaacagtatttggtatctgcgctctgctgaagccagttaccttcggaaaaagagttggtagctcttgatccggcaaacaaaccaccgctggtagcggtggtttttttgtttgcaagcagcagattacgcgcagaaaaaaaggatctcaagaagatcctttgatcttttctacggggtctgacactcagtggaacgaaaactcacgttaagggattttggtcatgagattatcaaaaaggatcttcacctagatccttttaaattaaaaatgaagttttaaatcaatctaaagtatatatgagtaaacttggtctgacagttaccaatgcttaatcagtgaggcacctatctcagcgatctgtctatttcgttcatccatagttgcctgactccccgtcgtgtagataactacgatacgggagggcttaccatctggccccagtgctgcaatgataccgcgagacccacgctcaccggctccagatttatcagcaataaaccagccagccggaagggccgagcgcagaagtggtcctgcaactttatccgcctccatccagtctattaattgttgccgggaagctagagtaagtagttcgccagttaatagtttgcgcaacgttgttgccattgctacaggcatcgtggtgtcacgctcgtcgtttggtatggcttcattcagctccggttcccaacgatcaaggcgagttacatgatcccccatgttgtgcaaaaaagcggttagctccttcggtcctccgatcgttgtcagaagtaagttggccgcagtgttatcactcatggttatggcagcactgcataattctcttactgtcatgccatccgtaagatgcttttctgtgactggtgagtactcaaccaagtcattctgagaatagtgtatgcggcgaccgagttgctcttgcccggcgtcaatacgggataataccgcgccacatagcagaactttaaaagtgctcatcattggaaaacgttcttcggggcgaaaactctcaaggatcttaccgctgttgagatccagttcgatgtaacccactcgtgcacccaactgatcttcagcatcttttactttcaccagcgtttctgggtgagcaaaaacaggaaggcaaaatgccgcaaaaaagggaataagggcgacacggaaatgttgaatactcatactcttcctttttcaatattattgaagcatttatcagggttattgtctcatgagcggatacatatttgaatgtatttagaaaaataaacaaataggggttccgcgcacatttccccgaaaagtgccacctgacgtcgacggatcgggagatcgatctcccgatcccctagggtcgactctcagtacaatctgctctgatgccgcatagttaagccagtatctgctccctgcttgtgtgttggaggtcgctgagtagtgcgcgagcaaaatttaagctacaacaaggcaaggcttgaccgacaattgcatgaagaatctgcttagggttaggcgttttgcgctgcttcgcgatgtacgggccagatatacgcgtt

SEQ ID NO: 686 - DNA, 9145 bp, synthetic construct
  source 1..9145: mol_type = other DNA
agatatacgcgttgacattgattattgactagttattaatagtaatcaattacggggtcattagttcatagcccatatatggagttccgcgttacataacttacggtaaatggcccgcctggctgaccgcccaacgacccccgcccattgacgtcaataatgacgtatgttcccatagtaacgccaatagggactttccattgacgtcaatgggtggagtatttacggtaaactgcccacttggcagtacatcaagtgtatcatatgccaagtacgccccctattgacgtcaatgacggtaaatggcccgcctggcattatgcccagtacatgaccttatgggactttcctacttggcagtacatctacgtattagtcatcgctattaccatggtgatgcggttttggcagtacatcaatgggcgtggatagcggtttgactcacggggatttccaagtctccaccccattgacgtcaatgggagtttgttttggcaccaaaatcaacgggactttccaaaatgtcgtaacaactccgccccattgacgcaaatgggcggtaggcgtgtacggtgggaggtctatataagcagagctggtttagtgaaccgtcagatccgctagagatccgcggccgctaatacgactcactatagggagagccgccaccatgaaacggacagccgacggaagcgagttcgagtcaccaaagaagaagcggaaagtcaccaacctcagcgacattatcgagaaggaaaccggcaagcaactcgtgatccaggagagcatactgatgctccccgaggaggtcgaggaggtgattggcaataagcccgagtccgatatactggttcatactgcgtatgacgaaagcacagacgagaacgtcatgctacttaccagcgacgccccggagtacaagccctgggccctagtcatccaagacagcaacggtgagaacaagatcaagatgctttcaggcggaagtggtggaagtggcggtagtcgcaccgagaaggagaacaaggagctggagaacctggagatcaacctccgcaaggaaatcgccaaagcgttcaagggcaatgaagggtacaagagcctcttcaagaaagacatcatcgaaactatcctcccagagtttctcgatgacaaggacgagatcgcgctggtgaactcctttaacgggttcacaaccgcgtttaccggcttctttgataacagggaaaatatgttctccgaggaggccaagtccaccagcatcgccttcaggtgtatcaacgagaacctcacccgctacatttccaatatggacattttcgagaaggtggatgcgatcttcgataagcacgaggtgcaggagatcaaagagaagattctcaattccgattatgacgtcgaggatttcttcgaaggggagttctttaattttgtgctcacacaagagggcattgacgtgtacaacgcgattatcgggggcttcgtcacagagtccggggagaagattaaggggctgaatgagtacatcaatctgtacaatcagaagaccaagcagaaactgccgaaattcaagccgctctacaagcaagtcctgtccgatagggaaagcctctccttctacggcgagggctataccagcgacgaggaggtgctggaagtcttccgcaacacactgaataagaatagcgagattttctcctccatcaagaagctcgagaagctctttaagaactttgacgagtacagctccgccgggattttcgtgaagaacgggccggcgatcagcaccatctccaaggacatctttggcgagtggaacgtcatcagggacaagtggaacgccgagtacgacgacatccacctgaagaagaaggcggtggtgaccgagaagtatgaggacgatcgcaggaagtccttcaaaaaaatcggctccttcagcctcgaacagctccaggagtatgccgatgcggatctgtccgtcgtcgagaagctgaaggaaatcatcattcagaaggtcgacgagatctataaagtgtacgggtccagcgagaagctgttcgacgccgactttgtgctcgagaagtccctcaaaaagaatgacgccgtggtggccattatgaaagacctgctcgactccgtgaagtccttcgaaaattacattaaagcgttctttggggaggggaaggaaactaacagggatgagtccttctatggcgactttgtcctcgcgtacgacatcctgctgaaggtcgaccacatttacgacgcgatccgcaactacgtgacacagaagccgtactccaaagacaagttcaagctgtacttccagaacccgcaatttatggggggctgggacaaggataaagagacagactaccgcgcgacaattctccgctatggctccaaatactatctggccatcatggacaagaagtacgcgaagtgcctgcagaagatcgacaaagacgacgtcaatggcaactatgaaaagatcaactacaagctgctgccgggcccgaacaagatgctcccgaaggtgttcttcagcaagaagtggatggcctactacaatccaagcgaggatattcagaaaatctataaaaacgggaccttcaagaagggggacatgtttaacctcaacgactgccacaagctcattgatttcttcaaggatagcatttcccgctacccgaaatggtccaatgcgtacgattttaacttctccgagacagaaaagtacaaagacatcgcgggcttttacagggaggtggaggagcaagggtataaagtttcttttgaatccgcgagcaagaaggaagtcgacaagctcgtcgaggagggcaagctctacatgttccaaatttataacaaggacttttccgacaagagccatgggaccccaaacctccacaccatgtacttcaaactgctctttgacgagaacaaccacgggcaaatcaggctgagcggcggcgccgaattattcatgcgcagggcctccctcaagaaggaagagctggtcgtccatccagccaattccccgatcgcgaacaagaacccggacaatccgaaaaagaccaccaccctgtcctacgacgtctacaaggacaaacgcttcagcgaagaccagtacgaattacacatcccaattgcgattaataagtgcccaaagaatatcttcaaaattaatacagaggtcagggtgctgctcaaacacgacgacaatccgtatgtcatcggcattgccaggggcgagcgcaatctgctctatatcgtggtcgtggatgggaagggcaatattgtggagcagtactccctgaacgagattatcaacaacttcaatgggattaggattaagaccgactatcacagcctgctcgacaagaaagaaaaagagaggtttgaggcccgccaaaactggacctccattgagaatatcaaagaattaaaggccggctatatttcccaagtcgtccacaagatctgcgagctggtggagaaatatgacgccgtgattgcgctcgaagacttaaattctgggttcaagaactcccgcgtgaaggtggaaaaacaggtgtatcagaaattcgagaaaatgctgatcgacaaactcaattatatggtggataagaagtccaacccgtgtgccacagggggcgcgctgaagggctatcagatcaccaacaagttcgagagcttcaagagcatgagcacccagaacgggtttattttctacatcccggcgtggctcacctccaagattgacccgagcaccggcttcgtgaacctcctgaagacaaagtatacctccattgccgacagcaagaagtttatctcctccttcgaccgcattatgtatgtgccggaggaggacctcttcgagttcgccctcgactacaaaaacttcagccgcacagatgcggattacatcaagaagtggaagctgtactcctacgggaacaggatccgcatcttcaggaatccaaaaaaaaataacgtctttgactgggaggaagtgtgcctgacatccgcctacaaggaactgttcaataaatacggcatcaattaccagcagggcgacattcgcgccctcctctgtgagcagtccgacaaagcgttttactccagcttcatggccctcatgtccctgatgctccaaatgaggaatagcatcacagggcgcaccgacgtcgacttcctcatcagcccggtgaagaactccgacgggatcttttacgactcccgcaactatgaggcgcaagagaatgcgatcctcccgaagaacgccgatgcgaacggggcctataatatcgccaggaaagtgctctgggccatcgggcagttcaaaaaggcggaggatgagaagctcgacaaggtgaaaattgccatttccaacaaggagtggctggagtacgcgcagacctccgtgaagcacggctcctctggcagctccggctctagcggctcctctggcagctccggctccaagctggagaagtttacaaactgttacagcctctccaaaaccctcaggtttaaagcgatcccggtgggcaagacccaggagaacatcgacaacaagaggctcctggtggaagacgagaagcgcgccgaagactacaagggcgtgaagaagctgctcgataggtactacctcagctttattaacgacgtgctgcacagcatcaaactcaagaatctcaacaactacatctccctcttccgcaaaaagacctctggtggttctagcggcagcgagactcccgggacctcagagtccgccacacccgaaagttctggtggttctgaggcctcccccgcatcaggacctagacacctgatggatccccatattttcacatctaacttcaacaacggaatcggcagacacaagacctacctgtgctatgaggtggaaaggctggataacggaacctctgtgaagatggaccagcacaggtaagtatcaaggttacaagacaggtttaaggagaccaatagaaactgggcttgtcgagacagagaagactcttgcgtttctgataggcacctattggtcttactgacatccactttgcctttctctccacaggggcttcctgcataaccaggccaagaatctgctgtgcggtttctacgggagacatgcagaactgaggtttctggatctggtgccatccctgcagctggaccccgctcagatctacagagtgacttggttcatctcttggagcccttgcttttcatggggatgtgctggcgaggtgagggccttccttcaggaaaacacacacgtgagactgaggatttttgctgccagaatctacgattatgacccactgtacaaggaagctctgcagatgctgagggatgcaggcgctcaggtgagcattatgacctatgacgaattcaagcactgctgggatacttttgtggaccatcagggttgtccttttcagccatgggatgggctggacgagcattctcaggcactgagcggtagactgagggctatcctgcagaaccaggggaattctggcggctcaaaaagaaccgccgacggcagcgaattcgagcccaagaagaagaggaaagtcggaagcggagctactaacttcagcctgctgaagcaggctggagacgtggaggagaaccctggacctatggtgagcaagggcgaggagctgttcaccggggtggtgcccatcctggtcgagctggacggcgacgtaaacggccacaagttcagcgtgtccggcgagggcgagggcgatgccacctacggcaagctgaccctgaagttcatctgcaccaccggcaagctgcccgtgccctggcccaccctcgtgaccaccctgacctatggagtgcagtgcttcagccgctaccccgaccacatgaagcagcacgacttcttcaagtccgccatgcccgaaggctacgtccaggagcgcaccatcttcttcaaggacgacggcaactacaagacccgcgccgaggtgaagttcgagggcgacaccctggtgaaccgcatcgagctgaagggcatcgacttcaaggaggacggcaacatcctggggcacaagctggagtacaactacaacagccacaacgtctatatcatggccgacaagcagaagaacggcatcaaggtgaacttcaagatccgccacaacatcgaggacggcagcgtgcagctcgccgaccactaccagcagaacacccccatcggcgacggccccgtgctgctgcccgacaaccactacctgagcacccagtccgccctgagcaaagaccccaacgagaagcgcgatcacatggtcctgctggagttcgtgaccgccgccgggatcactctcggcatggacgagctgtacaagtctggtggttctcccaagaagaagaggaaagtctaaccggtcatcatcaccatcaccattgagtttaaacccgctgatcagcctcgactgtgccttctagttgccagccatctgttgtttgcccctcccccgtgccttccttgaccctggaaggtgccactcccactgtcctttcctaataaaatgaggaaattgcatcgcattgtctgagtaggtgtcattctattctggggggtggggtggggcaggacagcaagggggaggattgggaagacaatagcaggcatgctggggatgcggtgggctctatggcttctgaggcgaaaagaaccagctggggctcgataccgtcgacctctagctagagcttggcgtaatcatggtcatagctgtttcctgtgtgaaattgttatccgctcacaattccacacaacatacgagccggaagcataaagtgtaaagcctagggtgcctaatgagtgagctaactcacattaattgcgttgcgctcactgcccgctttccagtcgggaaacctgtcgtgccagctgcattaatgaatcggccaacgcgcgggaagaggcggtttgcgtattgggcgctcttccgcttcctcgctcactgactcgctgcgctcggtcgttcggctgcggcgagcggtatcagctcactcaaaggcggtaatacggttatccacagaatcaggggataacgcaggaaagaacatgtgagcaaaaggccagcaaaaggccaggaaccgtaaaaaggccgcgttgctggcgtttttccataggctccgcccccctgacgagcatcacaaaaatcgacgctcaagtcagaggtggcgaaacccgacaggactataaagataccaggcgtttccccctggaagctccctcgtgcgctctcctgttccgaccctgccgcttaccggatacctgtccgcctttctcccttcgggaagcgtggcgctttctcatagctcacgctgtaggtatctcagttcggtgtaggtcgttcgctccaagctgggctgtgtgcacgaaccccccgttcagcccgaccgctgcgccttatccggtaactatcgtcttgagtccaacccggtaagacacgacttatcgccactggcagcagccactggtaacaggattagcagagcgaggtatgtaggcggtgctacagagttcttgaagtggtggcctaactacggctacactagaagaacagtatttggtatctgcgctctgctgaagccagttaccttcggaaaaagagttggtagctcttgatccggcaaacaaaccaccgctggtagcggtggtttttttgtttgcaagcagcagattacgcgcagaaaaaaaggatctcaagaagatcctttgatcttttctacggggtctgacactcagtggaacgaaaactcacgttaagggattttggtcatgagattatcaaaaaggatcttcacctagatccttttaaattaaaaatgaagttttaaatcaatctaaagtatatatgagtaaacttggtctgacagttaccaatgcttaatcagtgaggcacctatctcagcgatctgtctatttcgttcatccatagttgcctgactccccgtcgtgtagataactacgatacgggagggcttaccatctggccccagtgctgcaatgataccgcgagacccacgctcaccggctccagatttatcagcaataaaccagccagccggaagggccgagcgcagaagtggtcctgcaactttatccgcctccatccagtctattaattgttgccgggaagctagagtaagtagttcgccagttaatagtttgcgcaacgttgttgccattgctacaggcatcgtggtgtcacgctcgtcgtttggtatggcttcattcagctccggttcccaacgatcaaggcgagttacatgatcccccatgttgtgcaaaaaagcggttagctccttcggtcctccgatcgttgtcagaagtaagttggccgcagtgttatcactcatggttatggcagcactgcataattctcttactgtcatgccatccgtaagatgcttttctgtgactggtgagtactcaaccaagtcattctgagaatagtgtatgcggcgaccgagttgctcttgcccggcgtcaatacgggataataccgcgccacatagcagaactttaaaagtgctcatcattggaaaacgttcttcggggcgaaaactctcaaggatcttaccgctgttgagatccagttcgatgtaacccactcgtgcacccaactgatcttcagcatcttttactttcaccagcgtttctgggtgagcaaaaacaggaaggcaaaatgccgcaaaaaagggaataagggcgacacggaaatgttgaatactcatactcttcctttttcaatattattgaagcatttatcagggttattgtctcatgagcggatacatatttgaatgtatttagaaaaataaacaaataggggttccgcgcacatttccccgaaaagtgccacctgacgtcgacggatcgggagatcgatctcccgatcccctagggtcgactctcagtacaatctgctctgatgccgcatagttaagccagtatctgctccctgcttgtgtgttggaggtcgctgagtagtgcgcgagcaaaatttaagctacaacaaggcaaggcttgaccgacaattgcatgaagaatctgcttagggttaggcgttttgcgctgcttcgcgatgtacgggcc

SEQ ID NO: 687 - DNA, 9121 bp, synthetic construct
  source 1..9121: mol_type = other DNA
agatatacgcgttgacattgattattgactagttattaatagtaatcaattacggggtcattagttcatagcccatatatggagttccgcgttacataacttacggtaaatggcccgcctggctgaccgcccaacgacccccgcccattgacgtcaataatgacgtatgttcccatagtaacgccaatagggactttccattgacgtcaatgggtggagtatttacggtaaactgcccacttggcagtacatcaagtgtatcatatgccaagtacgccccctattgacgtcaatgacggtaaatggcccgcctggcattatgcccagtacatgaccttatgggactttcctacttggcagtacatctacgtattagtcatcgctattaccatggtgatgcggttttggcagtacatcaatgggcgtggatagcggtttgactcacggggatttccaagtctccaccccattgacgtcaatgggagtttgttttggcaccaaaatcaacgggactttccaaaatgtcgtaacaactccgccccattgacgcaaatgggcggtaggcgtgtacggtgggaggtctatataagcagagctggtttagtgaaccgtcagatccgctagagatccgcggccgctaatacgactcactatagggagagccgccaccatgaaacggacagccgacggaagcgagttcgagtcaccaaagaagaagcggaaagtcaccaacctcagcgacattatcgagaaggaaaccggcaagcaactcgtgatccaggagagcatactgatgctccccgaggaggtcgaggaggtgattggcaataagcccgagtccgatatactggttcatactgcgtatgacgaaagcacagacgagaacgtcatgctacttaccagcgacgccccggagtacaagccctgggccctagtcatccaagacagcaacggtgagaacaagatcaagatgctttcaggcggaagtggtggaagtggcggtagtcgcaccgagaaggagaacaaggagctggagaacctggagatcaacctccgcaaggaaatcgccaaagcgttcaagggcaatgaagggtacaagagcctcttcaagaaagacatcatcgaaactatcctcccagagtttctcgatgacaaggacgagatcgcgctggtgaactcctttaacgggttcacaaccgcgtttaccggcttctttgataacagggaaaatatgttctccgaggaggccaagtccaccagcatcgccttcaggtgtatcaacgagaacctcacccgctacatttccaatatggacattttcgagaaggtggatgcgatcttcgataagcacgaggtgcaggagatcaaagagaagattctcaattccgattatgacgtcgaggatttcttcgaaggggagttctttaattttgtgctcacacaagagggcattgacgtgtacaacgcgattatcgggggcttcgtcacagagtccggggagaagattaaggggctgaatgagtacatcaatctgtacaatcagaagaccaagcagaaactgccgaaattcaagccgctctacaagcaagtcctgtccgatagggaaagcctctccttctacggcgagggctataccagcgacgaggaggtgctggaagtcttccgcaacacactgaataagaatagcgagattttctcctccatcaagaagctcgagaagctctttaagaactttgacgagtacagctccgccgggattttcgtgaagaacgggccggcgatcagcaccatctccaaggacatctttggcgagtggaacgtcatcagggacaagtggaacgccgagtacgacgacatccacctgaagaagaaggcggtggtgaccgagaagtatgaggacgatcgcaggaagtccttcaaaaaaatcggctccttcagcctcgaacagctccaggagtatgccgatgcggatctgtccgtcgtcgagaagctgaaggaaatcatcattcagaaggtcgacgagatctataaagtgtacgggtccagcgagaagctgttcgacgccgactttgtgctcgagaagtccctcaaaaagaatgacgccgtggtggccattatgaaagacctgctcgactccgtgaagtccttcgaaaattacattaaagcgttctttggggaggggaaggaaactaacagggatgagtccttctatggcgactttgtcctcgcgtacgacatcctgctgaaggtcgaccacatttacgacgcgatccgcaactacgtgacacagaagccgtactccaaagacaagttcaagctgtacttccagaacccgcaatttatggggggctgggacaaggataaagagacagactaccgcgcgacaattctccgctatggctccaaatactatctggccatcatggacaagaagtacgcgaagtgcctgcagaagatcgacaaagacgacgtcaatggcaactatgaaaagatcaactacaagctgctgccgggcccgaacaagatgctcccgaaggtgttcttcagcaagaagtggatggcctactacaatccaagcgaggatattcagaaaatctataaaaacgggaccttcaagaagggggacatgtttaacctcaacgactgccacaagctcattgatttcttcaaggatagcatttcccgctacccgaaatggtccaatgcgtacgattttaacttctccgagacagaaaagtacaaagacatcgcgggcttttacagggaggtggaggagcaagggtataaagtttcttttgaatccgcgagcaagaaggaagtcgacaagctcgtcgaggagggcaagctctacatgttccaaatttataacaaggacttttccgacaagagccatgggaccccaaacctccacaccatgtacttcaaactgctctttgacgagaacaaccacgggcaaatcaggctgagcggcggcgccgaattattcatgcgcagggcctccctcaagaaggaagagctggtcgtccatccagccaattccccgatcgcgaacaagaacccggacaatccgaaaaagaccaccaccctgtcctacgacgtctacaaggacaaacgcttcagcgaagaccagtacgaattacacatcccaattgcgattaataagtgcccaaagaatatcttcaaaattaatacagaggtcagggtgctgctcaaacacgacgacaatccgtatgtcatcggcattgccaggggcgagcgcaatctgctctatatcgtggtcgtggatgggaagggcaatattgtggagcagtactccctgaacgagattatcaacaacttcaatgggattaggattaagaccgactatcacagcctgctcgacaagaaagaaaaagagaggtttgaggcccgccaaaactggacctccattgagaatatcaaagaattaaaggccggctatatttcccaagtcgtccacaagatctgcgagctggtggagaaatatgacgccgtgattgcgctcgaagacttaaattctgggttcaagaactcccgcgtgaaggtggaaaaacaggtgtatcagaaattcgagaaaatgctgatcgacaaactcaattatatggtggataagaagtccaacccgtgtgccacagggggcgcgctgaagggctatcagatcaccaacaagttcgagagcttcaagagcatgagcacccagaacgggtttattttctacatcccggcgtggctcacctccaagattgacccgagcaccggcttcgtgaacctcctgaagacaaagtatacctccattgccgacagcaagaagtttatctcctccttcgaccgcattatgtatgtgccggaggaggacctcttcgagttcgccctcgactacaaaaacttcagccgcacagatgcggattacatcaagaagtggaagctgtactcctacgggaacaggatccgcatcttcaggaatccaaaaaaaaataacgtctttgactgggaggaagtgtgcctgacatccgcctacaaggaactgttcaataaatacggcatcaattaccagcagggcgacattcgcgccctcctctgtgagcagtccgacaaagcgttttactccagcttcatggccctcatgtccctgatgctccaaatgaggaatagcatcacagggcgcaccgacgtcgacttcctcatcagcccggtgaagaactccgacgggatcttttacgactcccgcaactatgaggcgcaagagaatgcgatcctcccgaagaacgccgatgcgaacggggcctataatatcgccaggaaagtgctctgggccatcgggcagttcaaaaaggcggaggatgagaagctcgacaaggtgaaaattgccatttccaacaaggagtggctggagtacgcgcagacctccgtgaagcacggctcctctggcagctccggctctagcggctcctctggcagctccggctccaagctggagaagtttacaaactgttacagcctctccaaaaccctcaggtttaaagcgatcccggtgggcaagacccaggagaacatcgacaacaagaggctcctggtggaagacgagaagcgcgccgaagactacaagggcgtgaagaagctgctcgataggtactacctcagctttattaacgacgtgctgcacagcatcaaactcaagaatctcaacaactacatctccctcttccgcaaaaagaccagcggcagcgagactcccgggacctcagagtccgccacacccgaaagtgaggcctcccccgcatcaggacctagacacctgatggatccccatattttcacatctaacttcaacaacggaatcggcagacacaagacctacctgtgctatgaggtggaaaggctggataacggaacctctgtgaagatggaccagcacaggtaagtatcaaggttacaagacaggtttaaggagaccaatagaaactgggcttgtcgagacagagaagactcttgcgtttctgataggcacctattggtcttactgacatccactttgcctttctctccacaggggcttcctgcataaccaggccaagaatctgctgtgcggtttctacgggagacatgcagaactgaggtttctggatctggtgccatccctgcagctggaccccgctcagatctacagagtgacttggttcatctcttggagcccttgcttttcatggggatgtgctggcgaggtgagggccttccttcaggaaaacacacacgtgagactgaggatttttgctgccagaatctacgattatgacccactgtacaaggaagctctgcagatgctgagggatgcaggcgctcaggtgagcattatgacctatgacgaattcaagcactgctgggatacttttgtggaccatcagggttgtccttttcagccatgggatgggctggacgagcattctcaggcactgagcggtagactgagggctatcctgcagaaccaggggaattctggcggctcaaaaagaaccgccgacggcagcgaattcgagcccaagaagaagaggaaagtcggaagcggagctactaacttcagcctgctgaagcaggctggagacgtggaggagaaccctggacctatggtgagcaagggcgaggagctgttcaccggggtggtgcccatcctggtcgagctggacggcgacgtaaacggccacaagttcagcgtgtccggcgagggcgagggcgatgccacctacggcaagctgaccctgaagttcatctgcaccaccggcaagctgcccgtgccctggcccaccctcgtgaccaccctgacctatggagtgcagtgcttcagccgctaccccgaccacatgaagcagcacgacttcttcaagtccgccatgcccgaaggctacgtccaggagcgcaccatcttcttcaaggacgacggcaactacaagacccgcgccgaggtgaagttcgagggcgacaccctggtgaaccgcatcgagctgaagggcatcgacttcaaggaggacggcaacatcctggggcacaagctggagtacaactacaacagccacaacgtctatatcatggccgacaagcagaagaacggcatcaaggtgaacttcaagatccgccacaacatcgaggacggcagcgtgcagctcgccgaccactaccagcagaacacccccatcggcgacggccccgtgctgctgcccgacaaccactacctgagcacccagtccgccctgagcaaagaccccaacgagaagcgcgatcacatggtcctgctggagttcgtgaccgccgccgggatcactctcggcatggacgagctgtacaagtctggtggttctcccaagaagaagaggaaagtctaaccggtcatcatcaccatcaccattgagtttaaacccgctgatcagcctcgactgtgccttctagttgccagccatctgttgtttgcccctcccccgtgccttccttgaccctggaaggtgccactcccactgtcctttcctaataaaatgaggaaattgcatcgcattgtctgagtaggtgtcattctattctggggggtggggtggggcaggacagcaagggggaggattgggaagacaatagcaggcatgctggggatgcggtgggctctatggcttctgaggcgaaaagaaccagctggggctcgataccgtcgacctctagctagagcttggcgtaatcatggtcatagctgtttcctgtgtgaaattgttatccgctcacaattccacacaacatacgagccggaagcataaagtgtaaagcctagggtgcctaatgagtgagctaactcacattaattgcgttgcgctcactgcccgctttccagtcgggaaacctgtcgtgccagctgcattaatgaatcggccaacgcgcgggaagaggcggtttgcgtattgggcgctcttccgcttcctcgctcactgactcgctgcgctcggtcgttcggctgcggcgagcggtatcagctcactcaaaggcggtaatacggttatccacagaatcaggggataacgcaggaaagaacatgtgagcaaaaggccagcaaaaggccaggaaccgtaaaaaggccgcgttgctggcgtttttccataggctccgcccccctgacgagcatcacaaaaatcgacgctcaagtcagaggtggcgaaacccgacaggactataaagataccaggcgtttccccctggaagctccctcgtgcgctctcctgttccgaccctgccgcttaccggatacctgtccgcctttctcccttcgggaagcgtggcgctttctcatagctcacgctgtaggtatctcagttcggtgtaggtcgttcgctccaagctgggctgtgtgcacgaaccccccgttcagcccgaccgctgcgccttatccggtaactatcgtcttgagtccaacccggtaagacacgacttatcgccactggcagcagccactggtaacaggattagcagagcgaggtatgtaggcggtgctacagagttcttgaagtggtggcctaactacggctacactagaagaacagtatttggtatctgcgctctgctgaagccagttaccttcggaaaaagagttggtagctcttgatccggcaaacaaaccaccgctggtagcggtggtttttttgtttgcaagcagcagattacgcgcagaaaaaaaggatctcaagaagatcctttgatcttttctacggggtctgacactcagtggaacgaaaactcacgttaagggattttggtcatgagattatcaaaaaggatcttcacctagatccttttaaattaaaaatgaagttttaaatcaatctaaagtatatatgagtaaacttggtctgacagttaccaatgcttaatcagtgaggcacctatctcagcgatctgtctatttcgttcatccatagttgcctgactccccgtcgtgtagataactacgatacgggagggcttaccatctggccccagtgctgcaatgataccgcgagacccacgctcaccggctccagatttatcagcaataaaccagccagccggaagggccgagcgcagaagtggtcctgcaactttatccgcctccatccagtctattaattgttgccgggaagctagagtaagtagttcgccagttaatagtttgcgcaacgttgttgccattgctacaggcatcgtggtgtcacgctcgtcgtttggtatggcttcattcagctccggttcccaacgatcaaggcgagttacatgatcccccatgttgtgcaaaaaagcggttagctccttcggtcctccgatcgttgtcagaagtaagttggccgcagtgttatcactcatggttatggcagcactgcataattctcttactgtcatgccatccgtaagatgcttttctgtgactggtgagtactcaaccaagtcattctgagaatagtgtatgcggcgaccgagttgctcttgcccggcgtcaatacgggataataccgcgccacatagcagaactttaaaagtgctcatcattggaaaacgttcttcggggcgaaaactctcaaggatcttaccgctgttgagatccagttcgatgtaacccactcgtgcacccaactgatcttcagcatcttttactttcaccagcgtttctgggtgagcaaaaacaggaaggcaaaatgccgcaaaaaagggaataagggcgacacggaaatgttgaatactcatactcttcctttttcaatattattgaagcatttatcagggttattgtctcatgagcggatacatatttgaatgtatttagaaaaataaacaaataggggttccgcgcacatttccccgaaaagtgccacctgacgtcgacggatcgggagatcgatctcccgatcccctagggtcgactctcagtacaatctgctctgatgccgcatagttaagccagtatctgctccctgcttgtgtgttggaggtcgctgagtagtgcgcgagcaaaatttaagctacaacaaggcaaggcttgaccgacaattgcatgaagaatctgcttagggttaggcgttttgcgctgcttcgcgatgtacgggcc

SEQ ID NO: 688 - DNA, 9109 bp, synthetic construct
  source 1..9109: mol_type = other DNA
agatatacgcgttgacattgattattgactagttattaatagtaatcaattacggggtcattagttcatagcccatatatggagttccgcgttacataacttacggtaaatggcccgcctggctgaccgcccaacgacccccgcccattgacgtcaataatgacgtatgttcccatagtaacgccaatagggactttccattgacgtcaatgggtggagtatttacggtaaactgcccacttggcagtacatcaagtgtatcatatgccaagtacgccccctattgacgtcaatgacggtaaatggcccgcctggcattatgcccagtacatgaccttatgggactttcctacttggcagtacatctacgtattagtcatcgctattaccatggtgatgcggttttggcagtacatcaatgggcgtggatagcggtttgactcacggggatttccaagtctccaccccattgacgtcaatgggagtttgttttggcaccaaaatcaacgggactttccaaaatgtcgtaacaactccgccccattgacgcaaatgggcggtaggcgtgtacggtgggaggtctatataagcagagctggtttagtgaaccgtcagatccgctagagatccgcggccgctaatacgactcactatagggagagccgccaccatgaaacggacagccgacggaagcgagttcgagtcaccaaagaagaagcggaaagtcaccaacctcagcgacattatcgagaaggaaaccggcaagcaactcgtgatccaggagagcatactgatgctccccgaggaggtcgaggaggtgattggcaataagcccgagtccgatatactggttcatactgcgtatgacgaaagcacagacgagaacgtcatgctacttaccagcgacgccccggagtacaagccctgggccctagtcatccaagacagcaacggtgagaacaagatcaagatgctttcaggcggaagtggtggaagtggcggtagtcgcaccgagaaggagaacaaggagctggagaacctggagatcaacctccgcaaggaaatcgccaaagcgttcaagggcaatgaagggtacaagagcctcttcaagaaagacatcatcgaaactatcctcccagagtttctcgatgacaaggacgagatcgcgctggtgaactcctttaacgggttcacaaccgcgtttaccggcttctttgataacagggaaaatatgttctccgaggaggccaagtccaccagcatcgccttcaggtgtatcaacgagaacctcacccgctacatttccaatatggacattttcgagaaggtggatgcgatcttcgataagcacgaggtgcaggagatcaaagagaagattctcaattccgattatgacgtcgaggatttcttcgaaggggagttctttaattttgtgctcacacaagagggcattgacgtgtacaacgcgattatcgggggcttcgtcacagagtccggggagaagattaaggggctgaatgagtacatcaatctgtacaatcagaagaccaagcagaaactgccgaaattcaagccgctctacaagcaagtcctgtccgatagggaaagcctctccttctacggcgagggctataccagcgacgaggaggtgctggaagtcttccgcaacacactgaataagaatagcgagattttctcctccatcaagaagctcgagaagctctttaagaactttgacgagtacagctccgccgggattttcgtgaagaacgggccggcgatcagcaccatctccaaggacatctttggcgagtggaacgtcatcagggacaagtggaacgccgagtacgacgacatccacctgaagaagaaggcggtggtgaccgagaagtatgaggacgatcgcaggaagtccttcaaaaaaatcggctccttcagcctcgaacagctccaggagtatgccgatgcggatctgtccgtcgtcgagaagctgaaggaaatcatcattcagaaggtcgacgagatctataaagtgtacgggtccagcgagaagctgttcgacgccgactttgtgctcgagaagtccctcaaaaagaatgacgccgtggtggccattatgaaagacctgctcgactccgtgaagtccttcgaaaattacattaaagcgttctttggggaggggaaggaaactaacagggatgagtccttctatggcgactttgtcctcgcgtacgacatcctgctgaaggtcgaccacatttacgacgcgatccgcaactacgtgacacagaagccgtactccaaagacaagttcaagctgtacttccagaacccgcaatttatggggggctgggacaaggataaagagacagactaccgcgcgacaattctccgctatggctccaaatactatctggccatcatggacaagaagtacgcgaagtgcctgcagaagatcgacaaagacgacgtcaatggcaactatgaaaagatcaactacaagctgctgccgggcccgaacaagatgctcccgaaggtgttcttcagcaagaagtggatggcctactacaatccaagcgaggatattcagaaaatctataaaaacgggaccttcaagaagggggacatgtttaacctcaacgactgccacaagctcattgatttcttcaaggatagcatttcccgctacccgaaatggtccaatgcgtacgattttaacttctccgagacagaaaagtacaaagacatcgcgggcttttacagggaggtggaggagcaagggtataaagtttcttttgaatccgcgagcaagaaggaagtcgacaagctcgtcgaggagggcaagctctacatgttccaaatttataacaaggacttttccgacaagagccatgggaccccaaacctccacaccatgtacttcaaactgctctttgacgagaacaaccacgggcaaatcaggctgagcggcggcgccgaattattcatgcgcagggcctccctcaagaaggaagagctggtcgtccatccagccaattccccgatcgcgaacaagaacccggacaatccgaaaaagaccaccaccctgtcctacgacgtctacaaggacaaacgcttcagcgaagaccagtacgaattacacatcccaattgcgattaataagtgcccaaagaatatcttcaaaattaatacagaggtcagggtgctgctcaaacacgacgacaatccgtatgtcatcggcattgccaggggcgagcgcaatctgctctatatcgtggtcgtggatgggaagggcaatattgtggagcagtactccctgaacgagattatcaacaacttcaatgggattaggattaagaccgactatcacagcctgctcgacaagaaagaaaaagagaggtttgaggcccgccaaaactggacctccattgagaatatcaaagaattaaaggccggctatatttcccaagtcgtccacaagatctgcgagctggtggagaaatatgacgccgtgattgcgctcgaagacttaaattctgggttcaagaactcccgcgtgaaggtggaaaaacaggtgtatcagaaattcgagaaaatgctgatcgacaaactcaattatatggtggataagaagtccaacccgtgtgccacagggggcgcgctgaagggctatcagatcaccaacaagttcgagagcttcaagagcatgagcacccagaacgggtttattttctacatcccggcgtggctcacctccaagattgacccgagcaccggcttcgtgaacctcctgaagacaaagtatacctccattgccgacagcaagaagtttatctcctccttcgaccgcattatgtatgtgccggaggaggacctcttcgagttcgccctcgactacaaaaacttcagccgcacagatgcggattacatcaagaagtggaagctgtactcctacgggaacaggatccgcatcttcaggaatccaaaaaaaaataacgtctttgactgggaggaagtgtgcctgacatccgcctacaaggaactgttcaataaatacggcatcaattaccagcagggcgacattcgcgccctcctctgtgagcagtccgacaaagcgttttactccagcttcatggccctcatgtccctgatgctccaaatgaggaatagcatcacagggcgcaccgacgtcgacttcctcatcagcccggtgaagaactccgacgggatcttttacgactcccgcaactatgaggcgcaagagaatgcgatcctcccgaagaacgccgatgcgaacggggcctataatatcgccaggaaagtgctctgggccatcgggcagttcaaaaaggcggaggatgagaagctcgacaaggtgaaaattgccatttccaacaaggagtggctggagtacgcgcagacctccgtgaagcacggctcctctggcagctccggctctagcggctcctctggcagctccggctccaagctggagaagtttacaaactgttacagcctctccaaaaccctcaggtttaaagcgatcccggtgggcaagacccaggagaacatcgacaacaagaggctcctggtggaagacgagaagcgcgccgaagactacaagggcgtgaagaagctgctcgataggtactacctcagctttattaacgacgtgctgcacagcatcaaactcaagaatctcaacaactacatctccctcttccgcaaaaagacctctggtggttcttctggtggttcttctggtggttctgaggcctcccccgcatcaggacctagacacctgatggatccccatattttcacatctaacttcaacaacggaatcggcagacacaagacctacctgtgctatgaggtggaaaggctggataacggaacctctgtgaagatggaccagcacaggtaagtatcaaggttacaagacaggtttaaggagaccaatagaaactgggcttgtcgagacagagaagactcttgcgtttctgataggcacctattggtcttactgacatccactttgcctttctctccacaggggcttcctgcataaccaggccaagaatctgctgtgcggtttctacgggagacatgcagaactgaggtttctggatctggtgccatccctgcagctggaccccgctcagatctacagagtgacttggttcatctcttggagcccttgcttttcatggggatgtgctggcgaggtgagggccttccttcaggaaaacacacacgtgagactgaggatttttgctgccagaatctacgattatgacccactgtacaaggaagctctgcagatgctgagggatgcaggcgctcaggtgagcattatgacctatgacgaattcaagcactgctgggatacttttgtggaccatcagggttgtccttttcagccatgggatgggctggacgagcattctcaggcactgagcggtagactgagggctatcctgcagaaccaggggaattctggcggctcaaaaagaaccgccgacggcagcgaattcgagcccaagaagaagaggaaagtcggaagcggagctactaacttcagcctgctgaagcaggctggagacgtggaggagaaccctggacctatggtgagcaagggcgaggagctgttcaccggggtggtgcccatcctggtcgagctggacggcgacgtaaacggccacaagttcagcgtgtccggcgagggcgagggcgatgccacctacggcaagctgaccctgaagttcatctgcaccaccggcaagctgcccgtgccctggcccaccctcgtgaccaccctgacctatggagtgcagtgcttcagccgctaccccgaccacatgaagcagcacgacttcttcaagtccgccatgcccgaaggctacgtccaggagcgcaccatcttcttcaaggacgacggcaactacaagacccgcgccgaggtgaagttcgagggcgacaccctggtgaaccgcatcgagctgaagggcatcgacttcaaggaggacggcaacatcctggggcacaagctggagtacaactacaacagccacaacgtctatatcatggccgacaagcagaagaacggcatcaaggtgaacttcaagatccgccacaacatcgaggacggcagcgtgcagctcgccgaccactaccagcagaacacccccatcggcgacggccccgtgctgctgcccgacaaccactacctgagcacccagtccgccctgagcaaagaccccaacgagaagcgcgatcacatggtcctgctggagttcgtgaccgccgccgggatcactctcggcatggacgagctgtacaagtctggtggttctcccaagaagaagaggaaagtctaaccggtcatcatcaccatcaccattgagtttaaacccgctgatcagcctcgactgtgccttctagttgccagccatctgttgtttgcccctcccccgtgccttccttgaccctggaaggtgccactcccactgtcctttcctaataaaatgaggaaattgcatcgcattgtctgagtaggtgtcattctattctggggggtggggtggggcaggacagcaagggggaggattgggaagacaatagcaggcatgctggggatgcggtgggctctatggcttctgaggcgaaaagaaccagctggggctcgataccgtcgacctctagctagagcttggcgtaatcatggtcatagctgtttcctgtgtgaaattgttatccgctcacaattccacacaacatacgagccggaagcataaagtgtaaagcctagggtgcctaatgagtgagctaactcacattaattgcgttgcgctcactgcccgctttccagtcgggaaacctgtcgtgccagctgcattaatgaatcggccaacgcgcgggaagaggcggtttgcgtattgggcgctcttccgcttcctcgctcactgactcgctgcgctcggtcgttcggctgcggcgagcggtatcagctcactcaaaggcggtaatacggttatccacagaatcaggggataacgcaggaaagaacatgtgagcaaaaggccagcaaaaggccaggaaccgtaaaaaggccgcgttgctggcgtttttccataggctccgcccccctgacgagcatcacaaaaatcgacgctcaagtcagaggtggcgaaacccgacaggactataaagataccaggcgtttccccctggaagctccctcgtgcgctctcctgttccgaccctgccgcttaccggatacctgtccgcctttctcccttcgggaagcgtggcgctttctcatagctcacgctgtaggtatctcagttcggtgtaggtcgttcgctccaagctgggctgtgtgcacgaaccccccgttcagcccgaccgctgcgccttatccggtaactatcgtcttgagtccaacccggtaagacacgacttatcgccactggcagcagccactggtaacaggattagcagagcgaggtatgtaggcggtgctacagagttcttgaagtggtggcctaactacggctacactagaagaacagtatttggtatctgcgctctgctgaagccagttaccttcggaaaaagagttggtagctcttgatccggcaaacaaaccaccgctggtagcggtggtttttttgtttgcaagcagcagattacgcgcagaaaaaaaggatctcaagaagatcctttgatcttttctacggggtctgacactcagtggaacgaaaactcacgttaagggattttggtcatgagattatcaaaaaggatcttcacctagatccttttaaattaaaaatgaagttttaaatcaatctaaagtatatatgagtaaacttggtctgacagttaccaatgcttaatcagtgaggcacctatctcagcgatctgtctatttcgttcatccatagttgcctgactccccgtcgtgtagataactacgatacgggagggcttaccatctggccccagtgctgcaatgataccgcgagacccacgctcaccggctccagatttatcagcaataaaccagccagccggaagggccgagcgcagaagtggtcctgcaactttatccgcctccatccagtctattaattgttgccgggaagctagagtaagtagttcgccagttaatagtttgcgcaacgttgttgccattgctacaggcatcgtggtgtcacgctcgtcgtttggtatggcttcattcagctccggttcccaacgatcaaggcgagttacatgatcccccatgttgtgcaaaaaagcggttagctccttcggtcctccgatcgttgtcagaagtaagttggccgcagtgttatcactcatggttatggcagcactgcataattctcttactgtcatgccatccgtaagatgcttttctgtgactggtgagtactcaaccaagtcattctgagaatagtgtatgcggcgaccgagttgctcttgcccggcgtcaatacgggataataccgcgccacatagcagaactttaaaagtgctcatcattggaaaacgttcttcggggcgaaaactctcaaggatcttaccgctgttgagatccagttcgatgtaacccactcgtgcacccaactgatcttcagcatcttttactttcaccagcgtttctgggtgagcaaaaacaggaaggcaaaatgccgcaaaaaagggaataagggcgacacggaaatgttgaatactcatactcttcctttttcaatattattgaagcatttatcagggttattgtctcatgagcggatacatatttgaatgtatttagaaaaataaacaaataggggttccgcgcacatttccccgaaaagtgccacctgacgtcgacggatcgggagatcgatctcccgatcccctagggtcgactctcagtacaatctgctctgatgccgcatagttaagccagtatctgctccctgcttgtgtgttggaggtcgctgagtagtgcgcgagcaaaatttaagctacaacaaggcaaggcttgaccgacaattgcatgaagaatctgcttagggttaggcgttttgcgctgcttcgcgatgtacgggcc

SEQ ID NO: 689 - DNA, 9097 bp, synthetic construct
  source 1..9097: mol_type = other DNA
agatatacgcgttgacattgattattgactagttattaatagtaatcaattacggggtcattagttcatagcccatatatggagttccgcgttacataacttacggtaaatggcccgcctggctgaccgcccaacgacccccgcccattgacgtcaataatgacgtatgttcccatagtaacgccaatagggactttccattgacgtcaatgggtggagtatttacggtaaactgcccacttggcagtacatcaagtgtatcatatgccaagtacgccccctattgacgtcaatgacggtaaatggcccgcctggcattatgcccagtacatgaccttatgggactttcctacttggcagtacatctacgtattagtcatcgctattaccatggtgatgcggttttggcagtacatcaatgggcgtggatagcggtttgactcacggggatttccaagtctccaccccattgacgtcaatgggagtttgttttggcaccaaaatcaacgggactttccaaaatgtcgtaacaactccgccccattgacgcaaatgggcggtaggcgtgtacggtgggaggtctatataagcagagctggtttagtgaaccgtcagatccgctagagatccgcggccgctaatacgactcactatagggagagccgccaccatgaaacggacagccgacggaagcgagttcgagtcaccaaagaagaagcggaaagtcaccaacctcagcgacattatcgagaaggaaaccggcaagcaactcgtgatccaggagagcatactgatgctccccgaggaggtcgaggaggtgattggcaataagcccgagtccgatatactggttcatactgcgtatgacgaaagcacagacgagaacgtcatgctacttaccagcgacgccccggagtacaagccctgggccctagtcatccaagacagcaacggtgagaacaagatcaagatgctttcaggcggaagtggtggaagtggcggtagtcgcaccgagaaggagaacaaggagctggagaacctggagatcaacctccgcaaggaaatcgccaaagcgttcaagggcaatgaagggtacaagagcctcttcaagaaagacatcatcgaaactatcctcccagagtttctcgatgacaaggacgagatcgcgctggtgaactcctttaacgggttcacaaccgcgtttaccggcttctttgataacagggaaaatatgttctccgaggaggccaagtccaccagcatcgccttcaggtgtatcaacgagaacctcacccgctacatttccaatatggacattttcgagaaggtggatgcgatcttcgataagcacgaggtgcaggagatcaaagagaagattctcaattccgattatgacgtcgaggatttcttcgaaggggagttctttaattttgtgctcacacaagagggcattgacgtgtacaacgcgattatcgggggcttcgtcacagagtccggggagaagattaaggggctgaatgagtacatcaatctgtacaatcagaagaccaagcagaaactgccgaaattcaagccgctctacaagcaagtcctgtccgatagggaaagcctctccttctacggcgagggctataccagcgacgaggaggtgctggaagtcttccgcaacacactgaataagaatagcgagattttctcctccatcaagaagctcgagaagctctttaagaactttgacgagtacagctccgccgggattttcgtgaagaacgggccggcgatcagcaccatctccaaggacatctttggcgagtggaacgtcatcagggacaagtggaacgccgagtacgacgacatccacctgaagaagaaggcggtggtgaccgagaagtatgaggacgatcgcaggaagtccttcaaaaaaatcggctccttcagcctcgaacagctccaggagtatgccgatgcggatctgtccgtcgtcgagaagctgaaggaaatcatcattcagaaggtcgacgagatctataaagtgtacgggtccagcgagaagctgttcgacgccgactttgtgctcgagaagtccctcaaaaagaatgacgccgtggtggccattatgaaagacctgctcgactccgtgaagtccttcgaaaattacattaaagcgttctttggggaggggaaggaaactaacagggatgagtccttctatggcgactttgtcctcgcgtacgacatcctgctgaaggtcgaccacatttacgacgcgatccgcaactacgtgacacagaagccgtactccaaagacaagttcaagctgtacttccagaacccgcaatttatggggggctgggacaaggataaagagacagactaccgcgcgacaattctccgctatggctccaaatactatctggccatcatggacaagaagtacgcgaagtgcctgcagaagatcgacaaagacgacgtcaatggcaactatgaaaagatcaactacaagctgctgccgggcccgaacaagatgctcccgaaggtgttcttcagcaagaagtggatggcctactacaatccaagcgaggatattcagaaaatctataaaaacgggaccttcaagaagggggacatgtttaacctcaacgactgccacaagctcattgatttcttcaaggatagcatttcccgctacccgaaatggtccaatgcgtacgattttaacttctccgagacagaaaagtacaaagacatcgcgggcttttacagggaggtggaggagcaagggtataaagtttcttttgaatccgcgagcaagaaggaagtcgacaagctcgtcgaggagggcaagctctacatgttccaaatttataacaaggacttttccgacaagagccatgggaccccaaacctccacaccatgtacttcaaactgctctttgacgagaacaaccacgggcaaatcaggctgagcggcggcgccgaattattcatgcgcagggcctccctcaagaaggaagagctggtcgtccatccagccaattccccgatcgcgaacaagaacccggacaatccgaaaaagaccaccaccctgtcctacgacgtctacaaggacaaacgcttcagcgaagaccagtacgaattacacatcccaattgcgattaataagtgcccaaagaatatcttcaaaattaatacagaggtcagggtgctgctcaaacacgacgacaatccgtatgtcatcggcattgccaggggcgagcgcaatctgctctatatcgtggtcgtggatgggaagggcaatattgtggagcagtactccctgaacgagattatcaacaacttcaatgggattaggattaagaccgactatcacagcctgctcgacaagaaagaaaaagagaggtttgaggcccgccaaaactggacctccattgagaatatcaaagaattaaaggccggctatatttcccaagtcgtccacaagatctgcgagctggtggagaaatatgacgccgtgattgcgctcgaagacttaaattctgggttcaagaactcccgcgtgaaggtggaaaaacaggtgtatcagaaattcgagaaaatgctgatcgacaaactcaattatatggtggataagaagtccaacccgtgtgccacagggggcgcgctgaagggctatcagatcaccaacaagttcgagagcttcaagagcatgagcacccagaacgggtttattttctacatcccggcgtggctcacctccaagattgacccgagcaccggcttcgtgaacctcctgaagacaaagtatacctccattgccgacagcaagaagtttatctcctccttcgaccgcattatgtatgtgccggaggaggacctcttcgagttcgccctcgactacaaaaacttcagccgcacagatgcggattacatcaagaagtggaagctgtactcctacgggaacaggatccgcatcttcaggaatccaaaaaaaaataacgtctttgactgggaggaagtgtgcctgacatccgcctacaaggaactgttcaataaatacggcatcaattaccagcagggcgacattcgcgccctcctctgtgagcagtccgacaaagcgttttactccagcttcatggccctcatgtccctgatgctccaaatgaggaatagcatcacagggcgcaccgacgtcgacttcctcatcagcccggtgaagaactccgacgggatcttttacgactcccgcaactatgaggcgcaagagaatgcgatcctcccgaagaacgccgatgcgaacggggcctataatatcgccaggaaagtgctctgggccatcgggcagttcaaaaaggcggaggatgagaagctcgacaaggtgaaaattgccatttccaacaaggagtggctggagtacgcgcagacctccgtgaagcacggctcctctggcagctccggctctagcggctcctctggcagctccggctccaagctggagaagtttacaaactgttacagcctctccaaaaccctcaggtttaaagcgatcccggtgggcaagacccaggagaacatcgacaacaagaggctcctggtggaagacgagaagcgcgccgaagactacaagggcgtgaagaagctgctcgataggtactacctcagctttattaacgacgtgctgcacagcatcaaactcaagaatctcaacaactacatctccctcttccgcaaaaagacctctggtggttcttctggtggttctgaggcctcccccgcatcaggacctagacacctgatggatccccatattttcacatctaacttcaacaacggaatcggcagacacaagacctacctgtgctatgaggtggaaaggctggataacggaacctctgtgaagatggaccagcacaggtaagtatcaaggttacaagacaggtttaaggagaccaatagaaactgggcttgtcgagacagagaagactcttgcgtttctgataggcacctattggtcttactgacatccactttgcctttctctccacaggggcttcctgcataaccaggccaagaatctgctgtgcggtttctacgggagacatgcagaactgaggtttctggatctggtgccatccctgcagctggaccccgctcagatctacagagtgacttggttcatctcttggagcccttgcttttcatggggatgtgctggcgaggtgagggccttccttcaggaaaacacacacgtgagactgaggatttttgctgccagaatctacgattatgacccactgtacaaggaagctctgcagatgctgagggatgcaggcgctcaggtgagcattatgacctatgacgaattcaagcactgctgggatacttttgtggaccatcagggttgtccttttcagccatgggatgggctggacgagcattctcaggcactgagcggtagactgagggctatcctgcagaaccaggggaattctggcggctcaaaaagaaccgccgacggcagcgaattcgagcccaagaagaagaggaaagtcggaagcggagctactaacttcagcctgctgaagcaggctggagacgtggaggagaaccctggacctatggtgagcaagggcgaggagctgttcaccggggtggtgcccatcctggtcgagctggacggcgacgtaaacggccacaagttcagcgtgtccggcgagggcgagggcgatgccacctacggcaagctgaccctgaagttcatctgcaccaccggcaagctgcccgtgccctggcccaccctcgtgaccaccctgacctatggagtgcagtgcttcagccgctaccccgaccacatgaagcagcacgacttcttcaagtccgccatgcccgaaggctacgtccaggagcgcaccatcttcttcaaggacgacggcaactacaagacccgcgccgaggtgaagttcgagggcgacaccctggtgaaccgcatcgagctgaagggcatcgacttcaaggaggacggcaacatcctggggcacaagctggagtacaactacaacagccacaacgtctatatcatggccgacaagcagaagaacggcatcaaggtgaacttcaagatccgccacaacatcgaggacggcagcgtgcagctcgccgaccactaccagcagaacacccccatcggcgacggccccgtgctgctgcccgacaaccactacctgagcacccagtccgccctgagcaaagaccccaacgagaagcgcgatcacatggtcctgctggagttcgtgaccgccgccgggatcactctcggcatggacgagctgtacaagtctggtggttctcccaagaagaagaggaaagtctaaccggtcatcatcaccatcaccattgagtttaaacccgctgatcagcctcgactgtgccttctagttgccagccatctgttgtttgcccctcccccgtgccttccttgaccctggaaggtgccactcccactgtcctttcctaataaaatgaggaaattgcatcgcattgtctgagtaggtgtcattctattctggggggtggggtggggcaggacagcaagggggaggattgggaagacaatagcaggcatgctggggatgcggtgggctctatggcttctgaggcgaaaagaaccagctggggctcgataccgtcgacctctagctagagcttggcgtaatcatggtcatagctgtttcctgtgtgaaattgttatccgctcacaattccacacaacatacgagccggaagcataaagtgtaaagcctagggtgcctaatgagtgagctaactcacattaattgcgttgcgctcactgcccgctttccagtcgggaaacctgtcgtgccagctgcattaatgaatcggccaacgcgcgggaagaggcggtttgcgtattgggcgctcttccgcttcctcgctcactgactcgctgcgctcggtcgttcggctgcggcgagcggtatcagctcactcaaaggcggtaatacggttatccacagaatcaggggataacgcaggaaagaacatgtgagcaaaaggccagcaaaaggccaggaaccgtaaaaaggccgcgttgctggcgtttttccataggctccgcccccctgacgagcatcacaaaaatcgacgctcaagtcagaggtggcgaaacccgacaggactataaagataccaggcgtttccccctggaagctccctcgtgcgctctcctgttccgaccctgccgcttaccggatacctgtccgcctttctcccttcgggaagcgtggcgctttctcatagctcacgctgtaggtatctcagttcggtgtaggtcgttcgctccaagctgggctgtgtgcacgaaccccccgttcagcccgaccgctgcgccttatccggtaactatcgtcttgagtccaacccggtaagacacgacttatcgccactggcagcagccactggtaacaggattagcagagcgaggtatgtaggcggtgctacagagttcttgaagtggtggcctaactacggctacactagaagaacagtatttggtatctgcgctctgctgaagccagttaccttcggaaaaagagttggtagctcttgatccggcaaacaaaccaccgctggtagcggtggtttttttgtttgcaagcagcagattacgcgcagaaaaaaaggatctcaagaagatcctttgatcttttctacggggtctgacactcagtggaacgaaaactcacgttaagggattttggtcatgagattatcaaaaaggatcttcacctagatccttttaaattaaaaatgaagttttaaatcaatctaaagtatatatgagtaaacttggtctgacagttaccaatgcttaatcagtgaggcacctatctcagcgatctgtctatttcgttcatccatagttgcctgactccccgtcgtgtagataactacgatacgggagggcttaccatctggccccagtgctgcaatgataccgcgagacccacgctcaccggctccagatttatcagcaataaaccagccagccggaagggccgagcgcagaagtggtcctgcaactttatccgcctccatccagtctattaattgttgccgggaagctagagtaagtagttcgccagttaatagtttgcgcaacgttgttgccattgctacaggcatcgtggtgtcacgctcgtcgtttggtatggcttcattcagctccggttcccaacgatcaaggcgagttacatgatcccccatgttgtgcaaaaaagcggttagctccttcggtcctccgatcgttgtcagaagtaagttggccgcagtgttatcactcatggttatggcagcactgcataattctcttactgtcatgccatccgtaagatgcttttctgtgactggtgagtactcaaccaagtcattctgagaatagtgtatgcggcgaccgagttgctcttgcccggcgtcaatacgggataataccgcgccacatagcagaactttaaaagtgctcatcattggaaaacgttcttcggggcgaaaactctcaaggatcttaccgctgttgagatccagttcgatgtaacccactcgtgcacccaactgatcttcagcatcttttactttcaccagcgtttctgggtgagcaaaaacaggaaggcaaaatgccgcaaaaaagggaataagggcgacacggaaatgttgaatactcatactcttcctttttcaatattattgaagcatttatcagggttattgtctcatgagcggatacatatttgaatgtatttagaaaaataaacaaataggggttccgcgcacatttccccgaaaagtgccacctgacgtcgacggatcgggagatcgatctcccgatcccctagggtcgactctcagtacaatctgctctgatgccgcatagttaagccagtatctgctccctgcttgtgtgttggaggtcgctgagtagtgcgcgagcaaaatttaagctacaacaaggcaaggcttgaccgacaattgcatgaagaatctgcttagggttaggcgttttgcgctgcttcgcgatgtacgggcc

SEQ ID NO: 690 - DNA, 9091 bp, synthetic construct
  source 1..9091: mol_type = other DNA
agatatacgcgttgacattgattattgactagttattaatagtaatcaattacggggtcattagttcatagcccatatatggagttccgcgttacataacttacggtaaatggcccgcctggctgaccgcccaacgacccccgcccattgacgtcaataatgacgtatgttcccatagtaacgccaatagggactttccattgacgtcaatgggtggagtatttacggtaaactgcccacttggcagtacatcaagtgtatcatatgccaagtacgccccctattgacgtcaatgacggtaaatggcccgcctggcattatgcccagtacatgaccttatgggactttcctacttggcagtacatctacgtattagtcatcgctattaccatggtgatgcggttttggcagtacatcaatgggcgtggatagcggtttgactcacggggatttccaagtctccaccccattgacgtcaatgggagtttgttttggcaccaaaatcaacgggactttccaaaatgtcgtaacaactccgccccattgacgcaaatgggcggtaggcgtgtacggtgggaggtctatataagcagagctggtttagtgaaccgtcagatccgctagagatccgcggccgctaatacgactcactatagggagagccgccaccatgaaacggacagccgacggaagcgagttcgagtcaccaaagaagaagcggaaagtcaccaacctcagcgacattatcgagaaggaaaccggcaagcaactcgtgatccaggagagcatactgatgctccccgaggaggtcgaggaggtgattggcaataagcccgagtccgatatactggttcatactgcgtatgacgaaagcacagacgagaacgtcatgctacttaccagcgacgccccggagtacaagccctgggccctagtcatccaagacagcaacggtgagaacaagatcaagatgctttcaggcggaagtggtggaagtggcggtagtcgcaccgagaaggagaacaaggagctggagaacctggagatcaacctccgcaaggaaatcgccaaagcgttcaagggcaatgaagggtacaagagcctcttcaagaaagacatcatcgaaactatcctcccagagtttctcgatgacaaggacgagatcgcgctggtgaactcctttaacgggttcacaaccgcgtttaccggcttctttgataacagggaaaatatgttctccgaggaggccaagtccaccagcatcgccttcaggtgtatcaacgagaacctcacccgctacatttccaatatggacattttcgagaaggtggatgcgatcttcgataagcacgaggtgcaggagatcaaagagaagattctcaattccgattatgacgtcgaggatttcttcgaaggggagttctttaattttgtgctcacacaagagggcattgacgtgtacaacgcgattatcgggggcttcgtcacagagtccggggagaagattaaggggctgaatgagtacatcaatctgtacaatcagaagaccaagcagaaactgccgaaattcaagccgctctacaagcaagtcctgtccgatagggaaagcctctccttctacggcgagggctataccagcgacgaggaggtgctggaagtcttccgcaacacactgaataagaatagcgagattttctcctccatcaagaagctcgagaagctctttaagaactttgacgagtacagctccgccgggattttcgtgaagaacgggccggcgatcagcaccatctccaaggacatctttggcgagtggaacgtcatcagggacaagtggaacgccgagtacgacgacatccacctgaagaagaaggcggtggtgaccgagaagtatgaggacgatcgcaggaagtccttcaaaaaaatcggctccttcagcctcgaacagctccaggagtatgccgatgcggatctgtccgtcgtcgagaagctgaaggaaatcatcattcagaaggtcgacgagatctataaagtgtacgggtccagcgagaagctgttcgacgccgactttgtgctcgagaagtccctcaaaaagaatgacgccgtggtggccattatgaaagacctgctcgactccgtgaagtccttcgaaaattacattaaagcgttctttggggaggggaaggaaactaacagggatgagtccttctatggcgactttgtcctcgcgtacgacatcctgctgaaggtcgaccacatttacgacgcgatccgcaactacgtgacacagaagccgtactccaaagacaagttcaagctgtacttccagaacccgcaatttatggggggctgggacaaggataaagagacagactaccgcgcgacaattctccgctatggctccaaatactatctggccatcatggacaagaagtacgcgaagtgcctgcagaagatcgacaaagacgacgtcaatggcaactatgaaaagatcaactacaagctgctgccgggcccgaacaagatgctcccgaaggtgttcttcagcaagaagtggatggcctactacaatccaagcgaggatattcagaaaatctataaaaacgggaccttcaagaagggggacatgtttaacctcaacgactgccacaagctcattgatttcttcaaggatagcatttcccgctacccgaaatggtccaatgcgtacgattttaacttctccgagacagaaaagtacaaagacatcgcgggcttttacagggaggtggaggagcaagggtataaagtttcttttgaatccgcgagcaagaaggaagtcgacaagctcgtcgaggagggcaagctctacatgttccaaatttataacaaggacttttccgacaagagccatgggaccccaaacctccacaccatgtacttcaaactgctctttgacgagaacaaccacgggcaaatcaggctgagcggcggcgccgaattattcatgcgcagggcctccctcaagaaggaagagctggtcgtccatccagccaattccccgatcgcgaacaagaacccggacaatccgaaaaagaccaccaccctgtcctacgacgtctacaaggacaaacgcttcagcgaagaccagtacgaattacacatcccaattgcgattaataagtgcccaaagaatatcttcaaaattaatacagaggtcagggtgctgctcaaacacgacgacaatccgtatgtcatcggcattgccaggggcgagcgcaatctgctctatatcgtggtcgtggatgggaagggcaatattgtggagcagtactccctgaacgagattatcaacaacttcaatgggattaggattaagaccgactatcacagcctgctcgacaagaaagaaaaagagaggtttgaggcccgccaaaactggacctccattgagaatatcaaagaattaaaggccggctatatttcccaagtcgtccacaagatctgcgagctggtggagaaatatgacgccgtgattgcgctcgaagacttaaattctgggttcaagaactcccgcgtgaaggtggaaaaacaggtgtatcagaaattcgagaaaatgctgatcgacaaactcaattatatggtggataagaagtccaacccgtgtgccacagggggcgcgctgaagggctatcagatcaccaacaagttcgagagcttcaagagcatgagcacccagaacgggtttattttctacatcccggcgtggctcacctccaagattgacccgagcaccggcttcgtgaacctcctgaagacaaagtatacctccattgccgacagcaagaagtttatctcctccttcgaccgcattatgtatgtgccggaggaggacctcttcgagttcgccctcgactacaaaaacttcagccgcacagatgcggattacatcaagaagtggaagctgtactcctacgggaacaggatccgcatcttcaggaatccaaaaaaaaataacgtctttgactgggaggaagtgtgcctgacatccgcctacaaggaactgttcaataaatacggcatcaattaccagcagggcgacattcgcgccctcctctgtgagcagtccgacaaagcgttttactccagcttcatggccctcatgtccctgatgctccaaatgaggaatagcatcacagggcgcaccgacgtcgacttcctcatcagcccggtgaagaactccgacgggatcttttacgactcccgcaactatgaggcgcaagagaatgcgatcctcccgaagaacgccgatgcgaacggggcctataatatcgccaggaaagtgctctgggccatcgggcagttcaaaaaggcggaggatgagaagctcgacaaggtgaaaattgccatttccaacaaggagtggctggagtacgcgcagacctccgtgaagcacggctcctctggcagctccggctctagcggctcctctggcagctccggctccaagctggagaagtttacaaactgttacagcctctccaaaaccctcaggtttaaagcgatcccggtgggcaagacccaggagaacatcgacaacaagaggctcctggtggaagacgagaagcgcgccgaagactacaagggcgtgaagaagctgctcgataggtactacctcagctttattaacgacgtgctgcacagcatcaaactcaagaatctcaacaactacatctccctcttccgcaaaaagacctctggttcttctggttctgaggcctcccccgcatcaggacctagacacctgatggatccccatattttcacatctaacttcaacaacggaatcggcagacacaagacctacctgtgctatgaggtggaaaggctggataacggaacctctgtgaagatggaccagcacaggtaagtatcaaggttacaagacaggtttaaggagaccaatagaaactgggcttgtcgagacagagaagactcttgcgtttctgataggcacctattggtcttactgacatccactttgcctttctctccacaggggcttcctgcataaccaggccaagaatctgctgtgcggtttctacgggagacatgcagaactgaggtttctggatctggtgccatccctgcagctggaccccgctcagatctacagagtgacttggttcatctcttggagcccttgcttttcatggggatgtgctggcgaggtgagggccttccttcaggaaaacacacacgtgagactgaggatttttgctgccagaatctacgattatgacccactgtacaaggaagctctgcagatgctgagggatgcaggcgctcaggtgagcattatgacctatgacgaattcaagcactgctgggatacttttgtggaccatcagggttgtccttttcagccatgggatgggctggacgagcattctcaggcactgagcggtagactgagggctatcctgcagaaccaggggaattctggcggctcaaaaagaaccgccgacggcagcgaattcgagcccaagaagaagaggaaagtcggaagcggagctactaacttcagcctgctgaagcaggctggagacgtggaggagaaccctggacctatggtgagcaagggcgaggagctgttcaccggggtggtgcccatcctggtcgagctggacggcgacgtaaacggccacaagttcagcgtgtccggcgagggcgagggcgatgccacctacggcaagctgaccctgaagttcatctgcaccaccggcaagctgcccgtgccctggcccaccctcgtgaccaccctgacctatggagtgcagtgcttcagccgctaccccgaccacatgaagcagcacgacttcttcaagtccgccatgcccgaaggctacgtccaggagcgcaccatcttcttcaaggacgacggcaactacaagacccgcgccgaggtgaagttcgagggcgacaccctggtgaaccgcatcgagctgaagggcatcgacttcaaggaggacggcaacatcctggggcacaagctggagtacaactacaacagccacaacgtctatatcatggccgacaagcagaagaacggcatcaaggtgaacttcaagatccgccacaacatcgaggacggcagcgtgcagctcgccgaccactaccagcagaacacccccatcggcgacggccccgtgctgctgcccgacaaccactacctgagcacccagtccgccctgagcaaagaccccaacgagaagcgcgatcacatggtcctgctggagttcgtgaccgccgccgggatcactctcggcatggacgagctgtacaagtctggtggttctcccaagaagaagaggaaagtctaaccggtcatcatcaccatcaccattgagtttaaacccgctgatcagcctcgactgtgccttctagttgccagccatctgttgtttgcccctcccccgtgccttccttgaccctggaaggtgccactcccactgtcctttcctaataaaatgaggaaattgcatcgcattgtctgagtaggtgtcattctattctggggggtggggtggggcaggacagcaagggggaggattgggaagacaatagcaggcatgctggggatgcggtgggctctatggcttctgaggcgaaaagaaccagctggggctcgataccgtcgacctctagctagagcttggcgtaatcatggtcatagctgtttcctgtgtgaaattgttatccgctcacaattccacacaacatacgagccggaagcataaagtgtaaagcctagggtgcctaatgagtgagctaactcacattaattgcgttgcgctcactgcccgctttccagtcgggaaacctgtcgtgccagctgcattaatgaatcggccaacgcgcgggaagaggcggtttgcgtattgggcgctcttccgcttcctcgctcactgactcgctgcgctcggtcgttcggctgcggcgagcggtatcagctcactcaaaggcggtaatacggttatccacagaatcaggggataacgcaggaaagaacatgtgagcaaaaggccagcaaaaggccaggaaccgtaaaaaggccgcgttgctggcgtttttccataggctccgcccccctgacgagcatcacaaaaatcgacgctcaagtcagaggtggcgaaacccgacaggactataaagataccaggcgtttccccctggaagctccctcgtgcgctctcctgttccgaccctgccgcttaccggatacctgtccgcctttctcccttcgggaagcgtggcgctttctcatagctcacgctgtaggtatctcagttcggtgtaggtcgttcgctccaagctgggctgtgtgcacgaaccccccgttcagcccgaccgctgcgccttatccggtaactatcgtcttgagtccaacccggtaagacacgacttatcgccactggcagcagccactggtaacaggattagcagagcgaggtatgtaggcggtgctacagagttcttgaagtggtggcctaactacggctacactagaagaacagtatttggtatctgcgctctgctgaagccagttaccttcggaaaaagagttggtagctcttgatccggcaaacaaaccaccgctggtagcggtggtttttttgtttgcaagcagcagattacgcgcagaaaaaaaggatctcaagaagatcctttgatcttttctacggggtctgacactcagtggaacgaaaactcacgttaagggattttggtcatgagattatcaaaaaggatcttcacctagatccttttaaattaaaaatgaagttttaaatcaatctaaagtatatatgagtaaacttggtctgacagttaccaatgcttaatcagtgaggcacctatctcagcgatctgtctatttcgttcatccatagttgcctgactccccgtcgtgtagataactacgatacgggagggcttaccatctggccccagtgctgcaatgataccgcgagacccacgctcaccggctccagatttatcagcaataaaccagccagccggaagggccgagcgcagaagtggtcctgcaactttatccgcctccatccagtctattaattgttgccgggaagctagagtaagtagttcgccagttaatagtttgcgcaacgttgttgccattgctacaggcatcgtggtgtcacgctcgtcgtttggtatggcttcattcagctccggttcccaacgatcaaggcgagttacatgatcccccatgttgtgcaaaaaagcggttagctccttcggtcctccgatcgttgtcagaagtaagttggccgcagtgttatcactcatggttatggcagcactgcataattctcttactgtcatgccatccgtaagatgcttttctgtgactggtgagtactcaaccaagtcattctgagaatagtgtatgcggcgaccgagttgctcttgcccggcgtcaatacgggataataccgcgccacatagcagaactttaaaagtgctcatcattggaaaacgttcttcggggcgaaaactctcaaggatcttaccgctgttgagatccagttcgatgtaacccactcgtgcacccaactgatcttcagcatcttttactttcaccagcgtttctgggtgagcaaaaacaggaaggcaaaatgccgcaaaaaagggaataagggcgacacggaaatgttgaatactcatactcttcctttttcaatattattgaagcatttatcagggttattgtctcatgagcggatacatatttgaatgtatttagaaaaataaacaaataggggttccgcgcacatttccccgaaaagtgccacctgacgtcgacggatcgggagatcgatctcccgatcccctagggtcgactctcagtacaatctgctctgatgccgcatagttaagccagtatctgctccctgcttgtgtgttggaggtcgctgagtagtgcgcgagcaaaatttaagctacaacaaggcaaggcttgaccgacaattgcatgaagaatctgcttagggttaggcgttttgcgctgcttcgcgatgtacgggcc

SEQ ID NO: 691 - DNA, 9121 bp, synthetic construct
  source 1..9121: mol_type = other DNA
agatatacgcgttgacattgattattgactagttattaatagtaatcaattacggggtcattagttcatagcccatatatggagttccgcgttacataacttacggtaaatggcccgcctggctgaccgcccaacgacccccgcccattgacgtcaataatgacgtatgttcccatagtaacgccaatagggactttccattgacgtcaatgggtggagtatttacggtaaactgcccacttggcagtacatcaagtgtatcatatgccaagtacgccccctattgacgtcaatgacggtaaatggcccgcctggcattatgcccagtacatgaccttatgggactttcctacttggcagtacatctacgtattagtcatcgctattaccatggtgatgcggttttggcagtacatcaatgggcgtggatagcggtttgactcacggggatttccaagtctccaccccattgacgtcaatgggagtttgttttggcaccaaaatcaacgggactttccaaaatgtcgtaacaactccgccccattgacgcaaatgggcggtaggcgtgtacggtgggaggtctatataagcagagctggtttagtgaaccgtcagatccgctagagatccgcggccgctaatacgactcactatagggagagccgccaccatgaaacggacagccgacggaagcgagttcgagtcaccaaagaagaagcggaaagtcgaggcctcccccgcatcaggacctagacacctgatggatccccatattttcacatctaacttcaacaacggaatcggcagacacaagacctacctgtgctatgaggtggaaaggctggataacggaacctctgtgaagatggaccagcacaggtaagtatcaaggttacaagacaggtttaaggagaccaatagaaactgggcttgtcgagacagagaagactcttgcgtttctgataggcacctattggtcttactgacatccactttgcctttctctccacaggggcttcctgcataaccaggccaagaatctgctgtgcggtttctacgggagacatgcagaactgaggtttctggatctggtgccatccctgcagctggaccccgctcagatctacagagtgacttggttcatctcttggagcccttgcttttcatggggatgtgctggcgaggtgagggccttccttcaggaaaacacacacgtgagactgaggatttttgctgccagaatctacgattatgacccactgtacaaggaagctctgcagatgctgagggatgcaggcgctcaggtgagcattatgacctatgacgaattcaagcactgctgggatacttttgtggaccatcagggttgtccttttcagccatgggatgggctggacgagcattctcaggcactgagcggtagactgagggctatcctgcagaaccaggggaatagcggcagcgagactcccgggacctcagagtccgccacacccgaaagtaaagacaagttcaagctgtacttccagaacccgcaatttatggggggctgggacaaggataaagagacagactaccgcgcgacaattctccgctatggctccaaatactatctggccatcatggacaagaagtacgcgaagtgcctgcagaagatcgacaaagacgacgtcaatggcaactatgaaaagatcaactacaagctgctgccgggcccgaacaagatgctcccgaaggtgttcttcagcaagaagtggatggcctactacaatccaagcgaggatattcagaaaatctataaaaacgggaccttcaagaagggggacatgtttaacctcaacgactgccacaagctcattgatttcttcaaggatagcatttcccgctacccgaaatggtccaatgcgtacgattttaacttctccgagacagaaaagtacaaagacatcgcgggcttttacagggaggtggaggagcaagggtataaagtttcttttgaatccgcgagcaagaaggaagtcgacaagctcgtcgaggagggcaagctctacatgttccaaatttataacaaggacttttccgacaagagccatgggaccccaaacctccacaccatgtacttcaaactgctctttgacgagaacaaccacgggcaaatcaggctgagcggcggcgccgaattattcatgcgcagggcctccctcaagaaggaagagctggtcgtccatccagccaattccccgatcgcgaacaagaacccggacaatccgaaaaagaccaccaccctgtcctacgacgtctacaaggacaaacgcttcagcgaagaccagtacgaattacacatcccaattgcgattaataagtgcccaaagaatatcttcaaaattaatacagaggtcagggtgctgctcaaacacgacgacaatccgtatgtcatcggcattgccaggggcgagcgcaatctgctctatatcgtggtcgtggatgggaagggcaatattgtggagcagtactccctgaacgagattatcaacaacttcaatgggattaggattaagaccgactatcacagcctgctcgacaagaaagaaaaagagaggtttgaggcccgccaaaactggacctccattgagaatatcaaagaattaaaggccggctatatttcccaagtcgtccacaagatctgcgagctggtggagaaatatgacgccgtgattgcgctcgaagacttaaattctgggttcaagaactcccgcgtgaaggtggaaaaacaggtgtatcagaaattcgagaaaatgctgatcgacaaactcaattatatggtggataagaagtccaacccgtgtgccacagggggcgcgctgaagggctatcagatcaccaacaagttcgagagcttcaagagcatgagcacccagaacgggtttattttctacatcccggcgtggctcacctccaagattgacccgagcaccggcttcgtgaacctcctgaagacaaagtatacctccattgccgacagcaagaagtttatctcctccttcgaccgcattatgtatgtgccggaggaggacctcttcgagttcgccctcgactacaaaaacttcagccgcacagatgcggattacatcaagaagtggaagctgtactcctacgggaacaggatccgcatcttcaggaatccaaaaaaaaataacgtctttgactgggaggaagtgtgcctgacatccgcctacaaggaactgttcaataaatacggcatcaattaccagcagggcgacattcgcgccctcctctgtgagcagtccgacaaagcgttttactccagcttcatggccctcatgtccctgatgctccaaatgaggaatagcatcacagggcgcaccgacgtcgacttcctcatcagcccggtgaagaactccgacgggatcttttacgactcccgcaactatgaggcgcaagagaatgcgatcctcccgaagaacgccgatgcgaacggggcctataatatcgccaggaaagtgctctgggccatcgggcagttcaaaaaggcggaggatgagaagctcgacaaggtgaaaattgccatttccaacaaggagtggctggagtacgcgcagacctccgtgaagcacggctcctctggcagctccggctctagcggctcctctggcagctccggctccaagctggagaagtttacaaactgttacagcctctccaaaaccctcaggtttaaagcgatcccggtgggcaagacccaggagaacatcgacaacaagaggctcctggtggaagacgagaagcgcgccgaagactacaagggcgtgaagaagctgctcgataggtactacctcagctttattaacgacgtgctgcacagcatcaaactcaagaatctcaacaactacatctccctcttccgcaaaaagacccgcaccgagaaggagaacaaggagctggagaacctggagatcaacctccgcaaggaaatcgccaaagcgttcaagggcaatgaagggtacaagagcctcttcaagaaagacatcatcgaaactatcctcccagagtttctcgatgacaaggacgagatcgcgctggtgaactcctttaacgggttcacaaccgcgtttaccggcttctttgataacagggaaaatatgttctccgaggaggccaagtccaccagcatcgccttcaggtgtatcaacgagaacctcacccgctacatttccaatatggacattttcgagaaggtggatgcgatcttcgataagcacgaggtgcaggagatcaaagagaagattctcaattccgattatgacgtcgaggatttcttcgaaggggagttctttaattttgtgctcacacaagagggcattgacgtgtacaacgcgattatcgggggcttcgtcacagagtccggggagaagattaaggggctgaatgagtacatcaatctgtacaatcagaagaccaagcagaaactgccgaaattcaagccgctctacaagcaagtcctgtccgatagggaaagcctctccttctacggcgagggctataccagcgacgaggaggtgctggaagtcttccgcaacacactgaataagaatagcgagattttctcctccatcaagaagctcgagaagctctttaagaactttgacgagtacagctccgccgggattttcgtgaagaacgggccggcgatcagcaccatctccaaggacatctttggcgagtggaacgtcatcagggacaagtggaacgccgagtacgacgacatccacctgaagaagaaggcggtggtgaccgagaagtatgaggacgatcgcaggaagtccttcaaaaaaatcggctccttcagcctcgaacagctccaggagtatgccgatgcggatctgtccgtcgtcgagaagctgaaggaaatcatcattcagaaggtcgacgagatctataaagtgtacgggtccagcgagaagctgttcgacgccgactttgtgctcgagaagtccctcaaaaagaatgacgccgtggtggccattatgaaagacctgctcgactccgtgaagtccttcgaaaattacattaaagcgttctttggggaggggaaggaaactaacagggatgagtccttctatggcgactttgtcctcgcgtacgacatcctgctgaaggtcgaccacatttacgacgcgatccgcaactacgtgacacagaagccgtactcctcaggcggaagtggtggaagtggcggtagtaccaacctcagcgacattatcgagaaggaaaccggcaagcaactcgtgatccaggagagcatactgatgctccccgaggaggtcgaggaggtgattggcaataagcccgagtccgatatactggttcatactgcgtatgacgaaagcacagacgagaacgtcatgctacttaccagcgacgccccggagtacaagccctgggccctagtcatccaagacagcaacggtgagaacaagatcaagatgctttctggcggctcaaaaagaaccgccgacggcagcgaattcgagcccaagaagaagaggaaagtcggaagcggagctactaacttcagcctgctgaagcaggctggagacgtggaggagaaccctggacctatggtgagcaagggcgaggagctgttcaccggggtggtgcccatcctggtcgagctggacggcgacgtaaacggccacaagttcagcgtgtccggcgagggcgagggcgatgccacctacggcaagctgaccctgaagttcatctgcaccaccggcaagctgcccgtgccctggcccaccctcgtgaccaccctgacctatggagtgcagtgcttcagccgctaccccgaccacatgaagcagcacgacttcttcaagtccgccatgcccgaaggctacgtccaggagcgcaccatcttcttcaaggacgacggcaactacaagacccgcgccgaggtgaagttcgagggcgacaccctggtgaaccgcatcgagctgaagggcatcgacttcaaggaggacggcaacatcctggggcacaagctggagtacaactacaacagccacaacgtctatatcatggccgacaagcagaagaacggcatcaaggtgaacttcaagatccgccacaacatcgaggacggcagcgtgcagctcgccgaccactaccagcagaacacccccatcggcgacggccccgtgctgctgcccgacaaccactacctgagcacccagtccgccctgagcaaagaccccaacgagaagcgcgatcacatggtcctgctggagttcgtgaccgccgccgggatcactctcggcatggacgagctgtacaagtctggtggttctcccaagaagaagaggaaagtctaaccggtcatcatcaccatcaccattgagtttaaacccgctgatcagcctcgactgtgccttctagttgccagccatctgttgtttgcccctcccccgtgccttccttgaccctggaaggtgccactcccactgtcctttcctaataaaatgaggaaattgcatcgcattgtctgagtaggtgtcattctattctggggggtggggtggggcaggacagcaagggggaggattgggaagacaatagcaggcatgctggggatgcggtgggctctatggcttctgaggcgaaaagaaccagctggggctcgataccgtcgacctctagctagagcttggcgtaatcatggtcatagctgtttcctgtgtgaaattgttatccgctcacaattccacacaacatacgagccggaagcataaagtgtaaagcctagggtgcctaatgagtgagctaactcacattaattgcgttgcgctcactgcccgctttccagtcgggaaacctgtcgtgccagctgcattaatgaatcggccaacgcgcgggaagaggcggtttgcgtattgggcgctcttccgcttcctcgctcactgactcgctgcgctcggtcgttcggctgcggcgagcggtatcagctcactcaaaggcggtaatacggttatccacagaatcaggggataacgcaggaaagaacatgtgagcaaaaggccagcaaaaggccaggaaccgtaaaaaggccgcgttgctggcgtttttccataggctccgcccccctgacgagcatcacaaaaatcgacgctcaagtcagaggtggcgaaacccgacaggactataaagataccaggcgtttccccctggaagctccctcgtgcgctctcctgttccgaccctgccgcttaccggatacctgtccgcctttctcccttcgggaagcgtggcgctttctcatagctcacgctgtaggtatctcagttcggtgtaggtcgttcgctccaagctgggctgtgtgcacgaaccccccgttcagcccgaccgctgcgccttatccggtaactatcgtcttgagtccaacccggtaagacacgacttatcgccactggcagcagccactggtaacaggattagcagagcgaggtatgtaggcggtgctacagagttcttgaagtggtggcctaactacggctacactagaagaacagtatttggtatctgcgctctgctgaagccagttaccttcggaaaaagagttggtagctcttgatccggcaaacaaaccaccgctggtagcggtggtttttttgtttgcaagcagcagattacgcgcagaaaaaaaggatctcaagaagatcctttgatcttttctacggggtctgacactcagtggaacgaaaactcacgttaagggattttggtcatgagattatcaaaaaggatcttcacctagatccttttaaattaaaaatgaagttttaaatcaatctaaagtatatatgagtaaacttggtctgacagttaccaatgcttaatcagtgaggcacctatctcagcgatctgtctatttcgttcatccatagttgcctgactccccgtcgtgtagataactacgatacgggagggcttaccatctggccccagtgctgcaatgataccgcgagacccacgctcaccggctccagatttatcagcaataaaccagccagccggaagggccgagcgcagaagtggtcctgcaactttatccgcctccatccagtctattaattgttgccgggaagctagagtaagtagttcgccagttaatagtttgcgcaacgttgttgccattgctacaggcatcgtggtgtcacgctcgtcgtttggtatggcttcattcagctccggttcccaacgatcaaggcgagttacatgatcccccatgttgtgcaaaaaagcggttagctccttcggtcctccgatcgttgtcagaagtaagttggccgcagtgttatcactcatggttatggcagcactgcataattctcttactgtcatgccatccgtaagatgcttttctgtgactggtgagtactcaaccaagtcattctgagaatagtgtatgcggcgaccgagttgctcttgcccggcgtcaatacgggataataccgcgccacatagcagaactttaaaagtgctcatcattggaaaacgttcttcggggcgaaaactctcaaggatcttaccgctgttgagatccagttcgatgtaacccactcgtgcacccaactgatcttcagcatcttttactttcaccagcgtttctgggtgagcaaaaacaggaaggcaaaatgccgcaaaaaagggaataagggcgacacggaaatgttgaatactcatactcttcctttttcaatattattgaagcatttatcagggttattgtctcatgagcggatacatatttgaatgtatttagaaaaataaacaaataggggttccgcgcacatttccccgaaaagtgccacctgacgtcgacggatcgggagatcgatctcccgatcccctagggtcgactctcagtacaatctgctctgatgccgcatagttaagccagtatctgctccctgcttgtgtgttggaggtcgctgagtagtgcgcgagcaaaatttaagctacaacaaggcaaggcttgaccgacaattgcatgaagaatctgcttagggttaggcgttttgcgctgcttcgcgatgtacgggcc

(The sequence listing continues in the following parts.)
